United States Patent Application Publication US 2026/0317762 A1, published October 15, 2026 (application 19/481,366).

The application's sequence listing, which the Patent Office published only in electronic form, follows.

SEQUENCE LISTING (25574 sequences)

SEQ ID NO: 1 - DNA, 367 bp, unidentified
  source 1..367: mol_type = unassigned DNA; note = Human parechovirus 4 strain R12644/1999/HUN 5' UTR
tgaggtgtctgatgaggtgtgggaacttattggaagtgattacttgctgcaaagcatcctattgccagcggatcaacacctggtgacaggtgcccctggggccaaaagccaaggtttaacagaccctctaggattggtttaaacctgagtagtcatggaaaatacttagtacctgccaatttggtaacagtgcaaacactagttgtaaggcccacgaaggatgcccagaaggtacccgtaggtaacaagtgacactgtggatctgatctggggccatctacctctatcttggtgaggtggttaaaaaacgtctagtgggccaaacccaggggggatccctggtttcctttatcataccactatcatt

SEQ ID NO: 2 - DNA, 368 bp, Parechovirus A
  source 1..368: mol_type = genomic DNA
tgagacgtctgatgacgtgtgggaacttattggaagtaacaatttgctgcaaagcatcctattgccagcgggtgaacacctggtaacaggtgcctctggggccaaaagccaaggtttaacagaccctctaggattggttaaaacctgaattgttatggaaaatatttagtacctgccaatttggtagtattgcaaacactagttgtacggcccacgaaggatgcccagaaggtacccgaagttaacaagtgacactatggatctgatctggggccaactacctctatcttggtgagttggttaaaaaacgtctagtgggccaaacctgggggggatccccagtttccttttattttatcattgccact

SEQ ID NO: 3 - DNA, 373 bp, unidentified
  source 1..373: mol_type = unassigned DNA; note = unclassified Parechovirus sequence
tttgtaagacgtctggtgacgtgtgggaacttattggaaataacatattgctgcaaagcatcctattgccagcggaacaacacctggtaacaggtgcctctggggccaaaagccaaggtttaacagaccctctaggattggtttaaaacctgatatgttgtggaagatacttagtacctgttgatctggtagtagtgcaggcactagttgtaaggcccacgaaggatgcccagaaggtacccgtaggtaacaagtgccactatggatctgatctggggccaggtacctctatcttggtgacctggttaaaaaacgtctagtgggccaaacccgggggggatccccggtttctttttattttattaatagcatt

SEQ ID NO: 4 - DNA, 389 bp, Pegivirus B
  source 1..389: mol_type = genomic DNA
ggcatgggtccactggcgcgctgacgaaggtgcgcgtgctttgtaggcacggtccacaggtgtgcccactaccggtgtgaataagtgggggtctggagcgtcagaccttaaacctagtggtgcctgggatcgcaacgtggctcacgtacgccaacgccgcttaaaaccttcgggacagctatgcgggttgacaatggcagtgaggcgcggcaccgaccgtggatccggaatcggtgtgcgagttccccagtcgctagcccgtaagggcaagcatgggtccccccagctggcgcagcgctacatgcggcaagaggaagaaccttcgggtgacctcggggggaatgtccgttctcaatgagctgaggagcatcgcacggctcgtcgccaag

SEQ ID NO: 5 - DNA, 398 bp, Parechovirus D
  source 1..398: mol_type = genomic DNA
ctacctatcctacttcttgtatatcattctttgctattaagtagggatcccctgctatttgcaggtgtgcttgcagtggagctacacaactgtggccgaggcacggctcgcccccgtgtattaggactcttttgtgccactgttaagcggacgtatgtcagttgagtgatatctcagtgataaaccatgagtacatggtaatcctggcgtggactcattgggacggtatttcctatcccgtagactccttgtagccaggtgggcatgcccaatcacaatggtagcacctctcatgggagtgagggggcctgagttagtactcagtcacacagcctgatagggtagcggctctgctactgaccagcgtctttaaataactgagagctgtttattaacct

SEQ ID NO: 6 - DNA, 419 bp, Pegivirus B
  source 1..419: mol_type = genomic DNA
gtggtaaatcccggctacggtggatccatgaatagcgtagggtgtgccaccactgctgggtgggacgacgcaggatcaaaggggacggcacggtccacaggtgagccaaccggtgtgaatatggcacgtctttgggcatgacgttaaactgagacgccctgcaggatgacaacatggctgagggttgcggaacgccgcttaaaaccattcgtggacagcgatgcgggttgacaatccgtcctcaggcgtggcggccatattggttggtcgtgtcagttcccttcagggtgcgcttcggcgaagcatggccccccccagctggcgcaggcccacatgcggcaagacgaaaaatccttcgggtgacgtcgggggggattttccctttacctacatgcatgttgttccgtttcggcgcaacc

SEQ ID NO: 7 - DNA, 421 bp, Parechovirus A
  source 1..421: mol_type = genomic DNA
tctattagtgagataccacgcttgtggaccttatgctcacacagccatcctctagttagttggtgaggtgtctggtgacgtgtgggaacttaccggaagcattattttgctgtaaggcatccattagccagcggaacaacacctggtaacaggtgcccctggggccaaaagccaaggtttaacagaccctaatggattggttcaaacctggaataatgtggaaggtacttagtacctgccgaactggtagcaatgccaacactagttgtaaggcccacgaaggatgcccagaaggtacccgtaggtaacaagagacactatggatctgatctggggccaactacctctatcttggtgagttggttaaaaaacgtctagtgggccaaacccaggggggatccctggtttcctaatttttact

SEQ ID NO: 8 - DNA, 426 bp, unidentified
  source 1..426: mol_type = unassigned DNA; note = unclassified Pestivirus sequence
gtataagggatgggatccttgtacatttcatacctctaccgaacagtatttgggagttctttttacctgccgtacagtattgggatttaaacaactaaatgtttacaaatcacgtgtgtggtggcggggatagaccgtgccagcggttgtgtaccagcaatcacaaacaacacgtggactgcaatccaggagagcacctaggtctgttaagttgtgagtacacgacattcgtcaatgagtcagctggtaaggatcacccacctggatactcatgtggacgagggagtttcccaaacagtaacctactctgggggaggggtcccccagagacaatttgtctcaaatatgggataagttggggtgtgctgcctgacagggtctcggctgatagcctggaaagcagtataatatcagttgaattggcat

SEQ ID NO: 9 - DNA, 436 bp, unidentified
  source 1..436: mol_type = unassigned DNA; note = unclassified Parechovirus sequence
ataattctatcagtgggataccacgcttgtggatcttatgcccacacagccatcctctagtaagtttgtaagacgtctgatgacgtgtgggaacttattggaagtgacattttgctgcaaagcatcctattgccagcggaataacacctggtaacaggtgcctctggggccaaaagccaaggtttaacagaccctttaggattggtgttaacctgaagtgttatggaaaatatttagtacctgctgatttggtagtaatgcaaacactagttgtaaggcccacgaaggatgcccagaaggtacccgtaggtaacaagagacactatggatctgatttggggccaactacctctattaaggtgagttggttaaaaaacgtctagtgggccaaacccaggggggatccctggtttccttttattttactacattcaac

SEQ ID NO: 10 - DNA, 439 bp, Parechovirus A
  source 1..439: mol_type = genomic DNA
tgccataactctattagtgagataccatgcttgtggaacttatgctcacacagccatcctctagtaagtttgtaagacgtctggtgacgtgtgggaacttgtgggaatcaatgccttgctgtaaagcatccattagccagcggacaaacacctggtaacaggtgcctctggggccgaaagccaaggtttaacagaccctaatggattggttcaaacctgagacattgtggaacacacttagtacctgctaatctggtagtaatgcaaacactagttgtaaggcccacgaaggatgcccagaaggtacctgtaggtaacaagtgacactatggatctgatctggggccagttacctctatcttggtgaactggttaaaaaacgtctagtgggccaaacccaggggggatccctggtttcctttttattttactagtcatt

SEQ ID NO: 11 - DNA, 441 bp, Parechovirus A
  source 1..441: mol_type = genomic DNA
cataactctattagtgagataccatgcttgtggaccttatgctcacacagccatcctctagtgagtttgcaagacgtctgatgacgtgtgggaacttaatggaaacaatatcttgctataaagcatcttactgccagcggaacaacacctggtgacaggtgcctctggggccaaaagccaaggtttaacagaccctttaagattggttcaaacctgaggtattgtggaaattatttagtacctgccgatttggtagtagtgcaaacactagttgtaaggcccacgaaggatgcccagaaggtacccgtaggtaacatgtgacactatggatctgatctggggccaactacctctatcaaggtgagttggttaaaaaacgtctagtgggccaaacccaggggggatccctggtttcctttatcttatcacacaattatcatt

SEQ ID NO: 12 - DNA, 471 bp, unidentified
  source 1..471: mol_type = unassigned DNA; note = Kobuvirus cattle/Kagoshima-1-22-KoV/2014/JPN genomic RNA, nearly1 sequence
catccccaatatgttcggtgaggaatgctaccacgtaactattagtgaacccattgactgttctgccctggcaaggctatagagtacagtgttccgctgtggatgccgtcctggtaacaggatccccagtgtgtgtagctgtatgttcaacttcggttgttcacagtccttggtctagcttttagtgaaatggtgtgcgccatatccctacatttgggtgccacctctcaacccctaggaatgctaggaaggtaccccaccctccggtgggatctgatcctaggctaattgtctatggggttgtttccttttcttttcaccactcattactggctcacagattgtttgttgtgttccctgctctctctagctcccaacacggcacacagtctcagccacaccgcctttgcaaacgactaccagatttgtttctttgactcctctgattctcacatcttcactgaaccagac

SEQ ID NO: 13 - DNA, 481 bp, unidentified
  source 1..481: mol_type = unassigned DNA; note = unclassified Avihepatovirus sequence
gttgggtttacgtaagtattacccaaccctcctttcaacgtctggcccacgatacgggccaccctttcctatctcctctctttccaagtaagatattttattggttaactgacctctgtgcggcacgacaatgatgtggacaagtgttttacttaggtggtttagccagccatttcctcggcaatagcttctaggagaggagaaatggtaggtgcaacctggtaatggttctcctgaaatcgtccagtagggaggatcctcttccagataattgtactgactaggtgaagtagactggactagctgtgaggtccggggccagcattgctataccccctctaatccggcgtggatttccggccattggatagagcttacagctagcagggtattggggtaaccctgttgatccagactcctgataaggggaactgcctgtttcacgacccacctagtataaaatacaggctgtatttatgaa

SEQ ID NO: 14 - DNA, 488 bp, unidentified
  source 1..488: mol_type = unassigned DNA; note = Eel picornavirus 1 strain F15/05, complete genome.1 sequence
cacatggaaagcttttcgcttccatgtttacgcacacactctctttgacaccctgttgtatggtgttaaactacaacatttgtctgtctataatcgtttattttgtttaccctatatgtacccaagtatttgattgcttgactcacataagcatcggtaacccatactgttttatgagctactacctctgctgtctacatacattttatatgaatggtttgagctctgcctcaggatcaaacatggtaacatgttcctttggtcagttagaatcttattgtataatctaaggtgtctattagtacgtagaaagttgtaacacatatggggcctgatagccgctatctctgatggatgtaaggtaaccttctttaggtctgatacattctgcacaggatccaattttcggtgccctgtacgagtgcactcttatgcacgaggacgagatatgctacaacccactgcaaatttaaacccaaactttaaca

SEQ ID NO: 15 - DNA, 509 bp, unidentified
  source 1..509: mol_type = unassigned DNA; note = unclassified Picornaviridae sequence
ctccccccccttccccttcccgagtaggagattggcatgtatgctctacatgcccgattctctcttgctcactctcttaaatcctggtggcggtctcggattaaacatttatgtcgtatctgggatcgtcttacttggtggtaattcctctgttgcctagggacctccggactgccggattaaaggtctcaacagagggcaatgtacaaggaagtcattatacgctaattaagtatttgatgaatgactagtgtgacagggctgaggaactccccccgggtaaccggtgcctcagcgtccgaaagacacgtggataggatccaccctgttatacccagcacgatgtaatagtcaaatacctctgatttgtgtaggatgtataaattgtgcattgtaaattttgggcgtagagatgctccgaaggtaccccgttttacgggatctgatcggaggctaattacccaatgcgccctaaataacttcatataatttctttttctttattcaaa

SEQ ID NO: 16 - DNA, 519 bp, unidentified
  source 1..519: mol_type = unassigned DNA; note = Goose megrivirus isolate W18, complete genome.1 sequence
ttcgggacactggatgggcgacttggtggggctgccactctatcttgacctttcgttactgactttcggatctctgactcctccttgtctcttgcgtttggtccacggacggactaattggaatgtttactggctaagcctcgttctgaaataccctagccaatgggttgtagtaggatcctggtgtttccattaaacctcttccgaccatagtagctagagttatggctgtgtaggatgtgggtaagaccgctttttgcgtatctcccacaagacaccggattatggatgtgtccgctggataaggctcgaaacctcccaactgaaggtggtgctgaaatattgcaagcctaggttgtgtagaggcaagtagatgcctgccgcgacattcgtcttccgcccttttgggttagtagtgtacctacatggacgtggggctgggaatccccaccttgcataacactggttgatagacctgcggctggtcaagttactatggtataaccagttgaaatggct

SEQ ID NO: 17 - DNA, 519 bp, unidentified
  source 1..519: mol_type = unassigned DNA; note = unclassified Kobuvirus sequence
accctcttttccggcggcgcaagttcgcgtcgtcgtaagcctggactcccatggtgtacatcggtttccgggcaaatacaagaaccccagttttcctggtaattccttgactgggtcaaagaaataaggaaccagcccctctaacgccagacgagcggctttaaacttgaacttctggcacaatttcttccactaccctttccccaaactcggactgactcactggattttgaccttccccctttgtctgaccactcttttggatctccctccaatatgccggtggtgcctggcggaaaaagcacaagttgtgtgagcaacacccccacaggtctcacggaacggtctgtgcccgcagatctagtacgtgcggatccctggttgcttccactgctcgcctgtgagtagagtaggtgctgggtgtgatgtgtcttcggacacctcgggcatagcattgctcccccgagaatcaagccatcgagatttctctggcctctgaagtcacgcctggacgcgtag

SEQ ID NO: 18 - DNA, 528 bp, unidentified
  source 1..528: mol_type = unassigned DNA; note = unclassified Pegivirus sequence
gtcaggtggaaggcctgaaaccgatcctacaattggagagtaaccaacatgctcattaacacctcgggctggctcgaaagccggtgttgggcagatggcagggttcttagggtaaatcccggtctgtctggatccggtatagagctggcactggaggtccactgttggcttgctgaagtgctcagaagattgatggacacggtacacaggtttggatgcaccggtgtgaatagcgtcccgtcaggagcgtctgacgttaaactgagtccccctcaacgatcgcaacatgggattgcgtacggacacgccgccaaaacccttcggggacagctatgcgggttgacaagtccagcagtcgcgtggggcctatattgtttaggcctgcgagttccggtttgggggagccgaaaggcagccatgggggtaccaaggcggcgtcgcgctacaggcggcaaggggaaaaatccttcgggtgacccctggtaccatttttccttattgggtgttatgggtgtcggaaacgccacc

SEQ ID NO: 19 - DNA, 528 bp, Parechovirus A
  source 1..528: mol_type = genomic DNA
ttgtgtcaaatttgtagtgtttacagtagttgtagcttgcacgacatccttgttctccggttgggctgtggttgcaaaactatttggtcctagtaaattagaagcatcatctgcaactttggttattatttccccgccaacttcattgccagaaataatattattagcttcagtttctacattagacaaggagagagtatccatagcaccagtagcaacattaactaaatccttgatagactccataatggctgtttaaaattaaaagaaaaccagggatcccccttgggattggtttaaacctgaactactatggaagacatttagtacctgccaatttggtagtagtgcaaacactagttgtaaggcccacgaaggatgcccagaaggtacccgtaggtaacaagagacactatggatctgatctggggccaactacctctatcttggtgagttggttagaaaacgtctagtgggccaaacccgggggggatccccggtttcctttatttaataattagattcatt

SEQ ID NO: 20 - DNA, 531 bp, unidentified
  source 1..531: mol_type = unassigned DNA; note = unclassified Pegivirus sequence
gccgggtggaaggcccggaaccgccccaccacctcaactaggtggtaagggtacgtctatcggtccggctggcccgaaaggcggtggatcctgtgtgttagggttcgtaggtggtaaatcccagcacaggtggtaatcgctatagggcaggcttatcccggtgaccgcttccctggatcctggagcgggtcgtggcggcacggtccacaggagtggggcctccggtgtgaataagccctcgtctggagcatcagacgttaaactgagacgtcccgaagagatcggaacgacgccccacgtatggcaacgccgcttaaaacccttcggggacagctatgcgggttgacaatgccagtggggggccgggcccactattgttgtgggctccgagttcctctagggatggccgaaaggcagccatggggccacccaggcggcgccgtgctacaggcggcaaggggaaaaatccttcgggtgaccccgggtggcattccctcccttagcagcatgagtgtggtggtagctgcaacc

SEQ ID NO: 21 - DNA, 537 bp, Parechovirus A
  source 1..537: mol_type = genomic DNA
gatatcatcttgcaataagaagagtggggttaagacgcttaaagcatagagacaattttcttttctaacccacatttatgtggggtggcagatggcgtgccatgactctattagtgagataccacgcttgtggaccttatgctcacacagccatcctctagtaagtttgtgagatgtctgatgacgtgtgggaacttattggaagcaacattttgctgtaaagcatcctattgccagcggaacaacacctggtaacaggtgcctctggggccaaaagccaaggtttaacagaccctttaggattggttcaaacctgaaatgctgtggaaaatatttagtacctgccaatttggtagtaatgcaaacactagttgtaaggcccacgaaggatgcccagaaggtacccgtaggtaacaagtgacactatggatctgatctggggccaaatacctctatcttggtgatttggttaaaaaacgtctagtgggccaaacccaggggggatccctggtttccttttattttataatcgctatt

SEQ ID NO: 22 - DNA, 544 bp, unidentified
  source 1..544: mol_type = unassigned DNA; note = unclassified Aphthovirus sequence
tggcacaccttacctcgaaacaagctcgtccttttgctgtgcaacacagtctgtcctgttacacttgtgacggctcgcgacactgtttgcatagtgaaatcgaccaagacagcaattccaaatggtgaacctcgaacacccaagctggatccgtagctggacatgttagggtaaggaattcctccctggtaacagggaccttactggccaaaagccctgctctttgagcctagcatgttgttgaccccgaactgtccagtttggttagtacagggaattcatttgttgtggttgttcagaactcgacttctagtgagacagcctaaggatgccctccaggtaccctggggtaacaagtgacacccaggatctgaggaggggatcaccctgcgtgatttaaaaaacttctaagctgtcacggtgaccagaggctggcacctttcacttttaccacttctcaattgatcacaaacaaaggaattacgtaattgcagacccacaaactagttacacgagtactgttcttacttttaatacttgttat

SEQ ID NO: 23 - DNA, 546 bp, unidentified
  source 1..546: mol_type = unassigned DNA; note = unclassified Hepacivirus sequence
tgccatagagtggaacgtgtctacattgcgaaaatcaggtgtgaaaggcattgttggagcagaagggtgctgagtcaagttagttgtgttgacagttgttgtagcttgtacgacatccttgttttcaggtgttgaagtcgttgcaaaacaatttggtcccagaacattcgatgcatcatcagccactttggttaacatgtcaccaccagctgcattactggggtttgtgatggtctcattaacagtgttgacagtagagtcaattgtcttagtgattccagtagccatatctgcaacacccttgattgtctccatagctgtgaataaaaataaaaggaaaccagggtcccccctggatttggtaaccgtgcttatactagttgtaaggcccacgaaggatgcccagaaggtacccgtaggtaacaagtgacactatggatctgatctggggccaactacctctatcttggtgagttggttaaaaaacgtctagtgggccaaacccaggggggatccctggtttccttttattttatcataatcact

SEQ ID NO: 24 - DNA, 560 bp, unidentified
  source 1..560: mol_type = unassigned DNA; note = unclassified Riboviria sequence
gccgggtggaaggcccggaaccgaccctagggtggaacctggatgagggtgtggaagagactcccccatcggtccgaaagctggtggatggcgtgcggcagggttccgcaggtgggtaaatcccggcacgcttggatccggtataggataggtgggagccgaccggtcgaccccggtctggaccaccacggaagcacctgagcccggcggaagccccgtgggcacggtacacaggttgggcctaccggtgtgaataaggccccgtctcgagcggagacgttaaactgagaggtcctggtggatgggaacccggccctgcgtgttggaacgtcgctaaaacccttaggggacaatttccgaccgcgagttggcaaacctagcaggggcgggggcagtaggatggatctccgatctgctcccagttcccaccagggtcgccgtaaggcaagcatggggcccccaagctggcgcggcgctacacgcggcaagaggaagaaccttcgggtgacctctgggggcatgttggcttttcatgatgatgtgtggttgcagctgcaatc

SEQ ID NO: 25 - DNA, 563 bp, unidentified
  source 1..563: mol_type = unassigned DNA; note = unclassified Rabovirus sequence
cctcttttcttggcaaataagatggtggaccaaggtcgtctgtagttgtttggaacatttctttctaatgacttatgtcagcggtgaactcacaccgtaactcttctaccctatccccacacttgtggaactaggaggggatgagtgattcaagtaagtactgtcagaatggtgaaaatgatctgattctgaaacatcatggatccatcgtaagatggggctacacgcctgcggaacaacacatggtaacatgtgccccaggggccaaaagccacggtgataggatcacccgtgtagtttgagatcatatcaatgttcatggtctagtaagatgatttgaaatctaactgagctgatggctaactgcttgtcttattgcggcctaaggatgccctgcaggtacctttagataaccttaagagactattgatctgagcaggggccaaggtggtctttcccagccttggttaaaaagcgtctaagccgtggcagggggcgggaggccccctttcctcccaaactttaatattgattgtatggtgacaactgaaagacatagcaca

SEQ ID NO: 26 - DNA, 570 bp, unidentified
  source 1..570: mol_type = unassigned DNA; note = unclassified Parechovirus sequence
ctattaactatagccttgtgcctggtccccactagtcgaaggcatcttgcaataagataagtggaataaggacgcttaaagcacaatgaaagttaacttttctaacccacactatggtgtggggtggcagatggcgtgccataactctattagtgagataccacgcttgtggaccttatgctcacacagccatcctctagtaagtttgtaagacgtctggtgacgtgtgggaacttgtgggaatcaatattttgccgtaaggcatccattagccagcggataaaacacctggtaacaggtgcctctggggccaaaagccaaggtttaacagaccctaatggattggttttgaaacctgaaatattgtggaacacacttagtacctgctgatctggtagttatgcaaacactagttgtagggcccacgaaggatgcccagaaggtacccgtaggtaacaagagaaactatggatctgatctggggctgactactcctatctttgtgagtcagttaaaaaacgtctagtgggccaaacccaggggggatccctggtttcctttaattctatc

SEQ ID NO: 27 - DNA, 589 bp, Bovine rhinitis B virus
  source 1..589: mol_type = unassigned DNA
cgggtttgctgctttcacatagtaaagcagatagaggttttgtaatggcgcactttacctcgaaacaagctcgttgttttgctgtgtaacacggtctgtcctgtcacacttgtggcggctcgtgacactgtgcgcatagtgaaatcgaccaagacagcaacttcaaatgatgaacctcgaacacccaagctggatccgtagctggacatgttagggtaaggaattcctccctggtaacagggaccttactggccaaaagccctgctctttgagcctagcatgttgttgaccccgaactgtccagtttggttagtacagggaatttatctgttgtggttgttcagaactcgatttctagtgagacagcctaaggatgccctccaggtaccctggggtaacaagcgacacccaggatctgaggaggggatcaccttgcgtgatttaaaaaacttctaagctgtcacggtgaccagaggctggcacctttcacttttatcacttttaaactgaccacaagcaaaggaattacgtgactacaggctctcaaactagttacacgagtactgtttttacttttgacatttgttgt

SEQ ID NO: 28 - DNA, 591 bp, unidentified
  source 1..591: mol_type = unassigned DNA; note = unclassified Parechovirus sequence
caacaaacatctaagacaattacatacaaccttgtacctggtccccaccagtcgaaggcatctagcaataagatgggtggaacaaggatgcttaaagcacaaagacaattaacttttctaacccacaatttattgtggggtggtagatggcgtaccataactctattagtgagataccatgcttgtggatcttatgctcacacagccatcctctagtaagtttgtaaggtgtctgatgatgtgtgggaacttattggaaacaacattctaccgtaaggtatccattagccagcggaacaacacctggtgacaggtgcctctggggccaaaagccaaggtttaacagaccctaatggattggttcaaacctgggatgttgtggaaaatatttagtacctgctgatttggtagcagtgcaaacactagttgtaaggcccacgaaggatgcccagaaggtacccgtaggtaacaagagacactatggatctgatctggggtcaactacctctatcttggtgagttgattaaaaaacgtctagtgggccaaacccaggggggatccctggtttccttttacttatcaaaatgatc

SEQ ID NO: 29 - DNA, 592 bp, unidentified
  source 1..592: mol_type = unassigned DNA; note = unclassified Parechovirus sequence
aatgtaactaacatctaagacaactattttacaaccttgtacctggtctccactggtcgaaggcaacttgcaataagataagtggaatgaagacgcttaaagtacaatgtaagtaatcttttctaatccacaattctgtggagtggcagatggcgtgccataactctaatagtgagataccatacttgtggacctcatgctcacacagccatcctctagtaagtttgtaagacgtctggtgacgtgtgggaacttatgggaatcaatgttttgctgcaaggcatctattagccagcggataaacacctggtaacaggtgcctctggggccaaaagccaaggtttaacagaccctaatagattggtttatacctgaaacattgtggaacatattcagtacctgccgatctggtagtaatgcaaacactagttgtaaggcccacgaaggatgcccagaaggtacccgtaggttacaagggacactatggatctggtctggggctgagtacctctatcttggtgactcagttaaaaagcgtctagtgggccaaacccgggggggatccctggtttcttttattttaatggtcact

SEQ ID NO: 30 - DNA, 592 bp, Parechovirus A
  source 1..592: mol_type = genomic DNA
cgtaacaaacatctaagattatcatattaaccccatgcctggtctccattagttgaaggcaacttgcaataaaataagtggaaataagacgcttaaagcatggtgtaagttttcttttctaactcacatcttgtgtggggtggcagatggcgtgccataactctattagtgagataccacacttgtggaccttatgctcacacagccatcctctagtaagcttgtaagacgtctggtgacgtgtgggaacttattggaaacatcattttgctgcaaagcatcctattgccagcggaacaacacctggtaacaggtgcccctggggccaaaagccaaggtttaacagaccctttaggattggttctaaacctgaaatgttgtggaagatatttagtacctaccaatctggtagtattgcaagcactagttgtacggcccacgaaggatgcccagaaggtacccgtaggtaacaagtgacactatggatctgatctggggtcaactacctctatctaggtgagttggttaaaaaacgtctagtgggccaaacccaggggggatccctggtttccttttatcttaaatagtgact

SEQ ID NO: 31 - DNA, 592 bp, Parechovirus A
  source 1..592: mol_type = genomic DNA
taacaaacatctaagacaaacaattacgaccttatgcctggtccccaccagtcgaaggcatctagcaataagataggtggaacaaggacgcttaaagcataaagacaataatcttttctaactcacacattggtgtgaggtggcagatggcgtgccataactctaatagtgagataccacgcttgtggaccttatgctcacacagccatcctctagtaagtttgtgaggtgtctgatgacgtgtgggaacttgttggaaatgacagcttgctgcaaagcatcccattgccagcggactaacacctggtaacaggtgcctctggggccaaaagccaaggtttaacagaccctttgggattggttcaaacctgagctgtcatggaagacacttagtacctgctgatttggtagcaatacaaacactagttgtaaggcccacgaaggatgcccagaaggtacccgtaggtaacaagtgacactatagatctgatctggggccggctacctctatcttggtgagtcggttaaaaaacgtctagtgggccaaacccaggggggatccctggtttccttttattttactaatgcaact

SEQ ID NO: 32 - DNA, 593 bp, unidentified
  source 1..593: mol_type = unassigned DNA; note = unclassified Parechovirus sequence
tgtaataatcttagatgtttgttacattaaccccatgcctggtctccactagttgaaggcagcttgcaataaaatgagtggaagcaagacgcttaaagcatggtgtaaattagcttttccagcccacaccttgtgtggggtggcagatggcgtgccataactctattagtgagataccatgcttatggaccttatgctcacacagccatcctctagtaagtttgtgagacgtctggtgacgtgtgggaacttattggaagcaacattttgctgtaaagcatcctattgccagcggaacaacacctggtaacaggtgcctctggggccaaaagccaaggtttagcagaccctttaggattggtttaaaacctgaaatgttgtggaagatacttagtacctaccgatctggtagtagtgcaaacactagttgtaaggcccacgaaggatgcccagaaggtacccgtaggtaacaagagacactatggatctgatctggggccgggtacctctatcttggtgacctggtttaaaaacgtctagtgggccaaacccgggggggatccccggtttccttttattttatcaatgccact

SEQ ID NO: 33 - DNA, 594 bp, unidentified
  source 1..594: mol_type = unassigned DNA; note = unclassified Parechovirus sequence
actgtaactaacatctaagacaactattatacaaccttgtacctggtccccactagtcgaaggctacttgcaataagataagtggactaaggacgcttaaagtacaatgtaaacaatcttttctaatccacaattttgtggagtggcagatggcgtgccataaccctattagtgagataccacgcttgtggaccttatgctcacacagccatcctctagtaagtttgtgagatgtctggtgatgtgtgggaacttatgggaagtaatgtcttgctgtaaagcatccattagccagcgggtaaacacctggtaacaggtgcctctggggccaaaagccaaggtttaacagaccctaatggattggttcaaacctgggacattgtggaacatacttagtacctgctgatctggtagttatgcaaacactagttgtaaggcccacgaaggatgcccagaaggtacccgtaggtaacaagagacactatggatctgatctggggctgagtacttctatcttagtgactcagttaaaaaacgtctagtgggccaaacccgggggggatccccggtttcctttattttacaactaccatc

SEQ ID NO: 34 - DNA, 595 bp, unidentified
  source 1..595: mol_type = unassigned DNA; note = unclassified Parechovirus sequence
gcacacacgaaaaggaatgcctgttgcattaaccccatgcctggtctccactagttgaaggcaacttgcaataaaatgagtggaaacaagacgcttaaagcatggtgtaaattaacttttctaacccacaccttgtgtggggtggcagatggcgtgccataactctattagtgagataccacgcttgtggaacttatgctcacacagccatcctctagtaagtttgtgagatgtctggtgacgtgtgggaacttattggaaacaacattttgctgtaaagcatcctattgccagcggaactacacctggtaacaggtgcctctggggccaaaagccaaggtttaacagaccctttaggattggtttaaaacctgaaatgttgtggaagatacttagtacctaccgatctggtagtattgcagacactagttgtaaggcccacgaaggatgcccagaaggtacccgtaggtaacaagagacactatggatctgatctggggccaggtacctctatcttggtgacctggttaaaaaacgtctagtgggccaaacccgggggggatccccggtttcattttgttttaccaatgccact

SEQ ID NO: 35 - DNA, 595 bp, unidentified
  source 1..595: mol_type = unassigned DNA; note = unclassified Parechovirus sequence
actgtaacaaacatctaagattattgcatgctttaagcgtcttgtttccactagttgaaggcaacttgcaataaaataagtggaaacaagacgcttaaagcatggtgtaagttaacttttctaacccacatctcatgtggggtggcagatggcgtgccataactctattagtgagataccacgcttgtggaccttatgctcacacagccatcctctagtaagtttgtgagacgtctggtgacgtgtgggaacttattggaaacagcattttgctgtaaagcatcctactgccagcggaacaacacctggtaacaggtgcctctggggccaaaagccaaggtttaacagaccctttaggattggtttaaaacctgaaatgttgtggaagatactcagtacctaccgatctggtagtattgcaaacactagttgtagggcccacaaaggatgcccagaaggtacccgtaggttacaagagacactatggatctggtctggggccaggtacctctatctcggtgacctggttaaaaaacgtctagtgggccaaacccgggggggatccccggtttccttttgttttactaatgccatt

SEQ ID NO: 36 - DNA, 596 bp, unidentified
  source 1..596: mol_type = unassigned DNA; note = unclassified Parechovirus sequence
actgtaactaacacctaagcttacatcacagataccctatgcctggtccccaccagtcgaaggcatctagcaataagatgggtggagcaaggacgcttaaagcatagtgttattatgcatttctaactcgtgttcaacacgaggtggcagatggcgtgccataactctattagtgagataccacgcttgtggatcttatgctcacacagccatcctctagtaagcttgcaaggcgtctgatgacgtgtgggaacttattggaaataacagtttgctgcaaagcatcctattgccagcggatcaacacctggtaacaggtgcctctggggccaaaagccaaggtttgacagaccctctaggattggttcatacctgaactgttatggaagatacttagtacctaccaatttggtagttaggcaagcactagttgtaaggcccacgaaggatgcccagaaggtacccgtaggtaacaagtggcactatggatctgatctggggccaactacctctatcctggtgagttggttaaggcatccttcgtgggccaaacccaggggggatccctggtttcctttaaatttaatacaatcaat

SEQ ID NO: 37 - DNA, 597 bp, unidentified
  source 1..597: mol_type = unassigned DNA; note = unclassified Parechovirus sequence
actgtaactaacatctaagctgatattccagccacctcaaggctggtccccactcgtcgaaggcatctagcaataagataagtggaagaaggatgcttaaagcatagtgttaatatgcatttctaacctgtgattatcacggggtggcagatggcgtgccataactctattagtgagataccacgcttgtggaccttatgctcacacagccatcctctagtaagtttgcaaggcatctgatgacgtgtgggaacttattggaaacaacagtttgctgcaaagcatcctactgccagcggaacaacacctggtaacaggtgcctctggggccaaaagccaaggtttaacagaccctttaggattggttcacacctgaactgttgtgaaagatatttagtacctactgacttggtagttaggcaaacactagttgtaaggcccacgaaggatgcccagaaggtacccgtaggtaacaagagacactatggatctgatctggggccaactaccactatcatggtgagttggttaaaaaacgtcttagtgggccaaacccaggggggatccctggtttccttttactttaatacaatcatt

SEQ ID NO: 38 - DNA, 603 bp, Bovine rhinitis B virus
  source 1..603: mol_type = genomic DNA
tatcattcgaagatgtgcggttttgctgctttcacagagtaaagcagatagaggttctggactggcaaactttacctcgaaacacgcccgttttcctgctgtgttttacagactgtcctgccacacttgtggcggcttgtgacactgtgaacatagtgagaccgaccaagagaacagttccaagtgatgaacaccgaacacctagactggatccgtagctggacatgttagggcaaggatttcccccctggtaacaggagccttgctggccaaaagccccgctctttgagcctagcatgttgtcgaccccggactgtccagtctagttagtacatgggattcacttgtcatggttcttctaaactcggtctctagtgcggcagcctaaggatgccctccaggtaccccggggtaacaagcgacacccgggatctgaggaggggactactttacgtagtttaaaaaacgtctaagctgttacggtgaccagaggctggcacctttcattttttaaaacaaactactgattacaattgaagtgataacggttttacagactttcaaactagtagcacaagtactgttttccaacgcacacatttt

SEQ ID NO: 39 - DNA, 604 bp, unidentified
  source 1..604: mol_type = unassigned DNA; note = unclassified Parechovirus sequence
atcataaccaatacgatttctcattccatctcgaccgcttctaccacctctaccgccacgtcctccacgagcatcaagaaattcacgaaattcatcgagaatgcttaaagcatagtgttagtatgcattcttgatgctcgtggaggacgtggcggtagatggcgtgccataactctatcagggtgataccacgcttgtggatcttatgctcacacagccatcctctagtaagcttgcaaggcgtctgatgacgtgtgggaacttattggaaataacagtttgctgcaaagcatcctattgccagcggatcgacacctggtaacaggtgcctctggggccaaaagccaaggtttaacagaccctctaggattggttcacacctgaactgttatggaaaatacttagtacctaccgatttggtagttgtgcaagcactagttgtagggcccatgaaggatgcccagaaggtacccgtaggtaacaagtgacactatggatctgatctggggccaactacctctatcctggtgagttggttaaaaaacgtctaatgggccaaacccaggggggatccctggtttcctttaaatttactacaaccaat

SEQ ID NO: 40 - DNA, 604 bp, unidentified
  source 1..604: mol_type = unassigned DNA; note = unclassified Aphthovirus sequence
ctgcagatatcaagatgtgcgggtttgctgctttcacagagtaaagcagatagagattttgtattggcacacttaatctcgaaacgcgctcgttctgctgtgtagttcagtctgtcctgtcacacttgtgacggctcgcgacactgtacacatagtgaaaccgaccaagacaaaagcttcaaataatgaacctcgaaatcccaaactggatccgtagctggacatgttagggtaaggaacacccccctggtaacagggaccttactggccaaaagccccgctctttgagcctagcatgttgttgatcccgaactgttcagtttggttagtacagggaatttctttgctgtctttgttcagaactcggtttctagtgagacagcctaaggatgccctccaggtaccccggggtaacaagcgacacccgggatctgaggaggggaccgccccgcgcggtttaaaaaacttctaagctgttgtggtgaccagaggctggcacctttcactttaaaacacttattaactggtcacaaacaaaagaattccgttttacagactttcaaactagttacacaagtactgtttcacttacaacaattgttat

SEQ ID NO: 41 - DNA, 606 bp, Cyprivirus A
  source 1..606: mol_type = genomic DNA
aaataccctttcccccggagcctcaccggggaccgcctcatggtgacctgctcggtcactactgtggtggtgaacaaatgtctaggacctttcactccaaatccctttcccctttttctacttcttagtacgcctcggctcgctcatccgttgtgtgctcaaactccccttctcctacacccctttcccccccctcccgagtgactcgcacttagtcgtaggtttggtgtctttcaccatttctgtgcctatctatgtgtcctttggatccgccctcgaatgccctctagggtcttctgcgaaagcttgcaaagccgcgccccccctccactgttcttggggaccgtgcgcagccggaacttttgacatttgactgaacagtacagcaatgtagcatgtctcttgtctttgccggttagccctcgtggtcaaactttgtaagttagtacacttaagcactctcctgtggtttctcttgggaccttccaattgtaggaatccttggtatgccttcgaatagggacggacgctctaaatgccccgttcgcgaagtcgacgcctgaatgaccaaggtttttccacctttcctcaaaacccctcttttta

SEQ ID NO: 42 - DNA, 608 bp, Rhinovirus A
  source 1..608: mol_type = genomic DNA
ttaaaactggatccagattgttcccatctggatttcccacgtggagttgtacactattattccggtaattttgtacgccagttttatgtacccccccctgtaacttagaagttttgaacaaggaccaataggcagtaaccacccaggttgctaaaggtcaagcacttctgtttccccggtcaaagttgatatgctccaacagggcaaaaacaactgagatcgttacccgcaaggtgcctacgcaaagcctagtaaccccttgaacgatgtgtggttggtcgttcggctgtaccccacagtagacctggcagatgaggctagatgttccccactggcgacagtgttctagcctgcgtggctgcctgcgcactctctgagtgcgaagccatacatttgacaaggtgtgaagagccccgtgtgctcaccttgagtcctccggcccctgaatgtggctaaccttaaccctgcagctagtacatgcaatccagcatgcagctagtcgtaacgagcaattgcgggacgggaccaactactttgggtgtccgtgtttcactttttccttttatatttgcttatggtgacaatatatagatttatatattgtcacc

SEQ ID NO: 43 - DNA, 608 bp, Rhinovirus A
  source 1..608: mol_type = genomic DNA
ttaaaactggatccaggttgtccccacctggatctcccacagggagtggtactctgttattacggtaactttgtatgccagttttatcctccccacccctatgtaacttagaagttttacataaagaccaataggtagtaatcatccagattacttaaggtcaagcacttctgtttccccggttgatgttgatatgctccaacagggcaaaaacaacagaaatcgttacccgcaaagtgcctacgcaaagcctagtagcactttagaagttgtctggctggtcgctccgccatttcccctggtagacctggcagatgaggctagaaataccccactggcgacagtgttctagcctgcgtggctgcctgcacaccctatgggtgtgaagccatacaatggacaaggtgtgaagagccccgtgtgctcactttgagtcctccggcccctgaatgtggctaaccttaaccctgcagctagggcacacaatccagtgtgtatctagtcgtaatgagcaattgcgggacgggaccaactactttgggtgtccgtgtttctcttttatccttatgtttgcttatggtgacaatatatgaatatatattgacacc

SEQ ID NO: 44 - DNA, 609 bp, unidentified
  source 1..609: mol_type = unassigned DNA; note = unclassified sequence
ttgaaagcgaatgtatggccgcatttccacactagtaactagtagtggtatgcggctgtgcattcgctttccccccctctttataggggcggtctttgtatctttactaatttcctacttttctatcatctctttttaaggtagggactaaggtctcctagcccttccccccctgggctttccaggatcaagggggttctaaagctaggccatgtttcctgagcctcatttagtacggagagttagtagtcataaaacatgccagtaaccttctagtgcccaagggtgacagagtggtaacactctccttggggcccgaaaggctagtgggcatagttgttaccaaggaaggggtccccaccccaacctgaactaacagctagaagctcaccttagaagaagtgctggatcccaacatgtcttataatgaaagctcaatggaaaggtgaggagatggaagcatgggggttcactgagtagatgccctgaaggagaaatctgatcaggggcccgtgactatacattaggtaaaccgggtataaaaaccatgaaaggtgacccacaaattttcctttatttttatgttttgttggtgtgaattcaggcaag

SEQ ID NO: 45 - DNA, 610 bp, unidentified
  source 1..610: mol_type = unassigned DNA; note = Livupivirus A1 strain newt/II-5-Pilis/2014/HUN, complete genome.1 sequence
tatctacatggggatccaggctgtatggaatgtctgtcttaacaagcactataccagaaagatccacccaaagtggtgggactgggactgtgaggtgagaaatcccgaaaccagccttctcaagcgtcggacgatctttctgttttagtgaacaccttgccttttaaatggatgacaacaccccttcagcaaatcgcaatctgaaatcccaaaagactgtttagccgaactctggtaatcactccggagaagtaggatacgcagcccctgtggactcttgatttcaggactcaaggtagctagagctggaacttcatggaatgacaaaggaatatatgcacattgtgcgctttcctggccttgtagcccgtcgtgaggatatgtcgttgggaatcgacatcttagtccagtactgcttgatagagtgtcggctggcacagttacctgagaataagtcagttgtacttaacatgaacaaaaaaaataactaccacaactaccacaatctaccaatacttgaattatgctgaatctcgtacagtaaaaacgttccgtggaaggacaagtattgaagtgcggttacatcatccgatacgcgctggatccctca

SEQ ID NO: 46 - DNA, 610 bp, Parechovirus A
  source 1..610: mol_type = genomic DNA
gtcaataaaagcctcaaacgtaacaaacatctaagataactaaacaaaccctatgcctggtctccactattcgaaggcaacttgcaataagaagagtgggcacaagacgcttaaagcatagagagagtttccttttctaacccacgttcgcgtggggtggcagatggcgtgccataactctaatagtgagataccatgcttgtggatcttatgctcacacagccatcctctagtaagtttgtaaggcgtctggtgacgtgtgggaatttattagaagcaacatcgtgctgtaaagcatcctattgccagcggaataacacctggtaacaggtgcctctggggccaaaagccaaggtttaacagaccctctaggattggttttgaacctgcgatgttgtggaaaatatttagtacctgccaatctggtagtcatgcaaacactagttgtaaggcccacgaaggatgcccagaaggtacccgtaggtaacaagagacactatggatctgatctggggccaactacctctatcttggtgagttggttaaaaaacgtctagtgggccaaacccaggggggatccctggtttccttttattttatcaatttcatt

SEQ ID NO: 47 - DNA, 610 bp, Rhinovirus A
  source 1..610: mol_type = genomic DNA
ttaaaactggatccgggttgttcccacccggatctcccacgtggagttgtacactattattacggtaattttgtacgccagttttatatcccttaccccaagtaacttagaagataaacacacagaccaataggaggtggtcatccagatcactaagggtcaagcacttctgtttccccggtcaaggttgatatgctccaacagggcaaaaacagctgagatcattatccgcaaagtgcctacgcaaagcctagtaactacctcgaaagtacttgactggtcgctccgccataccccatggtagacctggcagatgaggctagaaatcccccactggtgacagtgttctagcctgcgtggctgcctgcacaccctttgggtgtgaagccaagtaatggacagggtgtgaagagtcgagtgtgctcactttgagtcctccggcccctgaatgtggctaaccctaaccctgcagctagggcacacaatccagtgtgtatctagtcgtaatgagcaattgcgggatgggaccaactactttgggtgtccgtgtttcttgtttttcatttataattgcttatggtgacaatatatagtattatatattggcgtc

SEQ ID NO: 48 - DNA, 610 bp, Rhinovirus A
  source 1..610: mol_type = genomic DNA
ttaaaactggatccaggttgttcccacctggatttcccacagggagtggtactctgttattacggtaactttgtacgccagttttatctcccttcccccatgtaacttagaagtttttcacaaagaccaatagccggtaatcagccagattactgaaggtcaagcacttctgtttccccggtcaatgttgatatgctccaacagggcaaaaacaactgcgatcgttaaccgcaaagcgcctacgcaaagcttagtagcatctttgaaatcgtttggctggtcgatccgccatttcccctggtagacctggcagatgaggctagaaataccccactggcgacagtgttctagcctgcgtggctgcctgcacaccctatgggtgtgaagccaaacaatggacaaggtgtgaagagccccgtgtgctcgctttgagtcctccggcccctgaatgtggctaaccttaaccctgcagctagagcacgtaacccaatgtgtatctagtcgtaatgagcaattgcgggatgggaccaactactttgggtgtccgtgtttcactttttcctttatatttgcttatggtgacaatatatacaatatatatattggcacc

SEQ ID NO: 49 - DNA, 612 bp, Rhinovirus A
  source 1..612: mol_type = genomic DNA
ttaaaactggatccaggttgttcccacctggatctcccatagggagtggtactctgctattacggtagccttgtatgccagttttatctcccctcccccatgtaacttagaagttttacacaaggaccaatagtcggtaatcagccagattactaaaggtcaagcacttctgtttccccggtcaatgctgatatgctccaacagggcaaaaacagcagcgatcgttatccgcaaagcgcctacgcaaagcttagtagcatctccgaaattgtctggttggtcgttccgccattttccccttggtagacctggcagatgaggctagaaataccccactggcgacagtgttctagcctgcgtggctgcctgcacaccctatgggtgtgaagccaaacaatggacaaggtgtgaagagccccgtgtgctcgctttgactcctccggcccctgaatgtggctaaccttaaccctgcagctagagcacgcaaaccagcgtgtttctagtcgtaatgagcaattgcgggatgggaccaactactttgggtgtccgtgtttcactttttctttttatattgcttatggtgacaatatatacatcatatatattgacacc

SEQ ID NO: 50 - DNA, 613 bp, Rhinovirus A
  source 1..613: mol_type = genomic DNA
ttaaaactggatccaggttgttcccacttggatcccccaagaggggtagtactctattattacggtaattttgtacgccagttttatctcccttaccccctttgtaacttagaagatttaaacacagaccaataggcgacgatcatccagatcgtttaaggtcaagcacttctgtttccccggtcaatgctgatatgctctaccagggcaaaaacagtagagatcgttatccgcaaggtgcctacacaaagcttagtaacattttgaagagcatttggttggtcgctcagctattaccccatagtagacctggcagatgaggctagaagttccccactggcgacagtgttcttgcctgcgtggctgcctgcgcactctcatgagtgcgaagccatatgtttgacaaggtgtgaagagccccgtgtgctcaccttgagtcctccggcccctgaatgtggctaaccttaaccctgcagctagtgcatgaaatccatcatgtaactagtcgtaatgagcaattgcgggatgggaccaactactttgggtgtccgtgtttcactttttccttttatatttgcttatggtgacaatatatatagcatatattgacacc

SEQ ID NO: 51 - DNA, 613 bp, Rhinovirus A
  source 1..613: mol_type = genomic DNA
ataaaactggatccaggttgttcccacctggatctcctacgtggagttgtactctattattccggtaatcttgtacgccagttttatatcccctacccctttgtaacttagaagttaaacacacagaccaataggcggtggctatccaagtcactaatggtcaagcacttctgtttccccggtcaagattgatacgctccaacagggcgaaaacagtcaagatcgttaaccgcaaagtgactacgcaaagcttagtaatgccttgaagagtctatggctggtcgttccgctataaccccctagtagacctggcagatgaggctagaaacaccccactggcaacagtgttctagcctgcgtggctgcctgcacaccctttcgggtgtgaagccatatatttgacaaggtgtgaagagccccgtgtgctcactttgagtcctccggcccctgaatgtggctaaccttaaccctgcagctagcgtatgtaatccaacatattgctagtcgtaatgagcaattgcgggatgggaccaactactttgggtgtccgtgtttcacttttttccttttatttgcttatggtgacaatatatatagtatatatattggcatc

SEQ ID NO: 52 - DNA, 614 bp, Parechovirus A
  source 1..614: mol_type = genomic DNA
ggctggttaataaaagcctcaactgtaacaaacatcttaagcaactatagcaaccccatgcctggtctccactagttgaaggcacctagcaataaaatgagtggaaataagacgcttaaagcatggagtaaattttcttttctatcccatattttgtatggggtggcagatggcgtgccataattctattagtgggataccatacttgtggatcttatgcccacacagccatcctctagtaagtttgtaagacgtctggcgatgtgtgggaacttattggaagcaacattttgctgcaaagcatcctactgccagtggaacaacacctggtaacaggtgcccctggggccaaaagccaaggtttaacagaccctttaggattggtattaacctgaaatgttgtggagaatagttagtacctgctgacctggtagtaatgcaaacactagttgtaaggcccacgaaggatgcccagaaggtacccgtaggtaacaagagacactatggatctgatttggggccaactacctctattaaggtgagttggttaaaaaacgtctagtgggccaaacccaggggggatccctggtttcttttattttaccatatctaac

SEQ ID NO: 53 - DNA, 614 bp, Rhinovirus A
  source 1..614: mol_type = genomic DNA
taaaactggatccaggttgttcccacctggatctcctattgggagttgtactctattattccggtaattttgtacgccagttttatcttccccctccccaattgtaacttagaaggttatcaatacgaccaataggtggtagttagccaaactaccaaaggtcaagcacttctgtttccccggtcaaagttgatatgctccaacagggcaaaaacaactgagatcgttatccgcaaagtgcctacgcaaagcctagtaacacctttgaagatttatggttggtcgttccgctatttcccatagtagacctggcagatgaggctagaaatcccccactggcgacagtgctctagcctgcgtggctgcctgcgcaccccttgggtgcgaagccatacattggacaaggtgtgaagagccccgtgtgctcactttgagtcctccggcccctgaatgtggctaaccttaaccctgcagctagtgcatgtaatccaacatgttgctagtcgtaatgagtaattgcgggacgggaccaactactttgggtgtccgtgtttcactttttccttttaatattgcttatggtgacaatatatatagctatatatattgacacc

SEQ ID NO: 54 - DNA, 614 bp, Rhinovirus A
  source 1..614: mol_type = genomic DNA
ttaaaactggatccaggttgttcccacctggatttcctacatggagttgtactctgttattccggtaaccttgtacgccagttttatatcccttcccccttgcaacttagaagttaagcacgcagaccaataggtggtgattatccaaatcactaacggtcaagcacttctgtttccccggtttaaactgatacgctccaacagggcgaaaacagtgcaaatcgttatccgcaaggtgcctacacaaagcttagtagcgctttggagaatgtgtggttggtcgctcagctataccccctagtagacctggcagatgaggctagaagcaccccactggcgacagtgttctagcctgcgtggctgcctgcacacccttatgggtgtgaagccatacatttgacaaggtgtgaagagccccgtgtgctcactttgagtcctccggcccctgaatgtggctaaccttaaccctgcagctggtgcatgtaatccaacatgttgctagtcgtaatgagcaattgcgggatgggaccaactactttgggtgtccgtgtttcactttttaccttttaatttgcttatggtgacaatatatatacaacatatatattggcatc

SEQ ID NO: 55 - DNA, 614 bp, Rhinovirus A
  source 1..614: mol_type = genomic DNA
ttaaaactggatccaggttgttcccacctggatctcctacgggagttgtactctgttatttcggtaaccttgtacgccagttttatctcccctcccccaattgtaacttagaagcaatacacaaggaccaataggcagtgattaaccagatcacttaaggtcaagcacttctgtttccccggtctgagttgatatgctctaacagggcaaaaacaagtcagatcgttatccgcaaagtgcctacgcaaagcctagtatcatctttgaaaatgtatggttggtcattccgctgaaccccacagtagacctggcagatgaggctagaaaccccccactggcgacagtgttctagcctgcgtggctgcctgcacacccttatgggtgtgaagccatatatttgacaaggtgtgaagagccccgtgtgctcactttgagtcctccggcccctgaatgtggctaaccctaaccctgcagctagtgcatacaagccagtatgttgctagtcgtaacgagcaattgcgggatgggaccaactactttgggtgtccgtgtttcactttttacctttatactgcttatggtgacaatatatatatagcatatatattgacacc

SEQ ID NO: 56 - DNA, 614 bp, Rhinovirus A
  source 1..614: mol_type = genomic DNA
ttaaaactggatccaggttgttcccacctggatctcccaagtggagtggtacactattatcccggtaattttgtacgccagttttataacccctcccccccttgtaacttagaagatgtaaacacagaccaataggtggtaactaaccaagttactaaaggtcaagcacttctgtttccccggctgatattgatatgctccaccagggcaaaaacaatagaagtcgttatccgcaaagtgcctacgcaaagcctagtagcactttagattgtgtatggttggtcgctcagctattccccctagtagacctggcagatgaggctagaaataccccactggtaacagtgttctagcctgcgtggctgcctgcgcaccctttcgggtgcgaagccatatacatgacaaggtgtgaagagccccgtgtgctcactttgagtcctccggctcctgaatgtggctaaccttaaacctgcagccagtgcacataagccaatgtgtagctggtcgtaatgagtaattgcgggatgggaccaactactttggatgtccgtgtttcttgtttttcctttaattttgcttatggtgacaatatatagataatatatattggcatc

SEQ ID NO: 57 - DNA, 617 bp, unidentified
  source 1..617: mol_type = unassigned DNA; note = unclassified Picornaviridae sequence
gggccccctttccgtccaagtcgcggacgttaaatgcggcacggcagtgcctcggtgctgtcctgctgctagtggcggcaaccctctcccttactgtatgaatgagtttgtgtgaatgaaatccgtgtggatccccagcttttgggtctcaaacagaacacacggtggcggcccatgttccaccatagaggctaccttagtagctttaagtggaatctttgagtgagcaggtatcgcagccgttaaagactggtattcccggtgtagaggcgagcgcaggtaactgcggtctacattgtgtgtgagccagtacccgcaaggggtagctcaaagtggaaacttaaggtgaaccggtaagcgctattgtgacgcatgttggtcccaaggtgcgatgatagacatgttgcgcaggtaccccttaaatgggatctgagcgtaagctaattagtcactgtcgtcgcgctgaccttttctctttgtcttaattattgttaacacaatatcattgtttgttgtgtgtttttgctcgcaaggtcactagcagtcttacttaaaacactcaagacggactttttgtataattcaattagtgcttatttcaattctaccttctacag

SEQ ID NO: 58 - DNA, 618 bp, unidentified
  source 1..618: mol_type = unassigned DNA; note = Human parechovirus 1 isolate 121Chzj091, complete genome.1 sequence
cacgagttagaaatacatactaacactatgctttaagcgtccttgctccactcatcttattgcctggtccccactagtcgaaggtatctagcaataagatgagtggagcaaggacgcttaaagcatagtgttagtatgtatttctaactcgtgttcaacgcgaggtggcagatggcgtgccataactctattagtgagataccacgcttgtggatcttatgctcacacagccatcctctagtaagcttgcaaggcgtctgatgacgtgtgggaacttattggaaataacagtttgctgcaaagcatcctattgccagcggatcaacacctggtaacaggtgcctctggggccaaaagccaaggtttaacagaccctctaggattggttcacacctgaactattatggaagatatttagtacctaccgatttggtagttaggcaagcactagttgtagggcccacgaaggatgcccagaaggtacccgtaggtaacaagtgacactatggatctgatctggggccaactacctctatcctggtgagttggttaaaaaacgtctagtgggccaaacccaggggggatccctggtttccctttaaatttaatacaaccaat

SEQ ID NO: 59 - DNA, 618 bp, unidentified
  source 1..618: mol_type = unassigned DNA; note = Human rhinovirus 11, complete genome.1 sequence
ttcaaactggatccaggttgttcccacctggatctcccacgtggagttgtactctattattccggtaattttgtatgccagttttatctccccttcccttttgtaacttagaagatgaactcaccgaccaataggtggcatttatccagaatgtcaaaggtcaagcaccttctgtttccccggtcaaagttgatatgctccaacagggcaaaaacatctgcgatcgttatccgcaaagcaactacgcaaagcctagtatcacttttgagagtatgtggttggtcgctccactataaacccaatagtagacctggcagatgaggctagaagtcccccactggtaacagtgttctagcctgcgtggctgcctgcgtgcctctggtaggcacgaagccatatatttgacaaggtgtgaagagccccgtgtgcttgctttgagtcctccggcccctgaatgtggctaaccttaaccctgcagctagtgtgcataatccaatgcatggctagtcgtaatgagcaattgcgggatgggaccaactactttgggtgtccgtgtttctcatttttccttttatttgcttatggtgacaatatatataatacatatatattggcatc

SEQ ID NO: 60 - DNA, 620 bp, Megrivirus B
  source 1..620: mol_type = genomic DNA
aaacgggaggatcggctttggcttatcctcttaatagtctacaaaactgggctgactggtgggggagctactagatccgggagaggactagttaccccgcgtaacttccctttttgtcactccctccacctaccccttccctgtcccttagactcttaagtaggtgtgcaggcctggccccccggaaatgggcaaatcggacgtttgcgtgtagggtcgttctgaaaggtggggcccactccaccgtagtaggatcttcctgtttcacgtttaaacctctccgggcaggtatcgctagacactaggctgtataggatggcacgcacttaggtttcgcaccttcctagtgcgccaagatcccgcttttgagctcaagtacatggttctttgtaagatgtctaaccagaggaggtggtgctgaaatattgcaagccactctggcgaacgtccactgcattgcctggaacaggctctctagcgccctccactggtagcgcggtggtgggttagtaggatacctatatggacaggggatgcgggaatacccctcactagctagtgactggttgatcgactggcggcggatccagtgatacttgcataatccgcagacttgggag

SEQ ID NO: 61 - DNA, 620 bp, Parechovirus A
  source 1..620: mol_type = genomic DNA
gggtcggctggtcaataaaagcctcacatataactaacatctaagacaataatgtacaaccttgtgcctggtccccaccggtcgaaggcatctagcagtaagataggtggaacaaggacgcttaaagcacaaagacaacctatttttctaacccgcaaattattgtggggtggtagatggcgtaccataattctactagtgagataccatgcttgtggatcttatgctcacacagccatcctctagtaagtttgcaaggcgtctggtgacgtgtgggaacttattggaaataacatcttgctgcaaggcatccattagccagcggaataacacctggtaacaggtgcctctggggccaaaagccaaggtttagcagaccctaatggattggttcaaacctgggatgttgtggaagatacttagtacctaccgatctggtagcaatgcaaacactagttgtaaggcccacgaaggatgcccagaaggtacccgtaggtaacaagagacactatggatctgatttggggccaactacctctatcctggtgagttggttaaaaaacgtctagtgggccaaacccaggggggatccctggtttcttttacttatcactgtcatt

SEQ ID NO: 62 - DNA, 621 bp, Rhinovirus B
  source 1..621: mol_type = genomic DNA
ttaaaacagcggatgggtatcccaccatccggcccactgggcgtagtacactggtattctgtacctttgtacgcctgtttgccgcccctcccccttttattaccacatttgtggtcgctgcaacgttagaagattttaaagtagtgcaataggaagcatcacaaccagtggtgttatgcacaaacacttctgtttccccggagcgaggtatagacggtccccactgtcaaaagcctttaaccgttatccgccaaccaactacgagacagctagtaatgccctgttctcctgcaaggcgttcgatcagacagatttcccctctgttagtctggtcgatgaggctagaagtaccccacaggtaactgtgttctagcctgcgtggcggccagcccagcttctgctgggacgcctttcaagagacatggtgtgaagactcaattgtgcttggttgtgagtcctccggcccctgaatgcggctaaccttaaacccggatccatgctatgcaaaccagcatagttatggtcgtaatgggcaactctgggatgggaccgactactttgggtgtccgtgtttccatttttactttttgtgtcatttatggttacaattaagttgtaacc

SEQ ID NO: 63 - DNA, 621 bp, Rhinovirus A
  source 1..621: mol_type = genomic DNA
ttaaaactggatccaggttgctcccacctggatctcctacatggagttgtactctattattccggtaattttgtacgccagttttatctccccctacccccttacgtaacttagaagttttacacacaccgaccaataggtggtatttacccaaaataccaaaggtcaagcacttctgttaccccggtcaaaattgatatgctccaccagggcaaaaacaattgcgatcgttatccgcaaagcaactacgcaaagcctagtaccatttttgatgatgtgtggttggtcgttccactatgaacccgatagtagacctggcagatgaggctagaaattccccactggcaacagtgttctagcctgcgtggctgcctgcgtaccccctgtgggtacgaagccatacatttgacaaggtgtgaagagccccgtgtgcttgctttgagtcctccggcccctgaatgtggctaaccttaaccctgcagctagtgtgtacaatccagtacatagctagtcgtaatgagcaattgcgggatgggaccaactactttgggtgtccgtgtttcttgtttttctttcatatttgcttatggtgacaatatatataacacatatattggcacc

SEQ ID NO: 64 - DNA, 625 bp, unidentified
  source 1..625: mol_type = unassigned DNA; note = Bovine rhinitis B virus isolate TCH8 polyprotein gene, complete1 sequence
gtccagctacggatccagtttagacgttcgaagatgtacggttttgctgctttcacagagtaaagcagatagaggttctggactggcaaactttacctcgaaacacgcccgtttttctgctgtgttttacagactgtcctgccacacttgtggcggcttgtgacactgtgaacatagtgagactgaccaagacaacagtttcaagtggtgaacatcgaacgtctaaactggatccgtagctggacatgttagggcaagggtctcccccctggtaacaggagccttgctggccaaaagccccgctctctgagcctagcatgttgtcgaccccggactgttcagtttagttagtacatgggattcacttgtcatggttcctctgaactcggtctctagtgcggcagcctaaggatgccctccaggtaccccgaggtaacaagcgacactcgggatctgaggaggggactactttacgtggtttaaaaaacgtctaagctgccacggtgaccagaggctggcacctttcactttttaaacacactactgactacaattgaagtgataacggttttacagactttcaaactagttacacaagtactgtttttccaacacacacaatttt

SEQ ID NO: 65 - DNA, 630 bp, unidentified
  source 1..630: mol_type = unassigned DNA; note = Human rhinovirus 37, complete genome.1 sequence
tttaaacagcggatgggtatcccaccatccgacccactgggtgtagtactctggtattttgtacctttgtacgcctgttgttcctaatgtacccaccctaaaacttcctacccaagtaacgttagaagtttcatcaacaagtacaataggaagcatcacatccagtggtgttttgtacaagcacttctgtttccccggagcgaggtataggctgtacccactgccgaaagcctttaaccgttatccgccaaccaactacgtaaaagctagtatcatcatgttttaaaataggcgttcgatcaggtggatcccccctccactagtttggtcgatgaggctaggaactccccacgggtgaccgtgtcctagcctgcgtggcggccaacccagcttctgctgggacgcctttttatggacatggtgtgaagactcgcatgtgcttggttgtgactcctccggcccctgaatgcggctaaccttaaccccggagccctgtgttgcaatccagtaacattagggtcgtaatgagcaatttcgggacgggaccgactactttgggtgtccgtgtttctcatttttcttattattgtcttatggtcacagcatatatataacgtatatactgtgatc

SEQ ID NO: 66 - DNA, 635 bp, unidentified
  source 1..635: mol_type = unassigned DNA; note = unclassified RNA viruses ShiM-2016 sequence
cccctaggatccactggatgttagtacactggtatcgcggtacctttgtacgcctgttttatatccccttccccgcaactttagaagtatcaaaagtaccgctcaatagccgccacgctcccagtgtggtttcgagcaagcacttctgttttcccggttgcgtcccatatgctgtgcaaacggcaaaaagggacaatatcgttacccgcttgtatactacgggaaacctagtaccgccattgattgtattgagggttgcgctcatcacctttcccggtgtagctcaggctgatgaggctcagaatcccccacaggtaactgtgtctgagcctgcgttggcggcctgccctcgccttatggcgtgggacgctcactacatgacatggtgcgaagagtctactgtgctatacaagagtcctccggcccctgaatgtggataatcctaaccactgatcccacgtacgcaaaccagcgtgtagtgggtcgtaacgcgcaagtcggtggcggaaccgactactttgggtgaccgtgtttcctttattacctattgaatgtttatggtgacaattgtttgattcagttgttaccatttgctacattcaataacctagtgtcaaaccgattgaattgctaca

SEQ ID NO: 67 - DNA, 636 bp, Oscivirus A
  source 1..636: mol_type = genomic DNA
cctcggtccctctttccgtcgccgcccacgacgttaaatgcggtgttgtggtgcttaggtgccacaccactgctatttgggtccccctttcccctatatatgtttgtttgtttatttcaatttcttgaggattggcacctccttatgccaaatctaaatcgtggaggatcccaggctttctggtctttaacagaactccacgtccaggtcatagaaactggttggtaggctgcctgagtagtccatttgctagtagtcccttgtgaacagggtggctcccgtttactgctggtattcccggtgtaggtcgccatggtggtaacaccatcctgcattgtgtgtgaaccagtaccgcaaggatagcaaggtatgaacacttgtggacgaaatggtaagtgatcaattcactttcatggccggaaggtcacgtggcaatcatgccacccaggtaccctcctctgggaggatctgagggtgggctaagcagaccctgccatgtggctgaacttttcccttattgttttactttgtaacatttatagttgtgttagtgatttgtgtgttgtgcccttgtgagctatatccagtataagttcgcagctagaagttaatccttcgacatcggctgtattggaa

SEQ ID NO: 68 - DNA, 636 bp, Parechovirus A
  source 1..636: mol_type = genomic DNA
ccctttcccagccctgagacggctggctaataaaagtctcacctgtaactaacatctaagacaatcatgtataaccttgtgcctggtccccaccagtcgaaagtatcttgcaataagataggtggatcaaggatgcttaaagcacaaagacaattaacttttctaacccacaagttgttgtggggtggtagatggcgtaccataactctactagtgagataccacgcttgtggaccttatgctcacacagccatcctctagtaagtttacaaggcgtctggtgatgtgtgggaacttattggaagcaatattttgccgaaaggcatccattagccagcggaataacacctggtaacaggtgcctctggggccaaaagccaaggtttagcagaccctaatggattggttcaaacctggaatattgtggaaaatatttagtacctacggatctggtagcagtgtaaacactagttgtaaggcccacgaaggatgcccagaaggtacccgtaggtaacaagagacactatggatctgatctggggccagctacctctatcttggtgagttggttaaaaaacgtctagtgggccaaacccaggggggatccctggtttcctttacttaaccgggatcact

SEQ ID NO: 69 - DNA, 636 bp, Enterovirus C
  source 1..636: mol_type = genomic DNA
cccctaggatccactggatgtcagtacactggtatcgtggtacctttgtacgcctgttttatacccccttccccgcaactttagaagcatcaaaagcaccgctcaatagtcaccacacccccagtgtggtttcgagcaagcacttctgttttcccggttgcgtcccatatgctgtgcaaacggcaaaaagggacaatatcgttacccgcttgtatactacgggaaacctagtaccaccattgattgtgttgagagttgcgctcatcacctttccccggtgtagctcaggccgatgaggctcagaatcccccacaggtgactgtgtctgagcctgcgttggcggcctgccctcgccttatggcgtgggacgcttgatacatgacatggtgcgaagagtctactgtgctatgcaagagtcctccggcccctgaatgtggctaatcctaaccactgatcccacgcacgcaaaccagtgtgtagtgggtcgtaacgcgcaagtcggtggcggaaccaactactttgggtgaccgtgtttcctttattacttattgaatgtttatggtgacaattgtttgattcagttgttgccattctctacattcatttacccagcatcaaaccaattgaactgttaca

SEQ ID NO: 70 - DNA, 637 bp, Oscivirus A
  source 1..637: mol_type = genomic DNA
cctcggtccctctttccgtcgccgcccacgacgttaaatgcggtgctgtggtgcttaggtgccacaccactgcggtttgggttcccctttcccctatatatgtttgtctgtttatttcaaattcttgaggattggcacctccttatgccaaatctaaatcgtggaggatcccaggctttctggtctcaaacagaactccacgtccaggtcataggaactggttagtaggctatttgagtagtccgtttgttagtaatgccttgtgaacagggtggctcccgtttactgctggtattcccggtgcaggttgccgtggtggtgacaccatcctgcattgtgtgtgaaccagtaccgcaaggatagcaaggtatgaacacttatgggtgaaataataagtgactaatccactttcatggccggaaggtcatgtggcaatcatgccacccaggtaccctcttaggaggatctgagggtgggctaagcagaccctgccatgtggctgaaattttctattattttattccataacatttatagctatataggtgttttgtgtgttgtgctctccttttccgagttatttccagtactagttcgcagctagaagtttaactcttcgatatcggctacattggaa

SEQ ID NO: 71 - DNA, 637 bp, Enterovirus C
  source 1..637: mol_type = genomic DNA
ttcccacccctaggatccactggatgttagtacactggtatcacggtacctttgtatgcctgttttataacccctcccctgcaactttagaagtatcaaagacactgctcaatagccgccacacctccagtgtggtttcgagcaagcacttctgttctcccggttgcgtcccatatgctgtgcaaacggcaaaaaggggcaatatcgttacccgcttgtatactacgggaaacctagtaccatcattgattgtgttgagggttgcgctcatcacccttccccggtgtagctcaggtcgatgaggctcagaatcccccacaggtgactgtgtctgagcctgcgctggcggcctgccctcgcctcacggcgtgggacgctcaatacatgacatggtgcgaagagtctactgtgctatacaagagtcctccggcccctgaatgtgtcctaaccactgatcccacgtacgcaaaccagtgtatagtgggtcgtaacgcgcaagtcggtggcggaaccaactactttgggtgaccgtgattcccttattacttattgaatgtttatggtgacaattgtttgattcagttgttaccatttaccacattcatcaacctagtgtcaaaccgattaaactgctaca

SEQ ID NO: 72 - DNA, 638 bp, Parechovirus A
  source 1..638: mol_type = genomic DNA
tctaggagagtccctttcccagccagaggtggctggttaaacaatacctaatgtaacaaaacatctaagactttgtaacccatacctggtctccacccgttgaaggcaactagcaataaaataggtgggcttagacgcttaaagtatggtgtaaacaatcttttctagcctgtgcctagcatagggtggcagatggcgtgccataactctattagtgagataccacacttgtggaccttatgctcacacagccatcctctagtaagtttgtgaggcgtctgatgacgtgtgggaacttattggaaataacagtttgctgaaaagcatctcattgccagcggatcaacacctggtaacaggtgcctctggggccaaaagccaaggtttaacagaccctttgagattggttcaaacctgaattgttatggaaaatatttagtacctgctgatttggtagcaatacaaacactagttgtaaggcccacgaaggatgcccagaaggtacccgtaggtaacaagtgacactatggatctgatttggggccaactacctctatcttggtgagttggttaaaaaacgtctagtgggccaaacccaggggggatccctggttttcttttattgtatcactatcact

SEQ ID NO: 73 - DNA, 644 bp, unidentified
  source 1..644: mol_type = unassigned DNA; note = Human parechovirus 4 clone V2A polyprotein gene, partial cds.1 sequence
ggatagatagtccctttcccagccttgaggcggctggtcaataaaagcctcaaacgtaactaacatctaagaagatttgtaaaccctatgcctggtctccactattcgaaggcaacttgcaataagaagagtggaattaagacgcttaaagcatagtgatagttttcttttctaacccacattcgtgtggggtggcagatggcgtgccataactctaatagtgagataccacacttgtggaccttatgctcacacagccatcctctagtaagtttatgagacgtctggtgacgtgtgggaacttattggaaacaacattttgctgcaaagcatcctattgccagcggaacaacacctggtaacaggtgcctctggggccaaaagccaaggtttgacagaccctttaggattggttctaaacctgaaatgttgtggaaaatatttagtacctgctgatctggtagtaatgtaaacactagttgtaaggcccacgaaggatgcccagaaggtacccgtaggtaacaagtgacactatggatctgatctggggctgactacctctatcttggtgagttggttaaaaaacgtctagtgggccaaacccaggggggatccctggtttcttttattttaacacagctaat

SEQ ID NO: 74 - DNA, 647 bp, unidentified
  source 1..647: mol_type = unassigned DNA; note = unclassified Parechovirus sequence
cttaggagagtccctttcccagccttgaggcggctggccaataaaagcctcaaatgtaacaaacatctaagaagattgtgtggaaccctatgcctggtctccactattcgaaggcagcttgcaataagaagagtggaattaagacgctcaaagcatagagacaattttcttttctaacccatacttgtatggggtggcagatggcgtgccataactctaatagtgagataccatgcttgtggaccttatgctcacacagccatcctctagtaagtttgtgagacgtctggtgacgtgtgggaacttattggaaacaacattttgctgcaaagcatcctattgccagcggaacaacacctggtaacaggtgcctctggggccaaaagccaaggtttaacagaccctttaggattggttctaaacctgaaatgttgtggaagacacttagtacctgccgatctggtagtaatacaaacactagttgtaaggcccacgaaggatgcccagaaggtacccgtaggtaacaagtgacactatggatctgatctggggccaactacctctatcttggtgagttggttaaaaaacgtctagtgggccaaacccaggggggatccctggtttccttttattttatcattactaat

SEQ ID NO: 75 - DNA, 648 bp, unidentified
  source 1..648: mol_type = unassigned DNA; note = Human parechovirus 14 clone V10C polyprotein gene, partial cds.1 sequence
ggaggatagagtccctttcccagccttgaggcggctggtcaataaatgcctcaaatgtaactaacatctaagattaacttagacaaccctatgcctggtctccgctagtcgaaggcgccttgcaataagacgagtggaacaaagacgcttaaagcatagtgaaaatatacatttctaacctgtggcctccacagggtggcagatggcgtgccataactctattagtgagataccacacttgtggaccttatgctcacacagccatcctctagtaagtttgtaagacgtctgatgacgtgtgggaagttattggaagtaacaatttgccgtaaggcatcctagagccagtggattaacacctggtaacaggtgcccctggggccaaaagccaaggtttaacagaccctttaggattggttcaaacctgggttgttatggaagatatttagtacctgctgatttggtagtaatacaaacactagttgtaaggcccacgaaggatgcccagaaggtacccgtaggtaacaagtgacactatggatctgatttggggttgactacctctgtcctggtgagtcaattaaaaaacgtctagtgggccaaacccaggggggatccctggtttccttttattttattacaaccatt

SEQ ID NO: 76 - DNA, 649 bp, Parechovirus A
  source 1..649: mol_type = genomic DNA
ctctaggagagtccctttcccagccctgaggcggctggtcaataaaagcctcaatcgtaactaacatctaagaatattatttcaaccccatgcctggtctccactagttgaaggcaacttgcaataaaatgagtggaaacaagacgcttaaagcatggtgtaaattaccttttctaacctacactttgtgtggggtggcagatggcgtgccataattctattagtgagataccacgcttgtggaccttatgctcacacagccatcctctagtaagtttgcaagatgtctggtgacgtgtgggaacttattggaaacaacattttgctgcaaagcatcctactgccagcggaataacacctggtgacaggtgcctctggggccaaaagccaaggtttaacagaccctttaggattggttttaaaacctgaaatgttgtggaagatacttagtacctgccgatctggtagtagtgcaaacactagttgtaaggcccacgaaggatgcccagaaggtacccgtaggtaacaagtgacactatggatctgatctggggccaagtacctctatcttggtgacttggttaaaaaacgtctagtgggccaaacccgggggggatccctggtttccttttattttaccaatgccact

SEQ ID NO: 77 - DNA, 651 bp, Parechovirus A
  source 1..651: mol_type = genomic DNA
ctggaggatagagtccctttcccagccttgaggcggctggtcaataagagcctcaaatgcaacaaacatctaagactattgagaacaaccctgtacctggtccccactagtcgaaggcatctagcaataagatgagtggaatatgggcgcttaaagtacagagtcaatgatcttttctagcctacgcttatgcgtggggtggcagatggcgtgccataaccctattagtgagataccacacttgtggaccttatgctcacacagccatcctccagttagtttgtaagatgtctggtgatgtgtgggaacttgttggaaataacattttgctgtaaggcattcattagccagcggataaaacacctggtaacaggtgcctctggggccaaaagccaaggtttaacagaccctaatgaattggttcaaacctggaatgttatggaagatacttagtacctgctgatctggtagtaatgcaaacactggttgtaaggcccacgaaggatgcccagaaggtacccgcaggtaacaagagacactgtggatctgatctggggctagttgcctctttaaggtgaactagttaaaaaacgtctagtgggccaaacccaggggggatccctggtttcctttattatttgaatgttcatc

SEQ ID NO: 78 - DNA, 653 bp, unidentified
  source 1..653: mol_type = unassigned DNA; note = Human parechovirus 5 strain CH-ZJ1, complete genome.1 sequence
atttgctgagtttctctaggagagtccctttcccagccttgaggtggctggttaataaaacctcaagcgtaactaacatctaagacaaatttatcaaccccatgcctggtccccactagtcgaaagcaacttgcaataagatgagtggaacaaggatgcttaaagcatggtgcaaataaacttttctaacccatttacttggggtggcagatggcgtgccataactctattagtgagataccacgcttgtggaccttatgctcacacagccatcctctagtaagtttgtaagacgtctgatgacgtgtgggaacttattggaatctacaatttgccgaaaggcatcctactgccagcggaacaacacctggtaacaggtgcccctggggccaaaagccaaggtttaacagaccctttaggattggtgaaaacctgaattgtagtggaaaatatttagtacctgctaatttggtagtagtgcaaacactagttgtaaggcccacgaaggatgcccagaaggtacccgtaggtaacaagtgacactatggatctgatctggggctggctacctctatcttggtgagtcggttaaaaaacgtctagtgggccaaacccaggggggatccctggtttccctttatatcattatagct

SEQ ID NO: 79 - DNA, 654 bp, unidentified
  source 1..654: mol_type = unassigned DNA; note = unclassified Parechovirus sequence
ttgttacagttgaggcttccctttcccagccctgaggcggctggtcaataaaagcctcaactgtaacaaacacctaagattattacaataaccccatgcctggtctccactagttgaaggcaacttgcaataaaataagtggaaacaagacgcttaaagcatggtgtgaattaacctttctaacctgcactttgtgtggggtggcagatggcgtgccataattctattagtgagataccacgcttgtggaccttatgctcacacagccatcctctagtaagtttgtgagacgtccggtgacgtgtgggaacttattggaaacaacattttgctgcaaagcatcctattgccagcggaataacgcttggtaacaagcgcctctggggccaaaagccaaggtttaacagaccctttaggattggttcggaacctggaatgttgtggaagatacttagtacctgctgatctggtagtaatgcaaacactagttgtaaggcccacgaaggatgcccagaaggtacccgtaggtaacaagtgacactatggatctgatctggggccaggcacctctatcttggtggcctggttaaaaaacgtctagtgggccaaacccgggggggatccccggtttccttttatttgttcaaagtcact

SEQ ID NO: 80 - DNA, 663 bp, Parechovirus A
  source 1..663: mol_type = genomic DNA
gtacattagatgcgtcatctgcaactttagtcaataaattacctccaatgtcattaccaacattccctaccttttcactaacacctaagacaacaagtacctatgcctggtctccactattcgaaggcaacttgcaataagaagagtggaattaagacgcttaaagcatagagctagttatcttttctaacccacaaagttttgtggggtggcagatggcgtgccataactctattagtgagataccatgcttgtggatcttatgctcacacagccatcctctagtaagttgataaggtgtctggtgatatgtgggaactcacatgaaccattaatttaccgtaaggtatcctatagccagcggaatcacatctggtgacagatgcctctggggccgaaagccaaggtttaacagaccctataggattggtttcaaaacctgaattgatgtggattgtgtatagtacctgttgatctggtaacagtgtcaacactagttgtaaggcccacgaaggatgcccagaaggtacccgtaggtaacaagtgacactatggatctgatctggggccagctacctctatcatggtgagttggttaaaaaacgtctagtgggccaaacccaggggggatccctggtttccttttacctaatcaaagccact

SEQ ID NO: 81 - DNA, 664 bp, Parechovirus A
  source 1..664: mol_type = genomic DNA
ccgcattgctgagcttctctaggagagtccctttcccagccttgaggcggctggtcaataaaagcctcaattgtaacaaacacctaagcttatcatacaagccccatgcctggtctccactagtcgaaggcaacttgcaataagatgagtggaaacaagacgcttaaagcatggtgtaaattagcttttctaacccacatattgtgtggggtggcagatggcgtgccataattctattagtgagataccacgcttgtggaccttatgctcacacagccatcctctagtaagtttgtgagacgtctggtgacgtgtgggaacttatcggaaacagtattttgctgcaaagcatcctattgccagcgggacaacacctggtaacaggtgcctctggggccaaaagccaaggtttaacagaccctttaggattggtttaaaacctgaaatattgtggaagatacttagtacctactaatctggtagtagtgcaaacactagttgtaaggcccacgaaggatgcccagaaggtacccgtaggtaacaagtgacactatggatctgatctggggccaggtacctctatcttggtgacctggttaaaaaacgtctagtgggccaagcccgggggggatccccggtttccttttattttatcaatgccact

SEQ ID NO: 82 - DNA, 667 bp, Parechovirus A
  source 1..667: mol_type = genomic DNA
gtaataatcttagatgtttgttacagttgaggcttttattgaccagccgcctcagggctgggaaagggactcaactgtaacaaacatctaagattattacattaaccccatgcctggtctccactagttgaaggcaacttgcaataaaatgagtggaaacaagacgcttaaagcatggtgtaaattaattttctaacccacattaagtgtggggtggcagatggcgtgccataactctactagtgagataccatgcttgtggaccttatgctcacacagccatcctctagtaagtttgtgagacgtctggtgacgtgtgggaacttattggaaacaacaccttgctgtaaagcatcctattgccagcggaacaacacctggtaacaggtgcctctggggccaaaagccaaggtttaacagaccctttaggattggttctgaacctgagatgttgcggaagatatttagtacctgccgatctggtagtaatgcaaacactagttgtaaggcccacgaaggatgcccagaaggtacccgtaggtaacaagagacactatggatctgatctggggtcaggtacctctatcttggtgacctggttaaaaaacgtctagtgggccaaacccgggggggatccccggtttccttttactttatcaatgccact

SEQ ID NO: 83 - DNA, 668 bp, Parechovirus A
  source 1..668: mol_type = genomic DNA
taccccgacttgctgagctcctctaggagagcccctttcccagccttggggcggctggtcaataaaagcctcaaatgtaactaacatctaagatagattataaccaccctatgcctggtccccactagtcgaaagcacctggcaataagacgagtggaataaggacgcttaaagcatagtgttagcatacacttctaacttgtgattttcacaaggtggcagatggcgtgccataactctatcagtgagataccacgcttgtggaccttatgctcacacagccatcctctaataagtttgtaagacgtctgatgacgtgtgggaacttattggaaacaacaatttgctgcaaagcatcctactgccagtggactaacacctggtaacaggtgcccctggggccaaaagccaaggtttaacagaccctttaggattggtatatacctgagttgttgtggaaaatacttagtacctactgatttggtagccggacaaacactagctgtaaggcccacgaaggatgcccagaaggtacccgtaggtaacaagtgacactatggatctgatctggggtcgaccacccctatccaggtgggtcgattaaaaaacgtctagtgggccaaacccaggggggatccctggtttccttttattttatcacagtcact

SEQ ID NO: 84 - DNA, 669 bp, Parechovirus A
  source 1..669: mol_type = genomic DNA
taccccgacttgctgagcttctctaggagagcccctttcccagccctgaggcggctggtcaataaaagcctcacacgtaactaacatctaagacaatcttatacaaccttgtgcctggtccccaccagtcgaaggcatctagcaataagataggtggaacaaggacgcttaaagcacaaagacaattaacttttctaactcacaatttgttgtggggtggtagatggcgtaccataattctattagtgagataccacgcttgtggaccttatgctcatacagccatcctctagtaagtttgtaaggtgtctggtgatgtgtgggaacttattggaaacaacattttgccgcaaggcatccattagccagcggaataacacctggtaacaggtgcctctggggccaaaagccaaggtttaacagaccctaatggattgatttaaatctggaatgttgtggaatatatttagtacctgctgatctggtagcaatacaaacactagttgtaaggcccacgaaggatgcccagaaggtacccgtaggtaacaagtgacactatggatctgatctggggctggatacctctatcttggtgatccagttaaaaaacgtctagtgggccaaacccaggggggatccctggtttccttttattttattactgccatt

SEQ ID NO: 85 - DNA, 672 bp, Parechovirus A
  source 1..672: mol_type = genomic DNA
cgtcgggccttataccccgacttgctgagcttctctaggagagtccctttcccagccagaggtggctggtcaaataatacctactgtaactaaacatctaagaaataacaaccacacacctggtctccaccagccgaaagcaactagcaataaggtgggtggatatagacgcttaaagtgtgttgtgcattttcttttctagcctgtgttttacacagggtggcagatggcgtgccataactctaatagtgagataccacgcttgtggaccttatgctcacacagccatcctctagtaagtttgtaagacgtctgatgacgtgtgggaacttgttggaaatagcagtttgctgcaaagcatcccattgccagcggatcaacatctggtgacagatgcctctggggccaaaagccaaggtttaacagaccccttgggattggttcaaacctgaactgctatggaaagcacttagtacctgctgatttggtagtaatgcaaacactagttgtaaggcccacgaaggatgcccagaaggtacccgtaggtaacaagtgacactatggatctgatctggggccaactacttctatctaagtgagttggttaaaaaacgtctagtgggccaaacccaggggggatccctggtttcctctcaattttaaacagtcact

SEQ ID NO: 86 - DNA, 673 bp, unidentified
  source 1..673: mol_type = unassigned DNA; note = unclassified Avisivirus sequence
gagctaatggggtccctatcttcatagccaagatccatagtggctcaggaaatagaggggggttcccagggtggattttccgaatcttagatttcggatatccgccttgggacaccccctttccccagccatgggttaaatggcccttcaccaggttaggtgctgtctaggcttccagtaaagaagtcactcgagctacgaacaaatcctaagagggaatggtggttagccccgtccactgggtgtctttcacccactttcagtggatcaatccaccccaactcccccctctatttcctgagccactatggatcttggctatgaagatagggaccccattagctccagtgccaagggatctcccccctcgtaagaggtgcccttgggcccaaaaggctagttggcaaggtgaagtgaaggaagctgctaacgtggtgaccttaagcggatcctgaagctgaccttggagtgaaaccctattggatggctgcgtgaagttgtggaggtggaaatggagaaagttggccgcttgtgagtagatgcccagaaggcataaggctgatctggggccagtgactataccgttccggtaaacctggtataaaaaccatgaaagcaaacgggttaaatttctctatttttattttctcttactgcagtgactacaggcaaa

SEQ ID NO: 87 - DNA, 674 bp, unidentified
  source 1..674: mol_type = unassigned DNA; note = Human parechovirus 1 isolate SH401, complete genome.1 sequence
ggccttataccccgacttgccgagtttctctaggagagtccctttcccagccgtgaggtggctggtcaataaaaacctcaaatgtaactaacatcaaagaaaaatcactcaaccccatgcctggcccccgctagtcgaaagcaacttgcaataagatgagtggaccaagggcgcttaaagcatggtgtcagcaatcttttctaacccatgtttcacatggggtggcagatggcgtgccataactctattagtgggataccacccttgtggaccttatgcccacacagccatcctctagtaagtttgtatgacgtccgatgacgtgtgggaacttattggaagcaacaatttgccgaaaggcatcctattgccagcggattaacacctggtaacaggtgcccctggggccaaaagccaaggtttaacagaccctttaggattggtttaaacctgaattgttgtggaagatatttagtacctgctgatttggtagtaatgcaaacactagttgtaaggcccacgaaggatgcccagaaggtacccgtaggtaacaagtgacactatggatctgatctggggctgactaccactatcctggtgagtcagttaaaaaacgtctagtgggccaaacccaggggggatccctggtttctttttattttataactgtcaat

SEQ ID NO: 88 - DNA, 677 bp, Parechovirus A
  source 1..677: mol_type = genomic DNA
ggccgtcgggccttataccccgatttgctgagcttctctaggagagcccttttcccagccagaggtggctggttaaacaatacctattgtaacaaaacatctaagacataacaaccgtacacctggtctccactggccgaaggcaactagcaataaggtaggtgggttcagacgcttaaagtgtgttgtatatattcttttctaacctgtgttttacacagggtggcagatggcgtgccataaccctaatagtgagataccacgcttgtggaccttatgctcacacagccatcctctagtaagtttgtaagacgtctgatgacgtgtgggaacttgttggagataacattttgctgcaaagcatcccattgccagcggatccacatctggtaacagatgcctctggggccaaaagccaaggtttaacagaccctttgggattggttcaaacctgaattgttatggaagacatttagtacctgctgatttggtagtagtgcaaacactagttgtaaggcccacgaaggatgcccagaaggtacccgtaggtaacaagtgacactatggatctgatctggggccaactacctctatctaggtgagttggttaaaaaacgtctagtgggccaaacccaggggggatccctggtttccttttttaaatttgaataatcact

SEQ ID NO: 89 - DNA, 679 bp, unidentified
  source 1..679: mol_type = unassigned DNA; note = unclassified Sapelovirus sequence
gggaaatacggggggggattacccccctcccgtatttccccctgttgcccgggggtagtgaacgatggatctacggatcctttgttcacagggccaaggttcaagcccacttttgtgagaagcatgctttactaggctatgggttgagtggcccataggcaaccctatgaagaggctacactcactacatccgccaacaggcccaggcgtatgtgggcctataagaaatgtacgttcgtccgcttatggtgcctaatccataggcatctaggacaagtacttctgtttccccggtcacgaggaatatgctgtacccacggcagaagccagacatgatcgttacccgactccgaactgtgcgaaacctagtaccttcaagtgaaacagagatcattgatccggggtgaccctgaccccagaaactcatgatgggtgtcgccgttccgacaggggagaccctgggcgtcgccgcgctggcatgagggcccattagggcatgatcaatgcggaccttgaggcgaagagtctagtgcgcttcggtttattcctccaggcccctgaatgcggctaatcctaaccccggagcgtatcacaccaatccaggtgctggtgcgtcgtaatgcgtaagtctgggatggaaccgactactttgggtgtcctgtgtttctaatttctcttg

SEQ ID NO: 90 - DNA, 680 bp, Parechovirus A
  source 1..680: mol_type = genomic DNA
cgtcgggccttacaccccgacttgctggacttctctaggagagtccctttcccagccctgaggcggctggtcaataaaagcctcaattgtaacaaacatctaagcttattacaataaccccatgcctggtctccactagttgaaggcaacttgcaataaaatgagtggaaatgagacgcttaaagcatggtgtaaactaacttttctagcccacactttgtgtggggtggcagatggcgtgccataattctaatagtgggataccacgcttgtggaccttatgctcacacagccatcctctagtaagtttgtgtgacgtctggtgacgtgtgggaacttattggaaacaacattttgctgtaaagcatcctattgccagcggaacaacgcctggtaacaggtgcctctggggccaaaagccaaggtttagcagaccctctaggattggtttaaaacctgaaatgttgtggaagatacttagtacctaccgatctggtagtaatgcagacactagttgtaaggcccacgaaggatgcccagaaggtacctgtaggtaacaagcgacactatggatctgatctggggccaggtacctctatcttggtgacctggttaaaaaacgtctagtgggccaaacccgggggggatccccggtttccttttattttatcaatgccact

SEQ ID NO: 91 - DNA, 680 bp, unidentified
  source 1..680: mol_type = unassigned DNA; note = Parechovirus A strain NIG13194, complete genome.1 sequence
cgtcgggccttataccccgacttgctgagcttctcgaggagagtcccttttccagccctgaggcggctggtcaataagagcctcaatcgtaacgaacatctaagactgtcaaatcaaccctatgcctggtctccactattcgaaggcaactagcaataagaagagtggatcaatagacgcttaaagcatagtgtacgtaaacctttctaacttgtgttatacacaaggtggcagatggcgtgccataattctattagtgagataccacgcttgtggaccttatgctcacacagccatcctctagtaagtttgtaaggtgtctgatgacgtgtgggaacttattggaaataatagtttgctgcaaagcatcctactgccagcggattaacatctggtaacaggtgcctctggggccaaaagccaaggtttaacagaccctttaggattggttcaaacctgaactattatggaagatacttagtacctgctgatttggtaacagtgcaaacactagttgtaaggcccacgaaggatgcccagaaggtacccgtaggtaacaagtgacactatggatctgatctggggctgactacctctatcttggtgagtcagtcaaaaaacgtctagtgggccaaacccaggggggatccctggttttcttttattttatctcttgcaat

SEQ ID NO: 92 - DNA, 681 bp, Parechovirus A
  source 1..681: mol_type = genomic DNA
cgtcgggccttataccccgacttgctgagcttctccaggagagcccctttcccagccctgaggcggctggtcaataaaagcctcatctgtaacaaacatctaagattatgacattaaccccatgcctggtctccactagttgaaggcaacttgcaataaaatgagtgggaacaagacgcttaaagcatggtgtaaatttgcttttctaacccacactttgtgtggggtggcagatggcgtgccataattctattagtgagataccacgcttgtggaccttatgctcacacagccatcctctagtaagttcgtgagatgtctggtgacgtgtgggaacttattggaaacaacattttgctgaaaagcatcctatcgccagcggaacaacacctggtaacaggtgcctctggggccaaaagccaaggtttaacagaccctttaggattggtttaaaacctggaatgttgttgaagatacttagtacctgccgatctggtaatagcacaagcactagttgtaaggcccacgaaggatgcccagaaggtacccgtaggtaacaagtgacactatggacctgatctggggctaggtacctctatcttggtgacctggttaaaaaacgtctagtgggccaaacccgggggggatccccggtttccttttaatttcatcaatgccatt

SEQ ID NO: 93 - DNA, 683 bp, Parechovirus A
  source 1..683: mol_type = genomic DNA
tggccgtcgggccttataccccgacttgctgagtttctctaggagagtccctttcccagccttgaggtggctggtcaataaaaacctcaactgtaactaacatctaagctgattttatagataccccatgcctggtccccactagtcgaaagcacctggcaataagatgagtggaaaagggcgcttaaagcatggtgttagtatacatttctaacctgtgactatcacggggtggcagatggcgtgccataactctattagtgagataccacgcttgtggaccttatgctcacgcagccatcctctagtaagcttgcaaggcgtctgatgacgtgtgggaactaattggaaatgacagtttgctgctaagcatcctattgccagcggatcaacacctggtaacaggtgcctctggggccaaaagccaaggtttaacagaccctttaggattggttcaaacctgaactgttgtggaagattctcagtacctgctaatttggtagttaggcaagcactagttgtaaggcccacgaaggatgcccagaaggtacccgtaggtaacaagtgacactatggatctgatctggggccagctacctctttcatggtgagttggtcaaaaaacgtctagtgggccaaacccaggggggatccctggtttcctttattttatcatagtcatt

SEQ ID NO: 94 - DNA, 692 bp, Parechovirus A
  source 1..692: mol_type = genomic DNA
agagcttggccgtcgggccttataccccgacttgctgagcttctctaggagagtccctttcccagccctgaggcggctggtcaataaaagcctcaattgtaacgaacacctaagacgataatgataaccctatgcctggtctccactattcgaaggcaccttgcaataagaagagtgggctcaagacgcttgaagcatagagtgcgttttcttttctaatccacacccatgtggagtggcagatggcgtgccataactctattagtgagataccatgcttgtggaccttatgctcacacagccatcctctagtaagtttgtaagacgtctggtgacgtgtgggaacttattggaaacaacattttgctgtaaagcatcctactgccagcggaacaacacctggtaacaggtgcctctggggccaaaagccaaggtttaatagaccctttaggattggtttaaaacctgaaatgttgtggaaaatatttagtacctgccaatctggtagtaatgcaaacactagttgtaaggcccacgaaggatgcccagaaggtacccgtaggtaacaagagacactatggatctgatctggggccagctacctctatcttggtgagttggttaaaaaacatctagtgggccaaacccaggggggatccctggtttccttttattttacctcaaatactatc

SEQ ID NO: 95 - DNA, 695 bp, unidentified
  source 1..695: mol_type = unassigned DNA; note = unclassified Parechovirus sequence
tctcctagagagcttggccgtcgggccttataccccgacttgctgagtttctctaggagagtccctttcccagccttgaggcggctggtcaataaaagcctcaaatataacgaacatctaagacaattaaacataccctatgcctggtctccactattcgaaggcaacttgcaataaggagagtggaattaagacgcttaaagcatggagacagtttccttttctaacccacattagtgtggggtggcagatggcgtgccataactctaatagtgagataccacgcttgtggaccttatgctcacacagccatcctctagtaagtttgcaagacgtctggtgacgtgtgggaacttattggaaacaacattctgctgtaaagcatcctaatgccagcggaacaacacctggtaacaggtgcctctggggccaaaagccaaggtttaacagaccctttgggattggttcaaacctggaatgttgtggaaaatacttagtacctgccgatctggtagtagtgcaaacactagttgtaaggcccacgaaggatgcccagaaggtacccgtaggtaacaagtgacactatggatctgatctggggctggatacctctatcttggtgattcagttaaaaaacgtctagtgggccaaacccaggggggatccctggtttctttttattttataatgtcact

SEQ ID NO: 96 - DNA, 696 bp, Parechovirus A
  source 1..696: mol_type = genomic DNA
gaaccattctacaacttctttagcggctttccgtgtttggtttgcaaccttagttgcaaaacatttgaaaacacttggccttgggtcaataaaagcctcaactgtaacaaacatctaagattattacattaaccccatgcctggtctccactagttgaaggcaacttgcaataaaatgagtggaaacaagacgcttaaagcatggtgtaaattaacttttctaacccacattttgtgtggggtggcagatggcgtgccataattctactagtgagataccacgcttgtggaccttatgctcacacagccatcctctagtaagtttgtgagatgtctggtgacgtgtgggaacttattggaaacaacattttgctgtaaagcatcctatcgccagcggaacaacacctggcaacaggtgcctctggggccaaaagccaaggtttaacagaccctttaggattggttttaaaacctgaaatgttgtggaagatacttagtacctgccgatctggtagtaatgcaaacactagttgtaaggcccacgaaggatgtccagaaggtacccgtaggtaacaagtgacactatggatctgatctggagctaggtacctctatcttggtgacctggttaaaaaacgtctagtgggccaaacccgggggggatccccggtttccttttattttatcaatgccaat

SEQ ID NO: 97 - DNA, 696 bp, Parechovirus A
  source 1..696: mol_type = genomic DNA
tcctagagagcttggccgtcgggccttatacccgacttgctgagtttctctaggagagtccctttcccagccctgaggcggctggtcaataaaagcctcaaatgtaactaacatctaagacatttatgattcaaccccatgcctggtccccactagtcgaaagcatctagccataagatgagtggactaaggacgcttaaagcatggagccaacaaccatttctaacccatgttttgcatggggtggcagatggcgtgccataactctactagtgggataccacgcttgtggaccttatgcccacacagccatcctctagtaagtttgtaagacgtctgatgacgtgtgggaaaacactagaaatattaacttgctgtaaagcatcctactgccagcggaatcacatctggtaacagatgcctctggggccaaaagccaaggtttagcagaccctttaggattggttcaatacctgagttaatatggaaagtgcttagtacctgctgacttggtagtagtgcaaacactagttgtatggcccgcgaaggatgcccagaaggtacccgtaggtaacaagtgacactatggatctgatctggggctggatacctctatcttggtgatccagttaaaaaacgtctagcgggccaagcccaggggggatccctggtttccctatttttattattatcact

SEQ ID NO: 98 - DNA, 697 bp, unidentified
  source 1..697: mol_type = unassigned DNA; note = unclassified Parechovirus sequence
tctcctagagagcttggccgtcgggccttataccccgacttgctgagcttctctaggagagcccctttcccagccttgaggcggctggtcaataaaagcctcaaacgtaactaacacctaagataaatctcataaccctatgcctggtccccactagtcgaaagcacctagcaataagatgagtggaccatggacgcttaaagcatagtgccaatatacatttctaacctgtggattcccatggggtggcagatggcgtgccataattctattagtgggataccacgcttgtggatcttatgcccacacagccatcctctagtaagtttgtaaggcgtctgatgacgtgtgggaacttatcggaaacaacaatttgctgcaaagcatcctattgccagcggacaaacacctggtaacaggtgcctctggggccaaaagccaaggtttaacagaccctttaggattggttcttacctggattgttgtggaaggtacttagtacctgctgatttggtagttggacaaacactagttgtaaggcccacgaaggatgcccagaaggtacccgtaggtaacaagggacactatggatctgatttggggtcacctacctctatcttggtgaggtgattaaaaagcgtctagtgggccaaacccaggggggatccctggtttccttttattttacacagacact

SEQ ID NO: 99 - DNA, 701 bp, Parechovirus A
  source 1..701: mol_type = genomic DNA
ttttgaaaggggtctcctagagagcttggccgtcgggccttataccccgatttgctgagcttctctaggagagcccctttcccagccagaggtggctggcaaaataatacctactgtaacaaaacatctaagatgcaataaccacacacctggtttccactggccgaaggcaactagcaataaggcaggtgggttcagacgcttaaagtgtgttgtaaatattcttttctaacctgtgttctacacagggtggcagatggcgtgccataactctaatagtgagataccacgcttgtggaccttatgctcacacagccatcctctagtaagtttgtaagacgtctgatgacgtgtgggaacttgttggaaataacagtttgctgcaaagcatcccactgccagtggattcacatctggtaacagatgcctctggggccaaaagccaaggtttaacagaccctttgggattggttcaaacctgaactgttatggaagacacttagtacctgctgatttggtagtaatgcaaacactagttgtaaggcccacgaaggatgcccagaaggtacccgtaggtaacaagtgacactatggatctgatctggggccggctacctctatctaggtgagttggttaaaaaacgtctagtgggccaaacccaggggggatccctggtttctttttactttgagtagtcatt

SEQ ID NO: 100 - DNA, 702 bp, Parechovirus A
  source 1..702: mol_type = genomic DNA
tttgaaaggggtctcctagagagcttggccgtcgggccttacaccccgacttgctgagtttctctaggagagtccctttcccagccagaggtggctggtcaaacaataccaaacgtaactaaacatctaagataacatagccctatgcctggtctccaccagttgaaggcatcttgcaataaaatgggtggattaagacgcttaaagcatggagtcaattatcttttctaactagtgatcttcactgggtggcagatggcgtgccataactctattagtgggataccacgctcgtggatcttatgcccacacagccatcctctagtaagtttgcaaggtgtctgatgaggcgtgggaacttattggaaataattacttgctgcgaagcatcctactgccagcggatcaacacctggtaacaggtgcccctggggccaaaagccacggtttaacagaccctttaggattggttaaaacctgagtaattatggaagatacttagtacctaccaacttggtaacagtgcaaacactagttgtaaggcccacgaaggatgcccagaaggtacccgcaggtaacaagagacactgtggatctgatctggggccacctacctctatcctggtgaggtggttaaaaaacgtctagtgggccaaacccaggggggatccctggtttccttattttagtgtaaatgtcatt

SEQ ID NO: 101 - DNA, 705 bp, Parechovirus A
  source 1..705: mol_type = genomic DNA
gaaaggggtctcctagagagcttggccgtcgggccttataccccgacttgctgagtttctctaggagagtccctttcccagccctgaggcggctggataataaaggcctcacatgtaacaaacatctaagacaaaataatttgccttgcacctggtccccactagttgaaggcatctagcaataagatgagtggaacaaggacgcttaaagtgcaatgatagttatcttttctaacccactatttatagtggggtggtggatggcgcaccataattctaatagtgagataccacgcttgtggaccttatgctcacacagccatcctctagtaagtttgtgagacgtctggtgacgtgtgggaacttactggaaacaatgctttgccgtaaggctttcattagccagcggaccaccacctggtaacaggtgcctctggggccaaaagccaaggtttaatagaccctaatggaatggttcaaacctggagcattgtggaaagtacttagtacctgctgatctggtagtaatgcaaacactagttgtacggcccacgaaggatgcccagaaggtacccgtaggtaacaagtgacactatggatctgatctggggccaactacctctatcttggtgagttggttaaaaaacgtctagtgggccaaacccaggggggatccctggtttccttttattttactttgtcaat

SEQ ID NO: 102 - DNA, 706 bp, unidentified
  source 1..706: mol_type = unassigned DNA; note = unclassified Potamipivirus sequence
cttattttataagtttcttgcagttggcctttttcaacgtcgtggctgacgttaaaaagccacaattccacttaccttttaccttttatgtttaatgtttgttagttttgtgatctttaacaaatagatctaaataatttgttggtaaccaatctcggatgtttcggctgcattgtagtttatttatttcattttagttgtaggtggccactacgtcctggaatcatacatggtaacatgtacctcggcggttatccactattacgctaatctaagaatatttaaatgaaaatgtaagtgttacggctgactttgggcctgatagttaaatgctcgcactgacagatagtaccctcctttaggatcgattctgttacatgggatccattttggtgccccactgattcaacctctttgttgaaaaagagttagcatactacaaattttccaaacaaaaaccctttttaatgactacaacttatgattttatgaattttactgctcttgaaaaagatattttgacattgatcgctgtactgtttcagacattcattgcatccatttttgttggctactcctcacaaactcaaaacttttccacacgagaaaccttgtttattgaattttgcctttatattttggaacttgttgttggatttattgtttgcttaattattgacctcacacctgttttaaacactacaat

SEQ ID NO: 103 - DNA, 707 bp, unidentified
  source 1..707: mol_type = unassigned DNA; note = unclassified Hepatovirus sequence
ggtctctggagagttccggagtccctcttggaggtccatggtgaggggacctgatacctcaccgccgtttgcctaggctataggctatttttccctttcccttttccctgttttgtgtaaatattaattcctgcaggctcagggttctttaatctgtttctctataagaacactcattttcacgctttctgtctgctttcttccagggctctccccttgccctaggctctggccgttgcgcccggcggggtcaactccatgattagcatggagctgtaggagtctaaattggggacgcagatgtttgggacgtcaccttgcagtgttaacttggctctcatgaagctctttgatcttccacaagaggtaggctacgggtgaaacctcttaagctaatacttctatgaagagatgctttggatagggtaacagcggcggatattggtgagttgttaagacaaaaacctttcaacgccggaggactggctctcatccagtggatgcattgagtggattgtttgtcagggctgtctctaggcttaatctcagacctctctgcgcttagggcaaacattacttggccttaaatgggattctgtgagaggggatccctccattgactgctggacttttctttggggccttaggtagtgtttgcctctgaggtactcaggggcatttaggtttttcctcactctcaaataatt

SEQ ID NO: 104 - DNA, 707 bp, Parechovirus A
  source 1..707: mol_type = genomic DNA
tttgaaaggggtctcctagagagcttggccgtcgggccttataccccgacttgctgagtctctctaggagagtccctttcccagccttgaggcggctggacaataaaagcctcaactgtaacaaacacctaagattattatattaaccccatgcctggtctccactggttgaaggcaacttgcaataaaatgagtggaaattagacgcttaaagtgtgttgtacatattcttttctaacctgtgttctacacagggtggcagatggcgtgccataactctaatagtgagataccacgcttgtggaccttatgctcacacagccatcctctagtaagtttgtaagacgtctgatgacgtgtgggaacttgttggaaataacagtttgctgcaaggcatcccactgccagcgggttcacatctggtaacagatgcctctggggccaaaagccaaggtttaatagaccctttgggattggttcaaacctgaactgttatggaagacatttagtacctgctgatttggtagtaatgcaaatactagttgtaaggcccacgaaggatgcccagaaggtacccgtaggtaacaagtgacactatggatctgatctggggccggctacctctatctaggtgagttggttaaaaaacgtctagtgggccaaacccaggggggatccctggtttctttttaatttgagtagtcact

SEQ ID NO: 105 - DNA, 708 bp, Parechovirus A
  source 1..708: mol_type = genomic DNA
tttgaaaggggtctcctagagagcttggccgtcgggccttataccccgacttgctgagtttctctaggagagcccttttcccagccctgaggcggctggtcaataaaagcctcaaacgtaactaacacctaagaagatcatgtaaaccctatgcctggtctccactattcgaaggcaacttgcaataagaagagtgggatcaagacgcttaaagcatagagacagttttcttttctaacccacatttgtgtggggtggcagatggcgtgccataactctaatagtgagataccacgcttgtggaccttatgctcacacagccatcctctagtaagtttgtgagacgtctggtgacgtgtgggaacttattggaaacaacattttgctgcaaagcatcctactgccagcggaaaaacacctggtaacaggtgcctctggggccaaaagccaaggtttaacagaccctttaggattggttctaaacctgagatgttgtggaagatatttagtacctgctgatctggtagttatgcaaacactagttgtaaggcccatgaaggatgcccagaaggtacccgtaggtaacaagtgacactatggatctgatttggggccagatacctctatcttggtgatctggttaaaaaacatctaatgggccaaacccgggggggatccccggtttcctcttattctatcaatgccact

SEQ ID NO: 106 - DNA, 708 bp, Parechovirus A
  source 1..708: mol_type = genomic DNA
tttgaaaggggtctcctagagagcttggccgtcgggccttataccccgacttgctgagcttctctaggagagtccctttcccagccctgaggcggctggttaataatagcctcaagcgtaactaatatctaagaagattgtgcaaaccctatgcctggtctccactattcgaaggcaacttgcaataagaagagtggaatcaagacgcttaaagcatagagacagtattcttttctaacccacattactgtggggtggcagatggcgtgccataattctaatagtgagataccacgcttgtggaccttatgctcacacagccatcctctagtaagtttgtgagacgtctggtgacgtgtgggaacttattggaaacaacattttgctgcaaagcatcctactgccagcggaacaacacctggtaacaggtgcctctggggccaaaagccaaggtttaatagaccctttaggattggttctaaacctgagatgttgtggaaaatatttagtacctgctgacctggtagtaatacaaacactagttgtaaggcccacgaaggatgcccagaaggtacccgtaggtaacaagtgacactatggatctgatctggggccaaccacctctatcttggtgggttggttaaaaaacgtctagtgggccaaacccaggggggatccctggtttccttttattttatcatatttaat

SEQ ID NO: 107 - DNA, 708 bp, Parechovirus A
  source 1..708: mol_type = genomic DNA
tttgaaaggggtctcctagagagcttggccgtcgggccttataccccgacttgccgagtttctctaagagagtccctttcccagccttgaggcggctggtcaataaatgccttaaatgtaactaacacctaagattgctttaacaaccctatgcctggtctccactagttgaaggcatctagcaataaaatgagtggaatcaagacgcttaaagcatagtgccagcatgcatttctaacctgcagtttttgcagggtggcagatggcgtgccataattctattagtgagatactacgcttgtagatcttatgctcacacagccatcctctagtaagtttgtaagatgtctgatgacgtgtgggaacttattggaaataacaccttgctgtaaagcatcttattgccagcggaacaacacctggtaacaggtgcctctggggccaaaagccaaggtttaacagaccctttaagattggttcaaacctgaggtgttatggaaaatattcagtacctgctgatttggtagtaatgcaaacactagttgtaaggcccacgaaggatgcccagaaggtacccgtaggtaacaagtgacactatggatctgatctggggccaactacctctatcttggtgagttggttaaaaaacgtctagtgggccacacccaggggggatccctggttttcttttattacacaattgtcatt

SEQ ID NO: 108 - DNA, 709 bp, Parechovirus A
  source 1..709: mol_type = genomic DNA
tttgaaaggggtctcctagagagcttggccgtcgggccttataccccgacttgctgagctcctctaggagagtccctttcccagccttgaggcggctggtcaataaaagcctcaattgtaacaaacatctaagattattatattaaccccatgcctggtctccgttagttgaaggcaacttgcaataaaatgagcggaaacaagacgcttaaagcatggtgtaaattaacttttctaacccacatcttgtgtggggtggcagatggcgtgccataactctattagtgagataccacgcttgtggaccttatgctcacacagccatcctctagtaagtttgtgagacgtctggtgacgtgtgggaacttattggaaacaacattttgctgtaaagcatcctattgccagcggaacaacacctggtaacaggtgcctctggggccaaaagccaaggtttaacaaaccctttaggattggttctaaacctgagatgttgtggaagatacttagtacctaccgatccggtagtagtgcaaacactagttgtaaggcccacgaaggatgcccagaaggtacccgtaggtaacaagcgacactatggatctgatctggggccaggtacctctatcttggtgatctggttaaaaaacgtctagtgggccaaatccgggggggatccccggtttccttttattttatcaatgccact

SEQ ID NO: 109 - DNA, 709 bp, Parechovirus A
  source 1..709: mol_type = genomic DNA
tttgaaaggggtctcctagagagcttggccgtcgggccttataccccgacttgctgagtctctctaggagagtccctttcccagccttgaggcggctggacaataaaagcctcaactgtaacaaacacctaagattattatattaaccccatgcctggtctccactggttgaaggcaacttgcaataaaatgagtggaaataagacgcttgaagcatggtgcaaatctacttttctaacccacactttgtgtggggtggcagatggcgtgccataattctattagtgagataccacgcttgtggaccttatgctcacacagccatcctctagtaagtttgtgaggcgtctggtgacgtgtgggaacttattggaagcaacattttgctgtaaagcatcctatcgccagcggaacaacgcctggtaacaggtgcctctggggccaaaagccaaggtttaacagaccctttaggattggtttaaaacctgaaatgttgtggaaaatacttagtacctaccgacctggtagtaatgcaaacactagttgtaaggcccacgaaggatgcccagaaggtacccgtaggtaacaagtgacactatggatctgatctggggccaggtacttctatcctagtgacctggttaaaaaacgtctagtgggccaaacccgggggggatccccggtttccttttattttactaatgctatt

SEQ ID NO: 110 - DNA, 709 bp, Parechovirus A
  source 1..709: mol_type = genomic DNA
tttgaaaggggctctcctagagagcttggccgtcgggccttacaccccgacttgctgagcttctctaggagagcccctttcccagccttgaggcggctggtcaataaaagcctcacatataaataacatctaagaatagcttcataaccctacacctggtccccactagtcgaagacaacttgtaataagatgagtggaacaaggacgcttaaagtgtagtgaaaatattcctttctaacccatgcacctcatggggtggcagatggcgtgccataactctaatagtgagataccatgcttgtggaccttatgctcacacagccatcctctagtaagtttgtgagatgtccgatgacgtgtgggaacttattggaaacaacaatttgccgtaaggcatcctaatgccagcggattcacacctggtaacaggtgcccctggggccaaaagccaaggtttaacagacccgttaggattggtttaaacctgaattgttgtgaaagatactcagtacctgctgatttggtagtaatacaaacactagttgtaaggcccacgaaggatgcccagaaggtacccgtaggtaacaagtgacactatggatctgatctggggccaactacctctatcttggtgagttggttaaaaaacgtctagtgggccaaacccgagggggatcctcggtttctatttattttatatttgctaac

SEQ ID NO: 111 - DNA, 709 bp, Parechovirus A
  source 1..709: mol_type = genomic DNA
tttgaaaggggtctcctagaaagcttggccgtcgggccttataccccgacttgccgagtttctctaggagagtccctttcccagccctgaggcggctggtcaataaaagcctcaaacgtaactaacatctaagattgatttaataacaccatgcctgatccccaccagtcgaagacaactagtaataagacgggtggaataaggatgcttaaagcatggcgtaaatattcttttctaacccatgatttcatggggtggcagatggcgtgccataactctattagtgagataccacgcttgtggaacttatgctcacacagccatcctctagtaagtttgtgagatgtctaatgacgtgtgggaacttattggaagcaacaatttgccgtacggcatcctactgccagcggattcacacctggtaacaggtgcccctggggccaaaagccaaggtttaacagaccctttaggattggttaaaacctgaattgttgtggaagatactcagtacctgctgatttggtagtaatgcaaacactagttgtaaggcccacgaaggatgcccagaaggtacccgtaggtaacaagtgacactatggatctgatctggggccaactacttctatcatggtgagttggttaaaaaacgtctagtgggccagacccaggggggatccctggtttccttttttatttcactacagccaat

SEQ ID NO: 112 - DNA, 709 bp, Parechovirus A
  source 1..709: mol_type = genomic DNA
tttgaaaggggtctcctagagagcttgcctagggccttataacccgacttgctgagcttctataggaaaaaaccctttcccagccttggggtggctggtcaataaaaacccccatagtaaccaacacctaagacaatttgatcaaccctatgcctggtccccactattcgaaggcaacttgcaataagaagagtggaacaaggatgcttaaagcatagtgtaaatgatcttttctaacctgtattatgtacagggtggcagatggcgtgccataaatctattagtgggataccacgcttgtggaccttatgcccacacagccatcctctagtaagtttgtaaaatgtctggtgagatgtgggaacttattggaaacaacaatttgcttaatagcatcctagtgccagcggaacaacatctggtaacagatgcctctggggccaaaagccaaggtttgacagacccattaggattggtttcaaaacctgaattgttgtggaagatattcagtacctatcaatctggtagtggtgcaaacactagttgtaaggcccacgaaggatgcccagaaggtacccgcaggtaacaagagacactgtggatctgatctggggccaactacctctatcaggtgagttagttaaaaaacgtctagtgggccaaacccaggggggatccctggtttccttttattgttaatattgacatt

SEQ ID NO: 113 - DNA, 712 bp, Parechovirus A
  source 1..712: mol_type = genomic DNA
cacatgagttatctgatgtcctctagcccatgttggtgtccactcatgtgtttccaatctaaccagtctaggagagtccctttcccagccttgaggcggctggtcaataaaaacctcaattgtaacaaacatctaagattattacattaaccccatgcctggtctccactagttgaaggcaacttgcaataaaatgagtgggaacaagacgcttaaagcatggtgtgaattaattttctaacccacatcgagtgtggggtggcagatggcgtgccataactctactagtgagataccatgcttatggaccttatgctcacacagccatcctctagtaagtttgtgaggcgtctggtgacgtgtgggaacttattggaaacaacaccttgctgtaaagcatcctattgccagcggaacaacacctggtaacaggtgcctctggggccaaaagccaaggtttaacagaccctttaggattggttttgaacctgagatgttgcggaagatatttagtacctgccgatctggtagtaatgcaaacactagttgtaaggcccacgaaggatgcccagaaggtacccataggtaacaagtgacactatggatctgatctggggccaggtacctctatcttggtgacctggttaaaaaacgtctagtgggccaaacccgggggggatccccggtttccttttactttattaatgccact

SEQ ID NO: 114 - DNA, 713 bp, unidentified
  source 1..713: mol_type = unassigned DNA; note = unclassified Rosavirus sequence
ggaccggcgctcacccgtttcgacgagtgaccgcctaggattctctctgcccttgctttggacgcccgccacggcgttaaactggcacttcccctcacccctaccctgtaactaagtttgcacctcgcccagacaggctgctaagacgcttgttgctacagtatgtctggatccgcgagttctccttaagaaatcttttccacctccgccggtgcctatgccggtcgagacgggttaggaccccgttggctcaggccagagacaatcggtagtagtctttctactctcgcccatgccggttgtcacaccctcactagtcttaccaaggttgtaaattgtctgtgaaagctttacatgaactctgctgtgttgtagcgatggatgtgttgtgagcggatttccccacgtggtaacacgtgcctctcagaccaaaagtcacggtgttaacagcacccgcacatctggctgccttcccccgcagcccacagctttgtgattgtttagttagtaacggaacatttggcaatcctgaactaaggttagtgcaacggctaaggatgccctgaaggtacccgcaggtaacgttaagacactgtggatctgatcaggggccctcggtgcgcgtgctttacacgcgtagccagggttaaaaaacgtctatgccgtttcccccccgggagggggggttccttacccccatcacaattggcatt

SEQ ID NO: 115 - DNA, 717 bp, Megrivirus E
  source 1..717: mol_type = genomic DNA
gtttgggggggcgttcccccaggggctcctttccggtgtgaggcttggcaacctcatatcgttactctgccgaccagtctgggtcgtgtggccacacaatgggattcgttctgttgtgtagagtcacatggcattactgggctgatcggtggggatccgttgccacccctaaacccttacatttactggactgcttttcttggccccggaatgattcgctcacccgcgatgaggactgttgttcttattatggcaggattacgcgtctggtccgcgtaaggactaattcctatgtttatacgttactaccttgttctgaacggtgggcgccaccccgcctagtaggatcctggcttatcgtgtagacctctagggaccacattagctagagtgtaggctgctatggatggagtagtgacccctttttgggtatcactctctaagactccggaatgtgtcatagtacgctggaaatccttacttgtttttccatgagggggaggtggtgctgaaatattgcaagccacccctcggttaaaacagtttggtgccgcttatgccatattaccgccccttgtagttgggctgtttttgcagctccgggttagtagagtaccatagtggacgcggtgttgggaatcaccgccttggctgcacactgcttgatagagctgcggctggtcaagctaattgtggtataaccagttgatttggcat

SEQ ID NO: 116 - DNA, 736 bp, unidentified
  source 1..736: mol_type = unassigned DNA; note = unclassified Hepatovirus sequence
ttcaagaggggtctccggggatttccggagtccctcttggaagtccatggtgaggggacttgatacctcaccgccgtttgcctaggctataggctaaattttccctttccccttccccttccttgttttgattgtaaatatcaattcctgcaggttcagggttcttaaattggcattaaatttgtttctctataagaacactcaattttcacgctttctgtcttctttcttccagggctctccccttgccctaggctctggccgttgcgcccggcggggtcaactccatgattagcatggagctgtaggagtctaaattggggacacagatgtttggaacgtcaccttgcagtgttaacttggctttcatgaatctctttgatcttccacaagaggtaggctacgggtgaaacctcttaggctaatacttctatgaagagatgctttggatagggtaacagcggcggatattggtgagttgttaagacaaaaaccattcaacgccggaggactgactctcatccagtggatgcattgagtggattgactgtcagggctgtctctaggcttaattccagacctctctgtgcttggggcaaacatcatttggccttaaaaggggttctgtgagaggggatccctccattaacagctggactgttctttggggccttatgtggtgtttgccgctgaggtactcaggggcatttaggtttttcctcattctcaaataata

SEQ ID NO: 117 - DNA, 737 bp, unidentified
  source 1..737: mol_type = unassigned DNA; note = unclassified Hepatovirus sequence
cttcaagaggggtctccggaggtttccggagcccctcttggaagtccatggtgaggggacttgatacctcaccgccgtttgcctaggctataggctaaatttccctttccctgtccttcccttatttccctttgttttgcttgtaaatattgattcctgcaggttcagggttctttaatcatgtttccctataagaacactcaattttcacgctttctgtcttctttcttccagggctctccccttgccctaggctctggccgttgcgcccggcggggtcaactccatgattagcatggagctgtaggagtctaaattggggacgcagatgtttgggacgtcaccttgcagtgttaacttggctctcatgaacctctttgatcttccacaaggggtaggctacgggtgaaacctcttaggctaatacttctatgaagagatgctttggatagggtaacagcggcggatattggtgagttgttaagacaaaaaccattcaacgccggaggactggctctcatccagtggatgcattgagtggattgattgtcagggctgtctctaggtttaatctcaagacctctctgtgcttagggcaaacaccatttggccttaaatgggatcctgtgagagggggtcccctccattgacagctggactgttctttggggccttatgtggtgtttgcctctgaggtactcaggggcatttaggtttttcctcattcttaaacaata

SEQ ID NO: 118 - DNA, 742 bp, unidentified
  source 1..742: mol_type = unassigned DNA; note = unclassified Enterovirus sequence
ttaaaacagctctggggttgcacccaccccagaggcccacgtggcggctagtactccggtaccacggtacccttgtacgcctgttttatactcccttcctccgcaatttagaagctcatgatcaagttcaataggagggggtacaaaccagtaccaccacgaacaagcacttctgtttccccggtgatgttgtatagactgctcgcgcggttaaaagcgacggatccgttatccgctcatgtacttcgagaagcctagtattacctcgggatcttcgacgcgttgcgctcagcactcaaccccagagtgtagcttaggtcgatgagtctggacattcctcaccggcgacggtggtccaggctgcgttggcggcctatctatggctaacgccataggacgctagttgtgaacaaggtgtgaagagcctattgagctacatgagagtcctccggcccctgaatgcggctaatcccaacctcggagcaggcgatcacaagccagtgattggcctgtcgtaatgcgtaagtccgagacggaaccgactactttgggtgtccgtgtttccttttatttttatcatggctgcttatggtgacaatcagtgattgttgtcatagagcgaattggattggccatccggtgaaaacaaagtcaattactttctcacttgttggacctacacccgatacgctttacccccaagctaattaaaattattagaagttaggactacggtgtcaca

SEQ ID NO: 119 - DNA, 743 bp, Enterovirus C
  source 1..743: mol_type = genomic DNA
ttaaaacagcctgtgggttgttcccaccccagaggcccacgtggcggctagtacaccggtatcacggtacccttgtacgcctgttttatactccctaccccgtaacttagaagcaataatccaagttcaatagtaggggtacaaaccagtaccaccacgaacaagcacttctgtttccccggtgatatcgtatagactgtacccacggtcgaaaatggtggatccgttatccgcttttgtacttcgagaagcccagtaccatcttggaatcttcgatgcgttgcgctcagcactcgaacccggagtgtagcttaggccgatgagtctggacaatccccaccggcgacggtggtccaggctgcgttggcggcctacctgtggcccaaagccacaggacgctagttgtgaacaaggtgcgaagagcctattgagctacaaaagagtcctccggcccctgaatgcggctaatcccaaccatggagcaggtgatcacaaaccagtggtaagcctgtcgtaacgcgcaagtccgtggcggaaccgactactttgggtgtccgtgtttccttttatttttgtatggctgcttatggtgacaatcaaagattgttatcataaagcgaattggattggccatccagtgagagtaaagcacattatttacttgcttgttgggtttgcccctttgatttgtaacactctttatctaccttatattgtacttttggttagacaacagtatcacg

SEQ ID NO: 120 - DNA, 743 bp, Enterovirus C
  source 1..743: mol_type = genomic DNA
ttaaaacagctctggggttgcacccaccccagaggcccacgtggcggctagtactccggtattgcggtacccttgtacgcctgttttatactcccttcccgtaacttagacgcacgacaccaagttcaatagaagggggtgcaaaccagtaccaccacgaacaagcacttctgtttccccggtgatgttgtatagactgcttgcgtggtcgaaagcgacggatccgttacccgcttatgtacttcgagaagcccagtaccacctcggaatcttcgacgcgttgcgctcagcactcaaccccagagtgtagcttaggctgatgagtctggacgtcccccaccggtgacggtggtccaggctgcgttggcggcctacctatggcttacgccatgggacgctagttgtgaacaaggtgtgaagagcctattgagctacataagaatcctccggcccctgaatgcggctaatcccaacctcggagcaggtggtcacaaaccagtgattggcctgtcgtaacgcgcaagtccgtggcggaaccgactactttgggtgtccgtgtttccttttattttattatggctgcttatggtgacaatcacagattgttatcataaagcgaattggattagccatccggtgaaagtgagactcattatctacctgttcgctggattcgctccattgagtgtgtttactctaagtacaatttcaacagttatttttaatcagacaattgtaccata

SEQ ID NO: 121 - DNA, 744 bp, Enterovirus C
  source 1..744: mol_type = genomic DNA
ttaaaacaagtctggggttgttcccaccccagaggcccacgtggcggccagtacaccggtatcacggtacccttgtacgcctgttttatactccctaccccgtaacttagaagcaacaatccaagttcaatagtaggggtacaaaccagtaccaccacgaacaagcacttctgtttccccggtgataccatatagactgtacccacggtcaaaaatggtggatccgttacccgcttttgtacttcgagaagcccagtatcatcttggaatcttcgatgcgttgcgttcagcactcgaacccggagtgtagcttaggtcgatgagtctggacaatcctcaccggcgacggtggtccaggctgcgttggcggcctacctgtggcccaaagccacaggacgctagttgtgaacaaggtgtgaagagcctattgagctacaaaagagtcctccggcccctgaatgcggctaatcccaaccatggagcaggtggtcacaaaccagtgactagcctgtcgtaacgcgcaagtccgtggcggaaccgactactttgggtgtccgtgtttccttttattttatgtatggctgcttatggtgacaatcaaagattgttatcataaagcaaattggattggccatccagtgagagtaaaacacattatctacttatttgttggatttgtccctttaattcatcacactcttcatctaatttacattgtggttctaattagacagcagtatcaca

SEQ ID NO: 122 - DNA, 744 bp, Enterovirus C
  source 1..744: mol_type = genomic DNA
ttaaaacagctctggggttgtacccaccccagaggcccacgtggcggctagtactccggtattacggtacccttgtacgcctgttttatactccctccctcgtaacttagaagcacaaaaccaagttcaatagaagggggtgcaaaccagtaccaccacgaacaagcatttctgtttccccggtgatgttgtatagactgcccgcgcggttgaaagcaacggatccgttacccgctcaagtacttcgagaagcctagtattaccttggaatcttcgatgcgttgcgttcagcactcgaccctggagtgtagcttaggctgatgagtctggacgtccctcaccggtgacggtggtccaggctgcgttggcggcctacctatggctaacgccataggacgctagttgtgaacaaggtgtgaagagcctattgagctacttgagagtcctccggcccctgaatgcggctaatcctaaccatggagcaggcggtcacagaccagtgactagcttgtcgtaatgcgcaagtctatggcggaaccgactactttgggtgtccgtgtttccttttatttttattatggctgcttatggtgacaatcattgattgttatcataaagcgaattggattggccatccggtgaaagcgagacttactatttacttacttgttggacttaccacacttaatacatttattctaggtgtcacttgtatagcaattagaatcaaacagttgcatcata

SEQ ID NO: 123 - DNA, 744 bp, Enterovirus C
  source 1..744: mol_type = genomic DNA
ttaaaacagctctggggttgttcccaccccagaggcccacgtggcggctagtacactggtatcacggtacctttgtacgcctgttttatactccctcccccgcaacttagaagcatacaattcaagttcaataggagggggtgcaagccagcgcctccgtgggcaagcactactgtttccccggtgaggccgcatagactgttcccacggttgaaagtgtccgatccgttatccgaccatgtacttcgagaagcctagtaccgctctggaatcttcgacgcgttgcgctcagcactcaaccccggagtgtagcttgggccgatgagtctggacagtccccactggcgacagtggctccagctgcgctggcggccgcgacctgtggcccaaagccacgggacgctagttgtgaacagggtgtgaagagcctattgagctacatgaagagcctccggcccctgaatgcggctaattctaaccatggagcaggcagctgcaacccagcagccagcctgtcgtaacgcgcaagtccgtggcggaaccgactactttgggtgtccgtgtttccttttattcttgaatggctgcttatggtgacaatcatagattgttatcataaagcgagttggattggccatccagtgtgaatcagattaattactcccttgtttgttggatccactcccgaaacgttttactccttaacttattgaaattgtttgaagacaggatttcagtgtcaca

SEQ ID NO: 124 - DNA, 746 bp, Enterovirus C
  source 1..746: mol_type = genomic DNA
ttaaaacagcctgtgggttgtacccaccccagaggcccacgtggcggccagtacaccggtattacggtacccttgtacgcctgttttatactccctaccccgtaacttagaagcaataacttaagttcaatagtagggggtacaaaccagtaccaccacgaacaagcacttctgtttccccggtgacattgtatagactgtgcccacggttgaaaacgatggatccgttatccgctcttgtacttcgagaagcctagtaatactttggaatcttcgatgcgttgcgctcagcactcatccccagagtgtagcttaggccgatgagtctggacattcctcaccggcgacggtggtccaggctgcgttggcggcctacctgtggcccaaagccacaggacgctagttgtgaacaaggtgtgaagagcctattgagctacaagagagtcctccggcccctgaatgcggctaatcccaaccatggagcaggtgatcgcaaaccagcggttagcctgtcgtaacgcgcaagtctgtggcggaaccgactactttgggagtccgtgtttctctttatttttacttatggctgcttatggtgacaatcatagattgttatcataacgcgaattggattggccatccggtgatatacaaacacattgtttacctatttattgggtttacacctttaagttctttcactctacaccttactcgtgttgtgttattaaccagacagtggtgccaac

SEQ ID NO: 125 - DNA, 748 bp, unidentified
  source 1..748: mol_type = unassigned DNA; note = unclassified Rabovirus sequence
ggagttttagtggtgttccaacactatgcgccatgatgtgttctacggaacatgttatgacgtatctttcatctaccccaacccttgtgtcaaccgatacgcctacacaggtgggtaaagcaccggcccactgaatggaacaaaatgctaggtgcaaagtcaggcccataggccatcggtcgaagcccgcttgggaataagactgatggattaccctattctggcgcctgaccacttgtttcttttctgaatcacacacctgtgtgaacggtggacctgcaccgtaactcttctagcctactaccacacttgtggaactataggggcacaggaacttcaaccaagtgctgttggaatggagaaaataatccaatcctgaaacgtcatggatccacactctgtgtggggctactagcctgcggaacaacacatggtaacatgtgccccaggggccgaaagccacggtgataagatcaccctagtagtttgagattgtatcaatgttcatgtcttagtaaggggaggtgaaatctatctgtgacaccggattactggttgtcgtatagcggctgaaggatgtcctgctggtacctttagggaaccttaagagactattgatcgaagcaggagcctggttggtctctcccactccaggttaaaaaacgtctaggccgtggaaccgggcgggaggcccggttttcctcccaaaattataatattgtgtatggtgacaactgaaggcttaaca

SEQ ID NO: 126 - DNA, 751 bp, Aichivirus E
  source 1..751: mol_type = genomic DNA
ttgaaagaaactccgggtattaaccatacccggagttttggcagggtgttccaacctgtcctggccatgcatttatctacggatatttgcatgacccgctttctatcgccccaacaatcccctttgtaaccacaagctttactcaggctagcagcccgactagctgtttggaagaaaaggctagggcacacaccaacaacaccgaccccactggtcgaaggccgcttggcaataagactggtggaacagggtcgcctgtagttgtttggaacattctttctaatgactttgtcagcggtgctactcacaccgtaactcttctaccctatccccacgcttgtggaactaggaggggatgagtgattcaagtaagtactgtcagaatggtgaaaatgatctgattctgaaacgctatggatccatcgaaagatggggctacacgcctgcggaacaacacatggtaacatgtgccccaggggccgaaagccacggtgataggatcacccgtgtagtttgagatcatatcaatgttcatagtctagtaagatgatttgaaatctaactgagctgatggctaactgcttgtcttattgcggcctaaggatgtcctgcaggtacctttagataaccttaagagactattgatctgagcaggagccaaagtggtctttcccagctttggttaaaaaacgtctaagccgcggcagggggcgggaggccccctttcctcccaaaacttaatattgattgt

SEQ ID NO: 127 - DNA, 751 bp, Enterovirus C
  source 1..751: mol_type = genomic DNA
gaaattaaaacagctctggggttgttcccaccccagaggcccacgtggcggctagtacactggtattacggtacccttgtacgcctgttttacacccctttcccccgtaacttagaagcttttaaattcaagttcaacagtgagtggtacaacccagtactactatgaacaagcacttctgttaccccggtgagattgcataagctgtccccacggctaaaagcgattgatccgttatccgctcttgtacttcgagaagcccagtaaaaccttgggatcctcgatgcgttgcgctcaacactcaaccccagagtgtagcttgggctgatgagtctgggcattcctcaccggcgacggtggtccaggctgcgttggcggcctacctgtggcccaaagccacaggacgctagttgtgaacaaggtgtgaagagcctattgagctacaagagagtcctccggcccctgaatgcggctaatcccaaccacggagcaggtgattgcaacccagcaactagcctgtcgtaacgcgcaagtctgtggcggaaccgactactttgggtgtccgtgtttccttttattacataatggctgcttatggtgacaatcatagattgttgtcataaagcgagttggattggccatccggtgagaattaaaacaattatttacttgtttgttggatttgttcctatacacacccatacaccttgcttgattgaagtaattctgttgataagacaacactattacg

SEQ ID NO: 128 - DNA, 752 bp, unidentified
  source 1..752: mol_type = unassigned DNA; note = unclassified Salivirus sequence
tttcctcctttcgaccgccttacggcaggcgggtccgcggacggcttcggcctacccgcgacaagaatgccgtcatctgtccttatcacccatattctttcccttcccccgcaaccatcacgcttactcgcgcacgtgttgagtggcacgtgcgttgtccaaacagttacactcacacccttggggcgggtttgtcccgccctcgggttcctcgcggaaccctccctcttctctctccctttctatccgccttcactttccataactacagtgctttggtaggtaagcatcctgaccccccgcggaagctgccaacgtggcaactgtggggatccaggcaggttatcaaaggcacccggtctttccgccttcaggagtatccctgccggtgaattccgacagggctctgcttggtgccaacctcccccaaatgcgcgctgcgggagtgctcttccccaactcatcttagtaacctctcatgtgtgtgcttggtcagcatatctgaggcgacgttccgctgtcccagaccagtccagcaatggacgggccagtgtgcgtagtcgctttccggtttcccggcgcatgtttggcgaaacgctgaggtaaggttggtgtgcccaatgcccgtaatttggtgacacctcaagaccacccaggaatgccagggaggtaccccacttcggtgggatctgaccctgggctaattgtctacggtggttcttcttgcttccacttctcttttttctggcatg

SEQ ID NO: 129 - DNA, 754 bp, Parechovirus C
  source 1..754: mol_type = genomic DNA
gaaagggggccaccctgcccatagggcagggtccttcttggctgggtggctcgtatccactccatgggttgtgcctatccggtcatccccctttccccacagccggtgtgggttctaatcggctcctactaaacacctaagcatcactgcgcctctatctctcctatccacaggtctaagacgcttggaataagacatgtgggtgcaataggaagattagctagtccaatctctccttccagctacgcttctcccttcgatgagcgtagggggggcccccacctccctcatctctggatagggctcttgctacggggctttcccgtctggaccagcaggcccactggtgcgcttccattcaagtttagtgtgcattactgtctgaaatattgctttgctaggatctagtgtagcgacctgcatattgccagcggacttccccacatggtaacatgtgcctctgggcccaaaaggcatgtctttgaccgtatgcagtacaaccccagtataggtcctttctatggcagtatggatctcagtgatgagtctatacagaatatggaagtggttcggatatgtcagcccgaaggatgcccagaaggtacccgcagataaccttaagagactgtggatctgatctggggcccaccaccttcgggtgggtagaagctaaccatgccttgggttaaaaaacgtctaagggctgaccagacccgggggatccgggttttccctatcttgacctactctaatc

SEQ ID NO: 130 - DNA, 762 bp, unidentified
  source 1..762: mol_type = unassigned DNA; note = unclassified Hepatovirus sequence
tttccctttcccttttttcaagaagggtctccgggaatttccggagtccctcttggaagtccatggtgaggggacttgatacctcaccgccgtttgcctaggctataggctaaattttccctttcccttttccctttcctattccctttgttttgcttgtaaatattgatttgtaaatattgattcctgcaggttcagggttcttaaatctgtttctctataagaacactcatttcacgctttctgtcttctttcttccagggctctccccttgccctaggctctggccgttgcgcccggcggggtcaactccatgattagcatggagctgtaggagtctaaattggggacacagatgtttggaacgtcaccttgcagtgttaacttggctttcatgaatctctttgatcttccacaaggggtaggctacgggtgaaacctcttaggctaatacttctatgaagagatgccttggatagggtaacagcggcggatattggtgagttgttaagacaaaaaccattcaacgccggaggactgactctcatccagtggatgcattgagtggattgactgtcggggctgtctttaggcttaattccagacctctctgtgcttggggcaaacatcatttggccttaaatgggattctgtgagaggggatccctccattgccagctggactgttctttggggccttatgtggtgtttgccgctgaggtactcaggggcatttaggtttttcctcattcttaaataata

SEQ ID NO: 131 - DNA, 788 bp, Poecivirus A
  source 1..788: mol_type = genomic DNA
aggtcggtgctgtgacttttgtagttggattggatcctcactttgggtgaggttccactccaagtttgagtgttttgtgtgtgtgtgggcataattaattgtttattatgggaactacacaatcgcaacacgcgcaagtttgtagtttgattggcgtgcaaatgtcaaatcaagcatataacacaatttggtggctgttggtgtttgttataggaattttggttgtgttgaaattgtggatgtgtaggaaatatgcacaattacgtcagcgtcaggagttttataacctggcgcaacaccaaaatggtcttcgcgctttaacatcaccagcgaggtgtaaacaaattgaagttgaattagatcgtgtataggccagggaaccatccctcccaacgccacatcttgtggggaagttgggataatggtgggtctatatgaattggtctgtagacccacagtgaagagtgaatagtatgcttgcggttccatttgttaatggtctagcatgggtgggggcggcaaccccgtgaggggttccccactggccaaaagcccaggggttagtcatttcaaccaaggaagctggtaacctggtgacctgaacttgagtggtgagacccccttgctagagtgtgtaaaccgattgtaagcattttgtttgcttagtatctgtggtataagcagtcaattttgtataggctcaaggctgtggtagttagtagatgcccggaaggttattactgatccggggaccgtgactatacattaggtaaaccggtttaaaaacc

SEQ ID NO: 132 - DNA, 816 bp, unidentified
  source 1..816: mol_type = unassigned DNA; note = unclassified Picornaviridae sequence
gttcagttgccatccccgttcgggtggtttctcacggctaggcggaagtccagcccattcaacgtgagtccgggagttgggatatccaaaaaggagtcccgttttacttacacaccctcatgtctagccacagagggactgtgcggtagccactccgcacaaacggaaaagaggccagaggggatactcccccctggaccccttttccgtttgtgcggagtggcgaccgcacaggcgttaggctgctaagtagtctgcaagtagcttgcccactctctggggacaaagttctctggattggggtaagtgaagtgcgtgggctaacttggtggctgtagcccggatctggccggcctatgaaaccacggatccgcttcttttccctataccttttcccgagtgtttgtctgcaacttgttaagtgatttcttggtttgtttgacacaatcgctttggattttgttcttattttggtattttgaccactctagtatttgtgttctacctgaaattcccttgcaaggggtgtagtagggtgttgctcgtactagttgtggactccctctgtggctagacatgagggtgtgtaagtaaaacgggactcctttttggatatcccaactcccggactcacgttgaatgggctggacttccgcctagccgtgagaaaccacccgaacggggatggcaactgaacctagtagggctcgtaggaggcttgcacatacaccagattgggaattctggtcttgctcatgactgggtgatagccttgcggcggatcaagtcacagttgtaatccgttgatttgcaccc

SEQ ID NO: 133 - DNA, 833 bp, Megrivirus D
  source 1..833: mol_type = genomic DNA
tttgacaacctggcaaccctatctctaggtaggatgctgtctttggcccccgcctcccccatcctcccgaccatatctctattgggatgtgttcgggtcgtcacggatccgacattcctaccggggtccttctggctacggctggtctgactttggtggatgtgtgacggtgtaattactttccggatcccactttcctattataactctttcatcccaaggttagggaaagaacctggctcggtaccaccagaccctccgccacgctagtggactctccggagataacggtaccccctttgtagtcacctgtgctggtgaagaaccacctagtattgcttgggtgcgtgccgcctagcttccatttcttctggagcactgtgcaatgaggtttccccacttggtaacaagtgcctcaggtcccgcaaggatactgtggggtggtgtgaccgcagggagctgtctccacggctcctctaatgttacgccgctatccacaggccagtgcgtgtcatcgatcccggatgacagagctagtattgcgaacccccaagtaagaaaagtggctagtaacctgatagctggtgaagagggtgggtcagttgagtagatgccctagaggtacccgaaaggatctgactagggacccgtgactatacattaggtaaaccgggtataaaaaccatgaaaaactgaccacttttcttttaacctcttctttctttttatgtgtgttaagtgttttgagtttggactgtaccttgcccgcctttcttggattttctctatcgctcttcttacacctactgttatcaaggcactctttagagata

SEQ ID NO: 134 - DNA, 894 bp, Erbovirus A
  source 1..894: mol_type = genomic DNA
ttttgtaactgaggttttgacatctcattgtttttgagccccaacgtcttggtggatgctcaaagaagattactcttgatgcttggctctcagaaagaatggcacctcaatgttttgagacccgattcttttgagtcgagaccatttccccttccctgaagattgcttttcttccaactaaacccctattgatgtgttggtcgtttgccaatcggagggcgacaggcacaggtcgctccgagttctagtagtgtgggaacttgttactactgatgaaacgaggtagtgacactcagtacctgcgaacgaggtcggggccctcccttcttccttcacccaactttcacttttcgttccactttagcaggggtcttctttctatccccctggcggcattggaactagccgtcgcgtcttaacgcgcagccctgaaggccccacaccttgtggatcttgccgtgggtatgtttctggcatgtgtttctcaagcctgcaaccgaagccgaacagccacatgaacagtttgagcgtggtagcgctgtgtgagttggcggtggatccccctcgtggtaacacgagcccccgtggccaaaagcccagtgtttacagcacctctcacatccaggacgaccccatcctggcgctcactcttagtagtatggcttagtacgcattaggtggtaagccgagctctccctcggccttgttctgaatgcacacatgtctaggggctaaggatgtcctacaggtacccgcacgtaaccttcagagagtgcggatctgagtaggagaccgtggtgcactgctttacagatgcagcccggtttaaaaagcgtctatgcccctacagggtagcggtgggccgcgccctttccttttaaaactacttgttct

SEQ ID NO: 135 - DNA, 897 bp, unidentified
  source 1..897: mol_type = unassigned DNA; note = unclassified Erbovirus sequence
ttttgtaactgaggttttaacatctcattgtttttgagccccaacgtcttggtggatgctcaaagaagattactcttgatgcttggctctcagaaagaatggtacctcaacgtgttgagacccgattcttttgagtcgagaccactcccccttccccttgaaagattgcttttcttccaactaaacccctatcgatgtgttggtcgtttgccaatcggagggcgataggcacaggtcgccctacggtctagtagtgtgggaacttgccgctactgatgaaacgaggtagtgacacttagtacctgcgaacaaccctagggcaactcccttcttccttcacctacttttcctttccgttctgctttagcaggggtcttctttctatccccctggcggcattggaactagccgttgcgccttagcgcacagccctgaaggccccacaccttgtggatcttgccgtgggcatgtttctggcgtgtgtttctcaagcctgcaaccaaatgccgaacgggcacgtgaacagtttgagcgtggtagcgctgtgtgagttggcggtggatccccctcgtggcaacacgagcccccgcggccaaaagcccagtgttagcagcacctctcacatccagggaaaccccaccctggcgctcactcttagtaatgtgtcttagtacgcactaggtggtaagccgagctctccctcggtcttgtactgaatgcacacacgtctaggggctaaggatgccctacaggtacccgtacgtaaccttcagagagtatggatctgagcaggagaccgtggtgcgctgctttacagtcgtagcccggtttaaaaaacgtctatgcccctacagggtagcggtgggccgcgccctttcccttttaaaacttggtttc

SEQ ID NO: 136 - DNA, 1000 bp, unidentified
  source 1..1000: mol_type = unassigned DNA; note = unclassified Sicinivirus sequence
gggtgggatggatcccgttgcgtgcctgcagccgctcggtgtccatccttcctgttacccaccatgtctggtggtaccccccggtcccttccctatccccccatacagccgggacggaccacttacctccgggtctgtggcccaaccccgactcggggttgtggcggtggtcacagctccggctgtgacctcctaaccactcccttcacctactcccttatatagaaacttaagtttgactccccctatcccaaggtcttggctcatgccctttaaggctatctagcacaaacactctttgtttggcgtctggagacccactgagctaccactcatccgcgctcaatgtaacccccattagtattcgtgcaattttaatagtagttctgctccggcagcatctaagtgcccagggagcccaactggtgacagttgccctggggcccgaaaggctaggtggcaggggcccggtcaagcaaggggttcccaccctgagctgatcccgcggtcccgaagccaccctttggatggaggttccacacccgactgctatttcttttgcccggtgaacctggctggaaacatttagtttatggatttgttggtctgtggtgattagtagaccccctggaggtacccgtttggatctgaccagggacccgtgactatgccgttccggtaatccgggtttaaaaccatgaacgtcaccactcgctttcttttccttgttcttatttcttttatattgcaaactattagtgagaattcgtgttccctgacctctgcgtttggtctgcattctcagttattcagtttggctggtctggattgtttgtttagatgctcctagagcttctgctggttgttgtcacacttgttatagtcgttgcttctcccggcgagttttaccagttgcttgctatctgcacctacaacttcctgttgatctttctctggctagttggcttgattgaactttccaactatcctaccattcaac

SEQ ID NO: 137 - DNA, 1000 bp, unidentified
  source 1..1000: mol_type = unassigned DNA; note = unclassified Sicinivirus sequence
atacctttaccttcccccactcactgatcggtgccaaccccaactccccagtgtcagatgcttttacaaactttatgctatggcgcgctggagtggcagtccacatttccacgtcggccagccccgctatggcaggagcgctactcgtggtggcatcacccgagggctttgaggacgtgcaacagcgcccatggaatgcgcaagttagcgggctaactacaatcccatatgtacttcttaacctgtgccaatccaattcagccactgtaatcctccctccttgtacagtcactccgtttgatgatgcccgctcccatacatcttggtctgtgcgcgtgtatgtcttcacacagctaaatgtccctaccggcgttgcaaatcaaatcacaattcaattgatgtttgctccccttgcttcccggtttttgtttgcatgtgttcccataaagcaccacctgcgcacccgcatactacccggttccggggatggctattcatttaacatcccccagaaccagggcgtccctatggctcaatatcttcctgaacatgagtccgcagactacatccctgggcattttgataattttgcacggtttgctaacgcccccgggctcttgcgcactgtgcgttggctctctgagtatactcccaacacacctcttcttcggcttaatttgaattctattagtctcggtcccgatacccacacccccttatcctatgtacttagtgcttttgctcaacaacgtgggtctctctcttttgatttggtgtttgttggggcccaggtccaatctgggcgcctgctcatatctataacccccccctcgcaggcccctcctgccagtgtcgaggaagccctccgtggccattccctgacctgggacgtgactgtgtcttgctgcagctcatttcacgcccccttcttctctgcgactgcctggcgatctctagctattgatggatccgctacaaaaactctctacaattcgtgggg

SEQ ID NO: 138 - DNA, 1000 bp, unidentified
  source 1..1000: mol_type = unassigned DNA; note = unclassified Cardiovirus sequence
ccccacggtaaccccctttggacgcgggacctgcgatagtgccaaccccagcctttcctacacccgactcccgaccctaacccagggtcctcggaagaggatcatacatctcatcccctgaatgctgactaatcagaggaaagttagcattttccggcccaggctaagagaagtagataagttagattcaaattgatacaacatccccttgacgaattcgcaacgaaaagtcgtccctcacttgccgcttgatcacacccacgaactcacaattcggcccctcgtgacaagccccttgttgaaacgacctctttcaatgcgacgtggttggagatttgtcatcttacgactccgacgtaactaccgtcatgcctccccgattatgtgatgctatccgccctgctgggtggagcattctcgggttgagtaacctacatcctttactccttggactccggtcccccggtctaagccgcttggaatatgacagggttattttccaaacatcttctttctactcttaagtgttctatacttaagaagggtatgtgttgccccttccttcttggagaacgtgcgcggcggtctttccgtctctcgaaaagcgtgcgtgcaacatgcagagacctgtgaagaaagcagtctttgaactagccttagtgcagacaagaaactggctgtagcgacctcacactagcagcggacacccctcctggtaacaggagcccctgcggccaaaagccacgtggataggatccactggtgtgagcggtgcatccccagcaccctggtttcttggttgtactctggtgaacccagagatggcaatcttaagcaactctgtagagaagccaagaatgtccggaaggtaccccgcttcggtgggatctgatccggagactcgtccacagtgctctacactgtggctcgggtttaaaaactgtcacagcttctccaaaccaagtggtcttggttttccctttttactcattgtgtcacg

SEQ ID NO: 139 - DNA, 1000 bp, Mischivirus C
  source 1..1000: mol_type = genomic DNA
aagcttgcttcaccagaattgctaggggcgaaccgacaacaccttgttgagtttccgtcccgagacaattcatacaagttccaagactcatgaagcaattggtgcgtactgacgattggtttggctcgagcacgtgttccgtccttgggataatacacaacgctaagtatccaagaaaggccttgtgtagtccctcacgattatgtcatgtctcgatgtcactccacgtggagtacaaacctctttccatctgtctaagcttttatggagtctcccacgattatgtgctctcaatcgtggttgtcgcgcggtctagttctcagcgcgaagtttaagctaagcaccctcgggcgttcccggattatgtgatcacatcaatttgatggctggtcaccacgcaacgcctggagagatactcttacttttctcttaagatccccggtcatttgacgcttgtaggatgatagggttattttccactataaatactttcatactcttggatgttctatatccaagacgggaggacctaccccgtaccccttagaggtgagatgccaagaacaggccctttctgttctctcgacaatggcatcataggcaacaagcatcacaccaagattgctaagttttgttaagagttcttcaagctatagggtggctgtagcgaccttctgatgcctgcggatttccccacggagcgatccgtgccacaggggccaaaagccacggctaacgcccatcaggagcggcacttaccccgtgccccacccttgaaacttgaatgttcacactggcttctctcggctttctgaactgtctgcttgttggggccccgaaggatgccctggaggtaccccattttatgggatctgaccaggggacacctcagctctctaagttgctggtgtttaaaaaacgtctaagggcccccaccccttaggtggagggatccacctttcctttattttttaaaactcttttatggtcacaattgttt

SEQ ID NO: 140 - DNA, 1000 bp, unidentified
  source 1..1000: mol_type = unassigned DNA; note = unclassified Picornaviridae sequence
actaacaggtgaaccctgtgagtttccggcccaggatttaggatgacatgttccaagtcagatgccaacgacttggtaaggacgaatttgcccgcattatgctacagttcccgcccgggacaactgacaccccattaagctacaacatggctgaaaagggtgttgggtccccccggattgtgtctgttcatagtgtgtgtaacgtggtttaccatctccactaacattggactaagcatttcatctttcctccccgattgtgtactcacttggctaacgctgggtggtcgcggttgggtccttgatttactttttctcgtctaagcattccaactgtcctccccgattatgtgctcattcagttaactgctgggtggtcatgactaacatcgaggaatcttctgtctacgcttactttgagctccggtcgcttgacgcttgtagggcgatagggttatcttcctgacaacatctttattctacctccataggctctatctatggagacggagtgtggcacccgtcccttctttgggagcttcggtagtgacgccctttgtcactctcgccagccgaggcatgcctggtgccaggtagcaaagaaagtatatgcttaaggacttgactgatttagcgcaagagtttgtagtgatgtccatagtgtctgcggatcccccacacggcgacgtgtgccgcggaggccaaaagccacggtgttcacagcacccctatggatgcccacagaccccagtgggcactcttgttgccggactttcaggaaattaggtataggctcttctcaaactcctggcattggactaggtaagaatgccccggaggtaccccagtactccttcgggagtctgggatctgaccgggggccccacaaacatgctttacgtgtttcgtgcggtcaaaaattgtctaactagtcccaaccttgaacaagggattgttctttccttttattactgagactggcctatggtgacaacagaga

SEQ ID NO: 141 - DNA, 1000 bp, unidentified
  source 1..1000: mol_type = unassigned DNA; note = unclassified Picornaviridae sequence
aatagagttttgccattctctaacttgtcaagatgggcacaatgatgctttgtttaacaaggctgatttttccttttgtaatatgagtggaattgtgttccactctattcttcttttatatacatcttatgtatgagactgactgcgtgtataagagaggtaagcaactaagacttgtaaccctcggagtgggttggaatgctgagctctacgcatgtggcgtagagacgatctcgggaatctgtctaaaagttgacataccgacctgtcgagactaataactcgattccattttaaatttccttcgtgttttagtcactttgtacacctaaaggggagtggcagtgggtctggatcctcattgttctgcaatgggttgtatcgctggtttaccacgtaagtccgcaaaaataggatcccatgttagagtgggaggaaggagcagtattagggctcctggccaaccctaaacaaagtgaatacattgtaaggtatgagtcatattactcaaccctttaaaggtgtaagtgttgatcttgtttcctggtaggctacgggtgaaaccaggagcgtagggagaccgtgaataatggtctttctgcaggggagacggaaatggtgtgaggtattccagtcatcgtttagatgccgtgtctaaatcactgtgccccatctgtaatcccaacatgcgacacccaaacttttaattgaatgggtagtttgatgagtgccccaaggtgtataggtcttgtgattgataaaaatgctatgcaggtaccaaatgctttcgcatgcgatctgagcataggtgggtgatcctgacccgtaattgttccctgtcaatcacgattcctctttctagtctaagctaggtttatggcacaatgtctaactatatgagattataagatattaacttacagaaatttagcagtcttattgtattttgttgctaacatactttcatttactgtctataattaatttagttctctttaaa

SEQ ID NO: 142 - DNA, 1000 bp, unidentified
  source 1..1000: mol_type = unassigned DNA; note = unclassified Picornaviridae sequence
cacatcttatgatgataggtctgcacctctcataagtaagtgtgtgtgtgtataatacagggtaagcaactgagacttgtaatcctgtaggagtgagttggagtgctgggcctgttccatgtgggttcaggacgatctcgggaatctgcataacagttcgcataccgacctgccgagactaataactcggttccaattgtttgttatttttatcctttgggttttagtcgctttgtactcctagaggggagtggccgcgggtctgctccgcctttcgcctgagtgacaggcactggcgttggatgctggtttaccgcgtaagtccgcaaaaataggatcccatgttagagtgggaagaagaggaagtcttaggtcctctgcccaaccctaaacaaagcgaactacacgtaaggacagcggtagcgtggtaaccctatacacacgtaacgtttgatcttgccaaccagtaggctacgggtgaaactggttgcgactggccactgctaacgtggtgtctgggcaagggggaacggtaacgaagcaagatattccagaaccttagggtccgagtctaaattgctgtgccacggctgtaaccccggcatgcgaacgccaagtgtgtgtttgaatatcacgttatttaaatccccaagtgtagtagggattgattggtgataaaaatgctgcgaaggtaccaaggcaactaaaatggtaacccgggaggaatcttaggacgaattggctgagtcctaagtggaccgggttccaatttaggggcacctcagggtgcctgctgcgatctgatcgcaggtgagtgaacccgactcgtaattgttccctatcaccatcatctctctttctagtctaagtaggtttatggcacaataaaagctacatgaaagagatttaattgttgttgttgagttgttattactttcaaaataaccaattggcttttatttgttttctctgctgtttaatttgctgcaattagtttaca

SEQ ID NO: 143 - DNA, 1000 bp, unidentified
  source 1..1000: mol_type = unassigned DNA; note = unclassified Picornaviridae sequence
ggccatggtaggtctgcacctcatggttcacaaaagtatggacatacaaatttagtataacaaaattgtgtgtgtgtataattgtaggtaagcaactaagacttgtaccttcaaggagtgagttggaatgctggcaccctgtcatgtgggcaggggtcgatctcgggaatctgcataagtgtttgcataccgacctgccagatttagtagtctggttcccaccggtttgttattttcttccttcgtgttttagtcgctttgtacacctaaaggggagtggcagcgggtctgctccgcttcggcgttggatgctggtttaccgcgtaagtccgcagaaataggatcccatgctagagtgggaggaaggagaagttttaggtctcctggccaaccctaaacaaagcgaacattgtgtaagtatgtaggctgcatgctaaccctttgtatgtgtaagtagtgatcttgtcaaccagtaggctacgggtgaaactggttgcgtttggcagctgtatccacggcatgccgagcaagggaaatggtaacggtgtgaggtattccatgacttcggtccgtgtctaaatcacagtgccccggctgtattcccgacatgcgctacccaagcatgcaattgaatagtatgtagttgaaatacccaaacaacgtagagtctagtgttgaataaaaatgctgcgaaggtaccaaagcggctcccaaaaattgaagccgggaggaagctagtggcaaatctggccccacgctgctagtggatcggcttctgggagtgtgaggggaaaccctcacggctgcgatctgatcgcaggtgaacaaacccagttcgtaattattccctgttcaacctaactctctttcttgtctaggctaggtctggcacaatgaaatgctatatgaaaagagttttataagagattttgtgttttgtgcgctttgtctgattctttcaggtttttactattaaagctagttataaagtaaatttgaa

SEQ ID NO: 144 - DNA, 1000 bp, unidentified
  source 1..1000: mol_type = unassigned DNA; note = Picornaviridae sp. isolate ybw202pic01nc genomic sequence.1 sequence
taacatttccaagtcagaccgtgaaatccatctcagtgggatgttttaggtctatcccaaagaccaaatgcagtttaacgacttgcaggtcggaaagagggatgcacgtacagggaacatagccctgaaaacgtgcaccccgctttccgacctgcaagtcgttaaactgcatttggtctttgggatagacctaaaacatcccactgagatggatttcacggtctgacttggaaatgttaacctggacttgagtttggattgtgattccccgggaatgtggagtacccggttaggcaggacttatttttactgcctctccaccttagtttatcacctccttatgaaggatccattagtactattatgatgaaaatggatgaatgggctagcgccagttagattgcctagagactacctccctggtaacagggactctagggcccaaaaggctaggtggtcggattagcaaccaagaaagggtttatgattaacccaatctgaacttgcgtcctaagccacccgtctaacccctgaccccgaggcattcatccactagtagttgtaatgtggaaagtgttggtcttttgtaaggatagtttaagctaagaaatcttggacccgtgggagtagatgccctggaggttattactgaccaggggaccgtgactatagcgttccgctaaaccggtttaaaaaccatgaaactatgggtccaagtgcttttcttaatcttattttactttaatggattgcattgacgaagttgattgtgcacagtgtgatcaaccatcgattaccttgagagtggtattgaaagtgattcaattttttgagtgtgcttttgaatgggtgcatcacctaccaaagactccagagatagtggaagaagtcaaagaagccaattgccatcagctagagaattcagaggattgagttgggaagaaaaaccttgcacacagttgacaaccaattgttgtaagggaggtcaattgattggaaa

SEQ ID NO: 145 - DNA, 1000 bp, unidentified
  source 1..1000: mol_type = unassigned DNA; note = unclassified Picornaviridae sequence
agaccgttgttcactctaaaccttctaaagccacaatgcggttggacaaacatggcaatctcggtcttccgggaaaacctaaactatctggcatacaacagatcgctgtaccgccatctcgcccgaaagctggttcaattcttgatgaacttttctctaaaggtcatccaggaattgtcaccaaaccacgtcctaccgggccaaatgctgttactgcggggtcatataaccctgcgcctgcacctgagtcctatgaagacttggctgctcgggctgctcgatatgccgctagtcgtatcggatcctgggcatctactcaatcccaggtacctaccagctgggacgaagatttggctaccgacgtcaccgacccctgcacatctgggcccggtgacctatctgtcaaatcagaacaagcaaatgatggtgatacagggtcgcacgtatctgtcggatcgaaaggatcagctgatgatctgccagaggatcaagtcatcctggtatcagacccacaaaccacgtgtctggaccaggttgactcctgctaatttgtcccgcccacccttctcctaccagggagtctacggtgccttcctcgccgtggatgacaccatatgggcagggccccaaatggtgccggtaccacacaagcttgtgatgtacctccttggaatgagtcaatctccccccaaccacctgaggcttgcacaaaccatcttagcctcagttcctttaacggaacgagctggtctcacccccgaaagcttgctggaatttgcagtggcctacctaaagcacctcaaggctgttccagtaaatctacgacacgaggatgatacaattgcacgccctgataactggctagctcctgacgtcccagtacccatggcagaaggggtgggtctctgggaagggcccgactttgccaatcggcccttttcgtcatagggggacggttctctgtcccccgctcataactggcttcactcccggtttattc

SEQ ID NO: 146 - DNA, 1000 bp, Hepatitis B virus
  source 1..1000: mol_type = genomic DNA
ggtctggggcaaacattatcggtactgacaactctgttgtgctgtcgcggaaatatacatctttcccatggctgctaggttgtgctgccaactggatcctgcgcgggacgtcctttgtttacgtcccgtcggcgctgaatcccgcggacgacccttcccggggtcgattggggctctaccgcccccttctctgtctgccgttccggccgaccacggggcgcacctctctttacgcggtctccccgtctgtgccttctcatctgccggtccgtgtgcacttcgcttcacctctgcacgttgcatggagaccaccgtgaacgccccccggaacttgccaaaggtcttgcataagaggactcttggactgtcaacaatgtcaacgaccaggattgagacatacttcaaagactgtgtgttcaaagactgggaggagctaggggaggagattaggttaaaggtctttgtattaggaggctgtaggcataaattggtctgttcaccagcaccatgcaactttttcacctctgcctaatcatctcatgttcatgtcctactgttcaagcctccaagctgtgccttgggtggcttttgggcatggacattgacccttataaagaatttggagctactgtggagttactctcttttttgccttcggacttctttccgtctgtcagagatctacttgacaccgcatcagccctgtatcgggaagccctagaatcgccagaacattgttcacctaaccacacagcactcaggcaagctgttctgtgctggggtgagttaatgactctggcttcctgggtgggtaataatttggaggacccagcatctagggagttagtagttaactatgtcaataacaatatgggtctaaaaattagacaactgctgtggtttcacatttcctgtcttacttttggaagagaaacagttttagaatatttggtgtctttcggagtgtggattcgcactcctccagcttacagaccaccaa

SEQ ID NO: 147 - DNA, 301 bp, unidentified
  source 1..301: mol_type = unassigned DNA; note = unclassified viruses sequence
gtcatctataaggatgtcggtggtaaccccacaacggatgaccactgcaatcagtggcacgtgtaaagtcgagataaaataaacaaataagtgaaactctgctggatcctcacccgatccactaccgtaccactttcccaaatcttcagacgaaagaaatttttgtctgttcgctctgctcatcctaatccggtgagaataaacctgctcctcctaactcggggagtactaaactcgtcataatccgacgagaactgtcacttttaaccaaagtggtcaactgaattttcgcaaattcaaa

SEQ ID NO: 148 - DNA, 308 bp, unidentified
  source 1..308: mol_type = unassigned DNA; note = unclassified Solemoviridae sequence
gtaaatggttcaatgaatcatttaattctgcgcttttagatttagaccttgcttctgtacccggcgtaactaccttaagtcggtatggtaccacattaggagagatcttaggttttgacggtcaaacgttggatcctgagagagtggccatactgcgtcactatgtggtggacaggattcaggatcttttgcatgggaaacatgtagctgatcctattaaactgttcataaagcaggaacctcataaactgtcaaaaattgaagagggccgtttgcggttaatcagtgcagtatcagtagtcgatact

SEQ ID NO: 149 - DNA, 321 bp, unidentified
  source 1..321: mol_type = unassigned DNA; note = unclassified RNA viruses ShiM-2016 sequence
aacaacaacaacaacaacaaccgcaacaagaaaccgcgtgcccctaggcgtggtaaccgcaacttggttgctgatcaggctatcaaggatgtccaacgtctccagggtgagttggacgcattaagggacgaaaaatcccaaaaagagcgagctcgagaacagaaggaacaggaacatgaagagctccgcgatgaaattaaagcgcgcttatctggcggctttaatattaaatgggatccacaagttcatcgtgtggaccgtagtcgtgtgtggcgagcgttagcttactgcatttgggtgcttgcaatcaccagtattgca

SEQ ID NO: 150 - DNA, 326 bp, unidentified
  source 1..326: mol_type = unassigned DNA; note = unclassified ssRNA positive-strand viruses sequence
ctcaggtttagtgcttgcctccgctgcttttagcttgcttgtaggctgtttctttggacctgagtagcttatttgctaggcgatagttcgtgcttacttcttcggaagttactcttatttgatttctttcttcgcgacgagaggacggagccttgtctttcccttggaaagtttgcgtgtggtaacgcccacctgtaatcaaggacgctgctcccggctagggatccccgaccgtttaaaggttctacacattgctccgggtgtagaggtaggaagaaataaattttttcaaattaattcttgtttaagacttgaaaccggtaaaa

SEQ ID NO: 151 - DNA, 333 bp, unidentified
  source 1..333: mol_type = unassigned DNA; note = unclassified dsRNA viruses sequence
gatttaaaccctggttttcttcatctttttgaaggagattttttagggttttaaatccctttctcagttgggtgttcgcactcgattgtttgagaccttcgggcggcctacgtcactacccattcgggtaggtacaggtttctgatctcttgaacttttgagtgcgttccatcaacccgagaaactggggacttgacccggatcctgatgcgtggcggtaaagaccgaagcaggattcggaccccaaggccctgagggagtggtagggaagaggtccggtgctctaaataaaaccctacgctcaacacccctcagggtgacgagcactgagcc

SEQ ID NO: 152 - DNA, 341 bp, unidentified
  source 1..341: mol_type = unassigned DNA; note = unclassified RNA viruses ShiM-2016 sequence
gagatgtttgcgtgggccgttgcgctgcgggcggcccacctccctacggggaccgtgagacaccgctggggaaggcccccacccccggccaaggggatcctgccgagaggcaggagaaagaggcccagccctctggggcgcctttaggggcgcctgggagggaagtacccgagccgggcggccggtcgggtgcggctgtgcagttcgaggctaaccgtaaggaaggcctgagctgcctcggcttgtcggaaaggaagacgaaggcacttatcaaggctttcaggaagcaggagcgcaattacagcgcgcgccgtgcggcctggattaaccgcatttggccg

SEQ ID NO: 153 - DNA, 346 bp, unidentified
  source 1..346: mol_type = unassigned DNA; note = unclassified Arenavirus sequence
tgttacagaactgtgtcccaaaatagataaccactatgcctaggatccccggtgcgcagccaaacacccttatttgtggattaaggtcaatgcttaacaaagtcaagtcaatgaaggtcctaaatactagaaggaagatgctcctactatttgatacatttatcctgatggctcatgtaagattcttcaaagaagagtcattgtatgcagaaacagagtggttaggttcatccttttgcagcgtcaatgataggctggtctccttagatgaaacggtgcagtctttgactaagtgggttagggccagacagagaaattactctaagaaagtgcctgagtgtgtgac

SEQ ID NO: 154 - DNA, 348 bp, unidentified
  source 1..348: mol_type = unassigned DNA; note = unclassified Benyvirus sequence
agttgattgtctgtaaaacaattccagttgtttgtctgtaaaacaaacatatatgcttgatcagctttgtagatccttgactatcaattttatttctatcattgaattcgaattgtttctgttgagattctctttacgatttgtgtcgtcatttcgtatattggaagacgggcctgattccagtattaattggtcagtttgtaggtgcagaacgcttttaagtgagacctaagactgcgtcggaaccttagattcacgagccgcgtgattaattgggtttgtcactgggatccagtctatcagtaaggggtaggttttttgttgagacttatctgattagtaacattt

SEQ ID NO: 155 - DNA, 362 bp, unidentified
  source 1..362: mol_type = unassigned DNA; note = unclassified RNA viruses ShiM-2016 sequence
actgtgtagttgatttctagcacagcggtattaaaatttatcattgaatatatcataactatatttcggttttcactgagtataggatcctttactaggactcggggtgtcattgacgctttcgtaggtggatcacttgatagacgtcaatataaagttatcaatacagagaatcatttatgcgctgatttgtaatcggttcatatagcaatttatttatgcatagatctgtgatcagtgtatatagcacaatagggataatttgtgtacttttctgtgattagtacgcatagcaaaatttatagtattttgtgggattttctgtgattataccacatagcaaaatagttaagtatttgaac

SEQ ID NO: 156 - DNA, 367 bp, unidentified
  source 1..367: mol_type = unassigned DNA; note = unclassified Picornavirales sequence
aacatgacccgatcgcacagttgaaacaatacaatgatgtcgtccagcgcccaaacggggggagagtaaaccggatgaaaacgaatgataccctatttgaagagctttggatcctgaagaacagcatggataagggagcacgatgaggaataagatccagtgcttcatccaataacaatgtcgggaacaggggagaagtttaaactctttggtagggtagatatgtctaattggaaggtgagtctccctagactagttgattgcggagacaatctaggataacggcaacggtagaataataaatgtagcgtgtccttaaggagcgcttgtatcgtccccaaatcagaaacataaacataaaacaaac

SEQ ID NO: 157 - DNA, 370 bp, unidentified
  source 1..370: mol_type = unassigned DNA; note = unclassified Riboviria sequence
gcctgaagaaaacgtcgggaaccccgacatccgtcaactatgcggatccttctaacctaaatactacggttaaggtccgtgcccgtatacagcccgttaacaaacgggatgggaagtacaatcatgttcgccaagaaattcgcgtcggtttcgaaacgaaacctcctcgcgcttgcgaacagagttgtgccacctctccagttgtgctcacccttgtttggagcgcgccggaaggtgtccaggccgatgtccctaaagcagtgttggacaaagtcctcgagcatatcgctcttggtactgctttcttggctggacctgatacacttgacgttgatacaacgctaactactaactaaatggagtaatactc

SEQ ID NO: 158 - DNA, 373 bp, unidentified
  source 1..373: mol_type = unassigned DNA; note = unclassified RNA viruses ShiM-2016 sequence
aagcattgacacatatgtcattgccccggttatatgcttaagtgagtctactactcagactttaagagagaggagggcgatgcggtgtgcttgtttgagcgacagcacacatgaaatttagcttacaagtgatataacaattaaagagcaagagtgctcatcgtttgaaggtttagcgttaaaaccggatccagaagtgattggagtttcatcttttagtaatgaggcaggacaatgtgttgaagttaaggcttcggatagcttttattctgttaatcaggttgctgatttgcagtctgttaaggagtatttagctagacctaggctttttgacacttttgtgtttggtactagtcctggtgtggttacgacg

SEQ ID NO: 159 - DNA, 379 bp, unidentified
  source 1..379: mol_type = unassigned DNA; note = unclassified RNA viruses ShiM-2016 sequence
ggcggtgtttgattacatcgtagcctcggcggagtttgtgagacagaagttgcagttgtcaccttatacttggtttcaactcatcctctgtttcttagtgctcctcccggcagttgccttttaccttagggtattttggtggctgttgagaacctcttggagattctcttgcggattgggacgttggttttgttacgttggatcatgcttgaaatggaatgttaagaaggtttttagggttttccggaaaactcccttacagtatgaaccggaggcctatgtcgctggatccgaatatgagcaagtgaaagaactgccagcttgtcagtttttgatcttaggaaatttggaatgcggtgacgttttgactccggttggt

SEQ ID NO: 160 - DNA, 384 bp, unidentified
  source 1..384: mol_type = unassigned DNA; note = unclassified Picornavirales sequence
tcatgaacccacagctcccgtattacggagctatataagtagttttactatgcgttagaaaacgacttaatgtattagttacaggattggtaactcgaagactatgagagtttaccgattatcggatacattattaaaagttctgcttaggtgcaaactaatcagatggaactataaaacgtcagattgatagtctatatccctaatctttaacgcgagcatgggatgaatataagcgttgctgaatcaaataatttaaaaataaatcagtcggaaaccactagcgagactattggaatcgtagactttaaacaggatggagaaattcatgaagcagaaatcaagaatgagattatgttggatcctactttaggacagactatt

SEQ ID NO: 161 - DNA, 386 bp, unidentified
  source 1..386: mol_type = unassigned DNA; note = unclassified RNA viruses ShiM-2016 sequence
gtttgggctcagttttccctatttagggaagtgtacacggtgaggattcactgcgtagacaggatccactgcggcctggaccaccgtagttcctgtctacgatccttgaatcggatctgatgtgcacgtacgtctcagaggttttgcctaaaacgctctgatgcgcagtctgggttagctgcgcactcgaattatgacctgctaaccaaaaaggaaagcatgatcatgcggacggcgtgagcctgtccattgatcgagggcaactaaactgtttggaggacgttctctattcctatgagaacgtggttccaaacggcaggcgaccacccaatatcgacaagttaaaagaatgtcttgtcgatctccggaccctcagggtcaacggc

SEQ ID NO: 162 - DNA, 389 bp, unidentified
  source 1..389: mol_type = unassigned DNA; note = unclassified Tymovirus sequence
ttcgccaagctcatgatctgcgttgatgatggaagccttgaggacaaaaaactgtcttacttgtctgaattctcagtaggtcatctctccggcgactgcatccaagccatcttacctccatcgctcatcaagtatcagtcagcatgtcatgacttcttctgccacaattgcaccccatcccaaaaaatccttctcagcctggatcccatccctgagaacaagatccttcaactcctcctcaaagttcgttgggcttcacaggccttcttttcttaccttccccaaaaagccagagagttgctaatctctcgctccagccttccttcccttcactctgatcccaaaatctccctactagagtctgaattgcttccctttttcaattaatt

SEQ ID NO: 163 - DNA, 390 bp, Mossman narmovirus
  source 1..390: mol_type = genomic DNA
gacaaagggggcatgactgaccagtgctagtatacttatcccctgttcacaaatatggagtcagcagaatattcttttaaagaacagatcatgcaaacatcagccatctacttccatgataaatccagataatacagtgtgtatgtgtgtaaaagaccccccaaatcctatctgtacccttcacaagatgaatataatcctttcttcagccatatattctctatgcctaatagttgatctccatgaagtacaagatttagaccgtaatgtaatactgtcctttgtcatttttgttcccacagaatcccagtaagttactctagtgttagtggtgatgactaaagaaaaacgtaggatccaggatcctaaagccaacttttggggttcaaa

SEQ ID NO: 164 - DNA, 393 bp, unidentified
  source 1..393: mol_type = unassigned DNA; note = unclassified Reoviridae sequence
tttaattgcaattctagtattgcaattctctagggaaagccaatcttatttttattcattctcaaattattaagatttatgatttaattcagatttaacaatttataaaaccccagtaaccaaattttgaaagcaagatgggctttccctagagaactgtaatacctttcatttgacactaaaatcaatttttttcgacaattgatggctaccagtgatgactcttaagcactcttgactgattcacacttgttagtatggatccaaacttcgtatggatttagtaaattgagcatgtcaagactacttttcacaggatttaacactaaatagacccccccctctcttaaacaggtgcttctccaattggctgggtgggttcatgtacaaaaa

SEQ ID NO: 165 - DNA, 400 bp, unidentified
  source 1..400: mol_type = unassigned DNA; note = unclassified RNA viruses ShiM-2016 sequence
tagagggtatttacatcctgcgatcttgaactttacttaacagttatacaagtttggtcgtcggatgtacggttgttgactcgctgagaactctcttttgaaatctatccagacattcttagagatcgatctcgcctctcgacaatcacatactggatcctccggaagagattccgttagaggaactggtccaaccagattttcggatctttgctggtaatcctcttcgtttcgtggagttttatcgcatactaaattttctcagtttttctttattgttattttttattttatatttagattattacgcggtctattataataccttctacttttatcattctccttatttttctcttccttattcaccttatccttatcctgtttctttcgcttgggt

SEQ ID NO: 166 - DNA, 411 bp, unidentified
  source 1..411: mol_type = unassigned DNA; note = unclassified Totiviridae sequence
tgataagcatccagctaactatcgtatcgcgttagtgctagtaggttgcttatactcggagtgtgttctccgatccctttttagggaaacccggagtcaatatgacttcaaggtcgattttatcggcctattcagtgtggccgcaggaactctaaccgctacctccgcgaagcgattacgtgggaccgatgaggagcgaggacgagtcagcgttgcactagtacgaccagggagggttccgttgatctgagcttgtgctaatttcaccggatccccctgagcaaaatttcgattctcttcgttcttctgttctccctagtcgttactagtgtaacgctcgcctacggcctcactcactcagttttcatttatcgtctcggtttcccctccccctacccgatccgaccaaag

SEQ ID NO: 167 - DNA, 411 bp, Mossman narmovirus
  source 1..411: mol_type = genomic DNA
gcagcagtaaattgtttctaatgaactcagtttataatccatgctatataagagtccataggttgaacccctgcagacttacaacacccttttggctctgtcttagagaattatctacaatcagtattgcagtggattccttaatacttgggcattatatttcctccaacacatatcatggtctgtataatgcttatcagattgtaagacacctagggtatgagaactaaaaatggtactcagtaagagaatagattaaaactactagatattaagcctcatcagtatagacttaatagtgttttaacaattatgttaatttgatatttcggtcagtagtattaactaacctcatttgttagaatattacaaaaaacttaggatccaagaggagctccgtaagctccaata

SEQ ID NO: 168 - DNA, 412 bp, unidentified
  source 1..412: mol_type = unassigned DNA; note = unclassified environmental samples sequence
ggccaattgcctacttctatacattttatgtgtccccgtttcaattgaaaaattgaattgaactcaggaagactagggaccgtgcctgagttggatcctagatccatgtgcgtgaagcatacatagtaaatgtaagaaatataattaatattcttcttttttaaagattaaaaggtattttatattgtccgagcatttacgacctagtttttactaggaacgcccctttgacaacttggggcaaacccgcggcggtctgctattgcgacacgtcgaaatggtcactgttagaattgtataggtggcctgttaaccatatatggggtaactgtaaaaatagttatggccaaaatcgtcttaatagcctacagggaggcaacagggcgtgctaagtggtaatttatttacctaa

SEQ ID NO: 169 - DNA, 413 bp, Mivirus amblyommae
  source 1..413: mol_type = genomic DNA
atttaaggggatccctggaaaacatatgtattattgaatgcggcccatatagcccttattgccgcaaactttccaggtagttatataacccattttactatgagcccagtaggaatataacctctcactgtgggcatattgtatgtttgtttgagctgtattaaaaaccatcttgggccatagagccattttgctagacagctgatccggagagaccagattccgttcatacagtgcgattgtgagttttcaccattgcgtttcttgctttgcttgtggagtttaatcaagtgtttcgtgaaatacttgacttctccaccgaagtagagacctcccgtgacatcctagtcgctatcgacctgctcgagagagcacacgaacttagtgaagacatacttgatctttacacaaca

SEQ ID NO: 170 - DNA, 414 bp, unidentified
  source 1..414: mol_type = unassigned DNA; note = unclassified Riboviria sequence
aggaagaagaattctcagtagtttgattgttttttagacctgcttggcataacgggacaagaaattgtgatgactccctatacatatcgctttgccaaattaatcttaagtcccggtacagagctggtctctgaatcggatcctatatatccttatatataaaggcctaatactgctaagtactgacatttactagtttgtaagaatcaacccagggggaaatgttggacggatacagattaagtgcaaggttcttgtacttaaggatgggaatctcagggttttgcattagaatcgtctccaataagggatggattacatcagggggttggagtgttttatcaattacttaaatttaagccggatgttaattaagatgtataaattgttctgaaaaaaactaacagacgtaat

SEQ ID NO: 171 - DNA, 429 bp, unidentified
  source 1..429: mol_type = unassigned DNA; note = unclassified Negevirus sequence
gaaaataaaaccaatacaatccacttttctcagttattccctgacccggaataaccccgaaaaacaaaaattccctggtaccctaacccggtatcacgaaatcgcttaccctgacccggtaagtccaaatccgctggctaacccccagttaactggtacgcgagtaattcccgtactttgctcccttcgcttaccacgaaggtaactgcccaactaacccttgggataaattctggttgacttaccctcaacttttctcgcacggctcacccccgtgttatctgttctcgctaaccccgagaaacttctcagaaccctcacccggttccaactgatccgctaaacccggaatcaattctcaggatcctaacccgatcctcttcttctacaggaccctcacccggccctctaatccacatcggattaaca

SEQ ID NO: 172 - DNA, 440 bp, Lunk mammarenavirus
  source 1..440: mol_type = genomic DNA
cgcaccgaggatcctaggctattttgatgcgcatttttggtatctggaatggaagacattattggagagataaggcatctgtgtttaagttacatgagtcaagatgagcgtctgtccaggcaaaattaaacttcttaagtcagtcagagccgaagctgactttgatagaagggttgaagttgttatcaaggtgcatagagatagacagtgctgacaagaatggctgtgttcacaatcatgaagacaaatcagtggagaccatcttgattgaggctggtgtcatctgccccgggttacccctgattattccagatggttataaactgattgacaacaccttaatcttgttagaatgctttgtgaggagttccccggctgggtttgaggcaaaattcatagaggacactaataagctttcaagcatcaaagacgatttggca

SEQ ID NO: 173 - DNA, 464 bp, Hermit mivirus
  source 1..464: mol_type = genomic DNA
aatccttctccaacaatctccctccctctcctcaagagtatcctattattagggatcctcattcctcttgcatgctgtaaatagttctcagtatagtagtggacccatatattcttgccatagtattttccatgcttttcatacaatattagtatagcccaatgctcttgtccatgtctgcctgtatatttgcttatgtcgtgtgctgctttaaaaaacaatcaacaacctcgagtagacccttaaaaaaagtgtcctaaacaatttagttaaaaattagaattgatcctttaattcttgctagtcttcattacccagtgaattttcgattactcagtttttgttttttgtggatcggaagattaattctctaatttgatcggaacacagagtctatcaacctgtctccctgggaaaagacagccctggttgttggtggtttgggtcttgtggcgtgttggagg

SEQ ID NO: 174 - DNA, 468 bp, unidentified
  source 1..468: mol_type = unassigned DNA; note = unclassified Closterovirus sequence
acacgaagtgaccgttcggatttaattgctgcgatgagtattcgacgcgtgtggttaaaggttatagctgtaattacagtgttgtggtacggtaaggaaccttccattagtgaaggttacaatgctcttatgaacgatgactttaagtttatcgatacacacttctcaaacgtttcttatgctaagaaatgttatgatttggctaatttcgatttggactttctgcgcatcgttattattcctttgagtggtggtacggtaaacgaatcgcgtgccgatcgcactaacgtttcagagattgtcgaatcgcacatgagcgaccgagacagaatgaatatcttgttgcgtaataagcggatccagattccttcgctcttaccttgcgataactagagtctactcagtagtgcgtctactagtataacgtattaaacactttagtaaagagttttgtttaagttaaacaat

SEQ ID NO: 175 - DNA, 471 bp, unidentified
  source 1..471: mol_type = unassigned DNA; note = unclassified Sinaivirus sequence
ccgttgcgcaccctctctaagattcacgtgtgttgcgccgatggatcccccaataacctcattgttgctaaggcccttagtgttctgaatctcaatccctccacacccattatcacagccttttgtcgacatatacttaatgtcgttcgttccaggttgctgaatccgcgaaatcgtaacagacttgctgctgccgttaagcgtgtcgcaccttggatggtttacatgccttttcgttacacgccttattatgctgagccatgtcctgccactcgcgccgcgtttgctgtgcgcacaggcatttcccctgccttgcagatcgagtacgagaagtacttgctttctctaacgtttgtaccatctaggtatgtcctgcttaagcgcgatgttgagctcgatggcctcagtactgtcctacttggcgacttccggtctgtcctttacgcgtagaatcaagaaatttactacgcc

SEQ ID NO: 176 - DNA, 473 bp, unidentified
  source 1..473: mol_type = unassigned DNA; note = unclassified Fusariviridae sequence
tgggctctggggctggcaacatttctgcatctgcaaatcaagatcgtgcagatttggtcacaaaatgcacaaatttgatttctgccagtcttgaagctgcatcctctggtgacccttcattgttgaatgggatggaggaattagcctattttaacggcgcaactggtattgtgttgaaaatgtctaatttcctttttaaacttgtgtcagacccagttggtgaggtgtctgaaatgttcaatccaaacaatagggatccaactggtacactacgggacgtagcaaacgtgttttctatccttacaagcctggcttcaatcagtaatgattaagcattggcaaaaatcttatgatcctgaagagtctgttttacagcgaaaccgtcaaggtaggtcaacatgagtaccaaaaattcaaaagcccctagtgtggcatcgaatgagtcagctggtcaatcgttagttcgagagatc

SEQ ID NO: 177 - DNA, 475 bp, unidentified
  source 1..475: mol_type = unassigned DNA; note = unclassified Hypoviridae sequence
gggggtgtgaaaacctacacctattcacaatgttttcattatgaatcgtaggttcgcttcgttgcacagggttaaaatcccgcgctattttgtccgttacagacgcatagcagtgcaagcatacttagtcttaggagtatgcatcctggaagtttgaccggccctcatgggttagtcttttaaaatctcgggagagatctttgtggatcctagcgagcatcaatcgtggtaagacaattttaaaattggtgcgtgttaagacacacttgttagaaatttcattcagaaaccgttggcagttagcgaataactgtgatttgactgaaccccattatcagaacggcaagaaagatgaatctgtggagtagtgccctagaagattcaatcctctttctcgttaatggcttgtcacccaggccctggccgctaaaccagtttatatttcatcctagtttcttttaggattattagctca

SEQ ID NO: 178 - DNA, 483 bp, unidentified
  source 1..483: mol_type = unassigned DNA; note = unclassified RNA viruses ShiM-2016 sequence
ctggtgtaaactactttgctccccgggtagcttacggtcgagtcgaacggcattgaaaatgccttacgactcgatcagatgacggggagcgccccccccaggtgtttggtcgcacctggggggaatgacggtaattcacagaatagcgccgagctggaactggtgaattggtggacgtggatctaggtcttttgggttgacttaggtgtgagtgtaaagtgggtgaaaccgcagcccgaataagctcgcacgacggatccatgtatcaatactattactcgaacgcccaaaacacaggccgtgtaataggaacctgcgaaagcagtgcaattgggagaagcccaccgttgcatcaccaatcacctccaggcagttctgtggagggcccgatatgtcgacctcactcggcacgcgcgctcagcgtcaggcacgccacggtgcctgacgtttacacacacaacacacacacagcactttccttat

SEQ ID NO: 179 - DNA, 500 bp, unidentified
  source 1..500: mol_type = unassigned DNA; note = unclassified Picornavirales sequence
acgtacgcactctattaactaaaaggtatgcccgaagttcctaaatattcgggggtttactctttccacaaaaagagattaacatggttgacttgctccataatgcaagcgcttgagaacaagctatagttctgatggtaataccccttgaggaatccatatttctaggatccgttcaagtccgaagaattgcgcctcattgaattgagcataatatcgcgcgtgtcgtaggtgggccaccacgcgtatgatttaagtccactgctgattcaggtaatgaattaaaacttgggaatgaaacccaaacaaaaacagaaatcgactctggtttagtaacttttgaaatcaaggaagaagagataatttcggttagtcccgaaattgtaccaagcttcccggttcaaaatccttaccagaatcaaacagcctctcagatattatctaggtggcgagcaataggttcccaatcactgggtttaacgactcagtttgggacaaaa

SEQ ID NO: 180 - DNA, 504 bp, unidentified
  source 1..504: mol_type = unassigned DNA; note = unclassified Totiviridae sequence
tgaatatgagcgagagcaccccataggtacccttctcatacaccaggtagtcctgggggtgacacttcgcctagctatgcaagagctttgaaagtgttcacctgagcacgcggcctcgtcagacaaggttagcgccgaaccccactagctaagttgatgctcaatcgtagtgtgtgtgttttctagcattcacgccgaaggttactgagctctgtaagattcacgtctgcggagtagtgattcaccgttaagtcgggatagcttcctgtttggaaacactcaggatcagggctaagaccccgtagaacagtagccgagtagtacaaactcaaagttagtcttgtcgagtctttcgcgcagtacaatcagggtaagaagccattggtaattgatggtggatcctatgaagttgtagctagctgagattctcatatatcttagttctagtaacaaaatcataggcgtgctgcacgaagcagaaggttttaagtgatattatcgctg

SEQ ID NO: 181 - DNA, 508 bp, unidentified
  source 1..508: mol_type = unassigned DNA; note = unclassified RNA viruses ShiM-2016 sequence
tccatttggagcgtgggtgcgctccttaaatatacgcccttttaagtggctggcaccacagacggatcctctggattgtctaaacgccctttttcattcgcgatccgcttagttttcctgttcttagttttgcgtgaatggaatcgtattaggaaatgttgtgctagtgcgagatattcggtctgatctcgtaccttattttagacctgcaagtttatcagaaacacaaactactgctgatgttcagattcagcaaacttttgcctttgacgatagtgaaaagcaatttatacaaactgtccgggagggggaggatccttcccatgattgggggtcatattcggatgttgatttagctaattggcttcagcgtcccatattggccaccacaaagatttggaacgtaggtgagggttttcctgaaatttatttcaacccttggtctgcttttttggacagccctagtgtagctcagaaattgtcaaatttttatctccttagatgcaag

SEQ ID NO: 182 - DNA, 515 bp, unidentified
  source 1..515: mol_type = unassigned DNA; note = unclassified Mitovirus sequence
ctcctttacagagcatacctggctgaatcgtagtcacgacccaacctatggccttatatggctgtactcgggttcccgaaacgcgaagtaacgttcggtgtttgcaatagttctactattaataatactgaatgcgggtggagtctcaagtgagttagactaacggggtaaggtacctttacaggtaagaatccttattcctaggtctttctcatcctgagaatgtccacatatgcgtaagcataagagaattactctctggctgcagcccggggcctcattgaggatccggaaactgaagtttaaaccgctttactttgtacaacaacctattgcctcttatggtgatactaggatcagatataactagacggggttaccccctagcgacttgagtgtcgtcgtgtagtgagatgataaaacaaacagtgtttggttaccacttaaaactcgtgacctcatcgaaatctccctagtccctcccataggaaccgacaggcggatatttacctaaa

SEQ ID NO: 183 - DNA, 523 bp, unidentified
  source 1..523: mol_type = unassigned DNA; note = unclassified Dicistroviridae sequence
cgatctatatttttcatacacaatttggcccacagttaagatggactctgtaacagacaaaatatcgaccgatttgcagcaatcaaatgaagcatatttcgacagaaaacatgaaccatgcggacgatatattcttaatagttatatcttacttgaacctttgagtacgttgattatggaacacacatggaactgattaggtcgatacgattttaacacaaactttttgcaagtataaagcaatgactagttttcaaaaagaaaaccggtatttacaccgtaagtaaaaaataattttttccagccttcctgaatatagtaaggaaaggtattggcgaaatggaaaattttattttatttaaacatagtttgttgaaaactattcaaaatttcattatgcgatttttaattgagacgtcttattaatagactaggtactaattaatctaacgcatagttttacaaggcagcaacaccgcatcaatggatcctaaccatagatgaaaagaagaaaaaacaaatc

SEQ ID NO: 184 - DNA, 528 bp, unidentified
  source 1..528: mol_type = unassigned DNA; note = unclassified RNA viruses ShiM-2016 sequence
gtaaatcaaggcgtcgtgtatgcctattgtaaaagcacaccccgttttgccgatggggttccagagtaaagttgaacaggcatgtgtgtatatggttacatatggtgaaaatgttttatatattttgtattttcgttagaatgctttgcacataaataatatcctacagaaagggtacccgtatttacgggatgtgggattggatcccatatcaagatatgtacttctgcaggtttaatcgggcctgtagtcgcaaacaaatagattggtaattgtataaaagaattgtgttttgataataactgtaataaattagtttgtatatttggtaagagttcagcaattgttaacgctgaacctagtgctcacatttcatgtgggcgagaagaagacgctggccatcccggggccagcgcagtgcaactacgatccatagatgagatcgaggaagcacttggaattgtggagagcgatgctgacagcatatgcaccatattcgagcctcattccgggacaacggatgacaac

SEQ ID NO: 185 - DNA, 530 bp, unidentified
  source 1..530: mol_type = unassigned DNA; note = unclassified Picobirnavirus sequence
tagatttacaaataaaatataggaggaagtgctatgaataacatgcattttaaagtagtttcagcgctactgaagttggcgcgacgtgttaagtacgttgtgtcgttattgctgacagccatctctgctgtaaaagagaaaattaattcatcaaaggaggttaatgatgatgaaaacaagtaacaataacaattcccagcggtcgggccgcactgcagtcaaatgtgatgtaagttttgaagagcttatagctgatttggatccaagtgacatccaatcccttgtgtctcagcctaagtgtcgcattctgtctcacgatcaactttcatcatatttgggtactttatgttctaatcattcaatggttgaaaatctcaaaattaagcaccaggaattttcttcaagaggatatcatggagtagtaactacagtcagttattacaagagatttaaatacagatatgtgtatgagcgcatatatacaattgaatatgttagtatttctgaaatggttatgggggtagaaaata

SEQ ID NO: 186 - DNA, 535 bp, unidentified
  source 1..535: mol_type = unassigned DNA; note = unclassified RNA viruses ShiM-2016 sequence
tttatgcccccccttctttcgagaattcataccgtgtagatcgctaactaattttgtaagcaactaactttaggtcaatgactgtgcgacctattgtaagtatatctactgccaacttccatgagatggtttgttgtggtatgccgagctgatattacgttgtcagcttggatttagcggaaacgttacaccccttcctcctgcaacatggcgtcttgttgctttagtgtagtgtccgcgtcttagtattatgaatgacgcccttatatatattatatgttcgtaagactgaaattgtactcccgaagctatcacggagacgcatctatcacagtcggatttagatagatgtaggcaatagccccatgcaccacgggttgctatatacccctaaggcgtctaattcgtttaggcgtctcattgaacctggttaagaatctttaggtgcaacgggtgcgaaggcacccaatctgcccgtgtggatcccgtcctaacacgacgtttaggtcccgaaacggattctttgtccgtaagc

SEQ ID NO: 187 - DNA, 560 bp, unidentified
  source 1..560: mol_type = unassigned DNA; note = unclassified Picornavirales sequence
ggtaggattatagatggacggaacatcttaaaaattctgttatgtcctgattatgacagcactaagtgacaataaactaatcacccaaatttaaaactttgatttgatattcaagttgacgattataggcattcttaaaggaattgatttcgatttataaatggaaatatgttaatacatcaatataggactaagcgattgaaatgaatcaggaatttatttatggcgacagatcttaattacttgaatgacatatcctgtctcttatcatgtgttctcctatggatcccggtggagaacaagcacgacatgatttatattattgtatttcggtatgcacatagcaagtagtgcgtagccttcagtgatcagttagaaatttggtatatggtgactaattgtcaagtatattaaataacgttgttctgatcaatactgattgagcgtaaccttgttctattagcgctaggagtacaattttatagaagcttgcttcagagaagtcccggaagttatttatttaattaaatatttcatataggctaattctaacgatattg

SEQ ID NO: 188 - DNA, 562 bp, unidentified
  source 1..562: mol_type = unassigned DNA; note = unclassified ssRNA viruses sequence
cgttaataaattcaaggatttattagctattttatttgatagttttgcttctgttcagaagtgtgccctgcatgcaatacatgcaaataggttaggcagtagaaatacagatcgccggggaccagcattcattctttacgaatcactgggttacagctactttgactagatcatatactgtatttatcattcgcgttggttggacctgtaatagcagggttccggtcttggaaatcaaaacgagggcactcgccaagatgcgttacgtcgtaacaacctgaaaaagtgggcttgacaacctggcctatcatacactggcaagtgatatgagaggtgatcaaatataccgagtagcatgaatatcgctacacgtagtcacaatttaaaaaaaaagcattctgacactgggaaagactagaaacaatcgtgggatccaacgatggtaaaatgacgcttgggaatcaacgtgcccaataccgaatcgatcacagttagtcaccaaagaaggtgcaattaaaagaacacatagttagtatcctgaacacgactcgtacaataactc

SEQ ID NO: 189 - DNA, 569 bp, unidentified
  source 1..569: mol_type = unassigned DNA; note = unclassified Riboviria sequence
ggtggggatgcgcgcatcatacgtgatgtgtgcatccacccccccttttctcccctccccctccaactaccctttccccctcgttcggatgggttcttggttaacgtgaagtttggacgacgatacggcccttacacctcacgggctattggcacgctcgtgttgtattgcaagttgctcctaagtatgtacactggaaacgcacttggcacgtgcgcggaatgtcgtaccaatgttaggatctaagcagcgaaccttcgtagctagacatactactgcgtaggatgatgatgaccagttttctgtatctgattcaaggcactccacaagatcattgtacgccggatacggttctgacactgcgccctaacctggtgctgaaatattgcaagggcactggggcgttgttgttggttcccgccgctggtgatcgagtgggccccacatttgtgagtgcagttgttctgccgggtaaatgtgcacctacgtggatccgcagttgggaatctgcggttttaagtatgactgggtgatagccttgcggctggccaagttacgattgtagccag

SEQ ID NO: 190 - DNA, 572 bp, unidentified
  source 1..572: mol_type = unassigned DNA; note = unclassified dsRNA viruses sequence
gtcacacacccacccgtgtgtgttcggcttgcggggaaacttactgcttgcaggaacgaaaaacaagagcagcacaaccgaacacacacgagtgtcccgtagggaccgagtcgggtgtgttgatgcaaagaagagagaagccgacagctctctactaggctgggggatagctctagcgggatgtatccgctttgggattttctgcccagtgcccaaaatcagggccgccaattcgacttaaaagggattggatggcgcctgtgccaagggtgctaccaagcacctggagtgccgatcgactacaacgggtcataggcatggccagctcaggctgggcccagcctgctagtaggggggatagtcacctgggggatccagggtatcgccaagtcaggtatccactgttctttgcttttgccaggtgctcagccgtttaactgagcaaattgctaggtcccagccgtatctggatttattatcttcgctgttgtttgacagtgctataaccctgctactctccttactctaccctctccttttgattcccattctggattcgactggagatagac

SEQ ID NO: 191 - DNA, 572 bp, unidentified
  source 1..572: mol_type = unassigned DNA; note = unclassified RNA viruses ShiM-2016 sequence
attcaatggtatcggcggcattggcacagatggtttcgtctgtgctcgacgaggggcccaggatcctcctattcctggtggtgtgggttgttgtgcgtagggtgtggcgctggtttcggccgggccccactgctggcgcgcaactggtggccgagctggatgctggcccagactgggacaccgtgggtcacaccacgcgttaccagcgggagctggcgtatcggttcaaggcggagtttggcgagttgcgctataacaaggctaaccgcattgtcgcatcggcctgggtcctcaagaccatggccgctgatgacgtgcggtacgtggaccgtgttatgctcgagccattggcagtgcagttatgcctgctgcccacacgggctgcagtcctcgccgcggcgtttgcaaagacccatgaggtcaatgcgcgccgcgacgaggctgagctcgttaaatagggatgccctgctgaggtgcctggagtaaccacgtctgtcgaccgtcgtggtgaagcatgcttgcgtgtccgggcaagtgtcggcaagggtataaggtccggtgttgaccgtaca

SEQ ID NO: 192 - DNA, 580 bp, unidentified
  source 1..580: mol_type = unassigned DNA; note = unclassified Partitiviridae sequence
cgccacgtcgctcgtggattgctcgacagtggctggctcagtacgatgagtctcggcctcggatggtggcgcagcaaccttttctagggcgtgctctgcgcgccgcagcgattaagtcggcgcgttctgtggctacagtgcgtactggtgtctctactggtaaggatactttggtgacgacccttcgagccctgcattttggggtcgttaaagccgtcgagcgcgtcgactctgttccaggagcacagcttcgcaatccatcacctttcacccgaacgcgtaaattgcctctcccacagaccaaggtatgtactttcttgggaacatggccgtttaaagttggaagtcaaccagctatcgtgcgacgtacgacaaagtccctctttaagtggtggtctagtccggccggtgcaccgtaccgtgcgacatgtccggatccacgtaactattttcttgtcaacgggtcttggctgcgaatatgcatgtacttcgcgcgtttgcgacaccttctgatgcgaccgttactcgtgcggagctattacggtgtctctctttcgtacacacattgaacatccctttt

SEQ ID NO: 193 - DNA, 583 bp, unidentified
  source 1..583: mol_type = unassigned DNA; note = unclassified Riboviria sequence
gaaggttaaaggagacaagttatacgcgaatggagttcgaaagaacgccaccgtggatccccctccgtatgcaggcaaatcacttcaggcggctgcacttaagggccaggtagtgaccaacagtcggcccccattctgcgctacagaaaccatactggtcaagcgccccatttctaccagtaccaagagcaaagtgtgttctgaatctgccgatgagattaaatgcgatgccacgttgtactattatctcatcgacaagtttgcttacatgccacgcgacaaccgcatcatggggttgatgcataatgccctaacccgttacctaactgattatgactgttctaattattcgattggacagatttatcggttaaagattgacgctgttagggcagcattgtttccgcccagagaggagcaggaaacacgggtgttgttgcgtgattacgatcctaaggttttggagaagcacgcccagtggactggagagggcattttaggacgtaattcttggtggcaatcttccgaaaggaggatgcctaaggttaagaagtaggggtcgctagtttcaccctctatttgc

SEQ ID NO: 194 - DNA, 595 bp, unidentified
  source 1..595: mol_type = unassigned DNA; note = unclassified Picornavirales sequence
gtaacacgtcgaacctgttatggcttatcgtatgccctgctatggcgaaaatgctactatgcgatgggagactcctatgtctcaaactaggaaatccaatttcttttggattgccatttgtttgttcatttggccgctctagctccgagtgcgttgcacttgtaacttcgtgcgtaacgaagatagttgcttatttcgagaagcaacacttccgcctatatggctgaacctggattggatccctgttctggaaaaggaaagatcccctcccctctggttacccaagacactataccacgtagtgtcctatggcttaggggttgatgtgtgtccctcatggggatacccctttttaggggagacagcactgtcagtgggaccctgctttcaatcaaaaaagtgtagattgttagctgatacgtcacttactgaaaatacgaataataaaactaactcgtctgattcacatcaggcgttcgacaatgaccaatcggtaacctctactagcaacgttgtttctgctgatcataccactgacgtggtggtggttagtggacatggccacgctgatggaggtacaaccgatgattcctta

SEQ ID NO: 195 - DNA, 600 bp, unidentified
  source 1..600: mol_type = unassigned DNA; note = unclassified RNA viruses ShiM-2016 sequence
tggcgtttttggcagctatgctcggtggtgaagttttgaatatggggggtagtttaattggcgcaaaagtaaattatgattataattctatgttattaaatcaacaattggcaaatgctgaaaagtttcagcaatttaatgcaaatttaatgcaacagcaaggtttaccgtatttggctaacggtggccaaggatataatcctcaaatttctaatatgtacaatgccggaacgtctaatggatttaataatattataccattaatggctggagcgtctgccggaattttcggtggacgtggttcaaactttttcggatcccaaactagaagttcctccacacaaactggacagtcgacctccaattccttttcacagacaggacagtttacttccaattcttttgcgcaaacttatgcatcagcttatgaacagccttatacaggggcagatacggacttttacatctctccgccacccctaactggtactgctgtaaatactatggcagatgcagcaactgatgcgggtgccatgatggctgcgtagtcctgatttcatcttactacgtgataggataggcgctttgtatactgtaaag

SEQ ID NO: 196 - DNA, 600 bp, unidentified
  source 1..600: mol_type = unassigned DNA; note = unclassified RNA viruses ShiM-2016 sequence
ggaccatccaggcaggtgtaggctagtaccctcacctgacctgtcgcgatgtttggctttgtgaggcttgtgggaggatcccttggcccatgcattgctgctgtcatcgtgaaaaatgttgtatgctcgcacctggcgtggaggaaacggcatttgacggatgctaaggaggatttgaaggtcctcaactcccatgccttattacaagtcccctttccttcaagcttcgagcccacgtctgtgacgagcagaggtgaggttggagtcaagaggagtcctattcaagctgttcgcagcaagaaccataaaactttcattgctcaatgggcaagagcggctaaggctcggttctcgtttgcacgacagtgtgagcggagccctgtaaatgtcgcggcccttcatcggtggtttgcatcggagtttaagaaaattggcatgaacttgctccaggtttcgtacgtgatcgatgaggttgttgaacttagtttggaaccaacgtatgagcgtatggtgtccgaaactaagaagcaattccgtcatcgggcacgtatggaatactacaacgagaaaaaatgccttgaaaagatccactaggaacgc

SEQ ID NO: 197 - DNA, 608 bp, unidentified
  source 1..608: mol_type = unassigned DNA; note = unclassified Nodaviridae sequence
tattatcatactgacaatggtaatatgcgagagcgatagcaagcactagaaacgagttacgcaaccacagacagcaagcccggaaggcgcgcagagactgaacacctctgtgtggctgaaggctccccactaaccctggagagaagtggcagaaccacagcctagtactagccgcaaggcttaagaaactaggtgtagctgagtcctttcccttaaacaaggattggaccacttgtaggatccgtgtattcaaacgatctggcagcactatggctcggacaggtacaaccaataaacacaagcgttttgagaaaccggcgtgattgtaccgcagttttaaaggagcttcaaaccctcccagccgaaagatcaaacgaagtcgtagttgaactaacgtagtaggggagcggcgtttgaggatgttcacgggtcagtaacgtgaatagcttcattcgtgacgtgctcaaaccaccgtataggttcgccttagtcattagcagggatggctaggttcagctgcgcatgcacaaaccacaacaataaactaaactttattcgcgtatttgtgcattcccgttgcccacccacactcctaacaaatttcaagt

SEQ ID NO: 198 - DNA, 619 bp, unidentified
  source 1..619: mol_type = unassigned DNA; note = unclassified Totivirus sequence
caacaaccgacgctccccacgtccgggtcgagcgtcggttgcagggttttaaaccagttctagccggtaacggctagaatgtgattcatcacacttggggagacccgagtgtgttgttctcgtcatttctcaattggctctcggacatcaatgcaccgagttacccaactaacataaaacacgagagttgagataatgaagaactaaacaaaaagcacttcgaacactttaatacaaacctagggatatgacaatctttgcttgaggcttggttataccagccggacaacaaatgttggagtctcactacgcctacctgattatggtcggtggccaaaacgttagccctatgttgagagggtgcgggcgtgctaagtttcccgagaagggatcccaaatgccgaacgactggaacggccgcaatgtagtggggggacagtctattccgcgcaccccaagttagcgcggagtgctcaaattcagctccagggacagctcaacagacaaccagttagtatcgaaagtcgaccacagacgaaatcttattactaggtgttatacatccggatatacaaacagtctttttcaagactagggatttcagtgcataggacttgta

SEQ ID NO: 199 - DNA, 628 bp, unidentified
  source 1..628: mol_type = unassigned DNA; note = unclassified RNA viruses ShiM-2016 sequence
cgtgtagcacgattattagttggatgcttatatggtatatgttgcgcaaacgctcatatgccatgtaggcactgattataagagtctacccagttttaactaaactctgcttctagttcctttagaagccacctaccgcgaggtagtttgtataatagtgtgtatatgtaagacctatttaataaaaattattcatatcttataaagaaaaaacttaggtctgtgatttgtataatatagtccatcagaaggatccctgaattactactagtcatgtagtaaggttgaaaatggaaatcctgcttgttgaatgcttagggtgcgattcactcactgtgtgttgtgatagtacttggataagtatttagtgacgcttgaatggtcactattgtcgcattcggaattgtgtgcgactgattcaagaggatatggtggaaaaagatcactggcgtaaggcaatccagtgaacactccaaagggaggagttagttcaagtttctccgtgtcaggctcaggaaagccgggtgtggacatccacctactgaaccggttttgtctatttccaataaaatagtcactcccaattcgcgcgttcctaacccgtccccgcaaaattaaagaattaatc

SEQ ID NO: 200 - DNA, 630 bp, unidentified
  source 1..630: mol_type = unassigned DNA; note = unclassified Triatovirus sequence
gggaatccctatgcgcaattatttgcaactccgacgtggctgagtataaacgatcccgtatgtcctgaacatgacagcttagtcaataaaccgttcaccccaaactcatcaaatttacagtatttagatgtaactaaaatctttcactggattaacccaattaagaaagatgattagtataagttagttttaattattagtggaaatctatttcttttcccgtgtataagagagacctatttgcacgttaaatatttaaatggaatacatgatggtgtcatgttaaaaacactcttactactggcgtaagtattctcgcttttagtatcgtattaaagaaataccgtataaaagattgtgtatcgcgattgcgaaagctaagacaatgggtgtaacccaggtcgataaccattagcacgcggcatttgcagcaagcaaagcacttcccttttatattgcctcatactcgcgaggttcgactatgagtgtatggagcatgaaattgaattatctttcatgttctgtaaccttcgcttgggaaggacggatcctttctatttttattaatgacaactaaatcttttgttcagttgttatcaaagctatcaaagtttaaacaaataaattaaa

SEQ ID NO: 201 - DNA, 647 bp, Ghanaian bat henipavirus
  source 1..647: mol_type = genomic DNA
ttgtatgtaatcagttaaaggaatctattatttctcttctccattatctgattatatcctaagaaaaacttaggaattcagggtactgcccttaatgacttgcactaatatcaaaatttcaatatacgacgaatgtgattggcttgtattatcatcataactacctccagccgtatcactgacaaaagatttataagcactggatcacggagtcagagttcaaagcttactaacgtcaacctcattatatctagttggtgttacagggttacttcgagtcatatatgtaattgcacctgataatacctctctcatctagtacattacctcaacagtatgatctcggggatccaactacacctcgacaactcataacaatcaactaaatctgcctcacaattgaccattgccattctctcagtcataaaaaggatcatcccaactgattgattatttctttaaaccctaaacgtaaattattcaatcatgtaaaataaacataatactttcagatctacagtgatagagttcttaaatttattccaatataatcctattaattagcattgagagatctcccatgacatcacttttccagtcagttaaatctcagaaatccactaactgagctaccgtcgaagtcaagc

SEQ ID NO: 202 - DNA, 655 bp, unidentified
  source 1..655: mol_type = unassigned DNA; note = unclassified Riboviria sequence
gaggtgttattcaaggcgaatacaacaaaagcatcaacaactccaccaatgaatccaatcaaaagatcgctaagatgaacaatgacacctggacccttacaacagacaaaaacatccagggccagaaagacatccaaaagcatacagaggaccaattcacaaacaatggccttccatcttacatggcatatcaaaacaatgggggaaacgacaaattaccacatcagcaataccatctggggggaaacaactattatcaatctggaaactatggctcttcacagccatccatttcaaataattaccagcaatttaatcacgtgggagtcccttcaaaatttgaaaacaaaactgggaaacaaaaatttgttccgggtggaacactacaaccgaaagaacctactgccgttccgaatactatggtaaaaacaccattccctacttcaactggtactcaaaccagccgttcaggactcggatcccgtgttccttcaacttccaattttcaattttccaatatggacccaaaattttcttcaatgcttaataatcaggtttcaaaaagcaataaggccttcataccttccgataaagcaaaatttaaggatacctggactcagacaaaacaatcaagtactgccacttccatgatccc

SEQ ID NO: 203 - DNA, 660 bp, unidentified
  source 1..660: mol_type = unassigned DNA; note = unclassified RNA viruses ShiM-2016 sequence
cctaaaggtaaacaaaaaccaacggcttgtcccgtaaggacgcaggaaactgcgagacaagaaaagaaaccacgagtgattaacacttgtaaacttaaggatgttcctttgtcggaactccaaattttcataaggaattatgaaaatgctaaggcgactgggattgagcctgatttaaaattcctttcaagacagaaagaaattttgacaaaacacaatcccaacagaaaagtgaagacattaggacccgacaagaatattgccaagttgttagctgataagagaactagatcagctgccttggattatgtagcgcaaacatcttcacttgacaccgatctttatggatcctatttagaagatgaggaatttccaacttatttggataactgtaaagatcgccagtatagacttaagaccgagccatgtcgatcgtcttatattgagaacttcaatgaaccttccacattggtaccacccaaagatttggttaatgaagttttcgaacagcctaaaataaaagattacactttaatagaagtggcttcatttaagtacgtccgagagaacgtcctaacagaagtatgttttaataacactattgagatcagaaatagtgttgaagattctaggttagatgttttgactaatactgatttg

SEQ ID NO: 204 - DNA, 667 bp, unidentified
  source 1..667: mol_type = unassigned DNA; note = unclassified Iflavirus sequence
ataacttttaaaattgcacgtaatgtgcactgcaattttaaaagttatttttctagtaacagtacaatgcacaatctaggcaattcatgtctcttatggcatgctttgtttggatgagttagtcctctgttgtactgggaaagctttagcatcccaaggaaatttagcgaaaccccaaacctgtctcctcgacacaaaattggaaaacaaacattatcgaaagataataaggtgattccgtattaatccaagagtagactccatcacaactcttgtaaataaaattgtgaattttatctatatttgtacccgcaatagcgctgacgcctataaattgaatttataagtatgcatttgaatttctatttcctattccatacgttttggataggacacacccctctaacaccacctcagacgtggcgcattgagtgtgtaacgaatagaaactattttgcatcttgtttaggaaatttgtagaaacgaaccgcgacagtatagtaaccttactgtataaagacaaggtttatcaagtatttcacacttgagatgtctgatgtaaattccagactatgtactatagtgatctaaattgatgttttacaaggtatgtttcttccgcttcaaaggatcctaaccttagaagaaatcgaaacaaaatgaaaat

SEQ ID NO: 205 - DNA, 667 bp, unidentified
  source 1..667: mol_type = unassigned DNA; note = unclassified ssRNA viruses sequence
gcgtccggttatttcacccacctcttatatctggccgaccaggatatctgaggtagcaatataatggccagaaggttgtgaaagcttatttctaacggcgcaatcgggaaagttaattcttagcccgtaagcctaggatatcaacctggacagaacgagccatagcataggcatggtgagcgagattccacagcaacatttagagaatgagagacaaaaaccccataaaaataaatataactctcttatctaggtgaccgtaaatgtattgcactttttgtttaaatcgcgggaattgcggcatatgccgtcgctcttgacagcgtcctccggagattgttcttactccgagtgcgttaatgtgtagtctcacttcggtgccactactgggcccacagacgagaagagatcactcttggtgcaaattggaagtgcgtacaactgtacgaacggtggccgaaacctagtgccacagcatcgagagtaaagatttcttgtggatccacgttgtcaatagagttgcgtaggtagtctgtgtgtgagcgcgactggttatgatcgaaagctatccattagcttccgaaactgttagttcaggattaggctgagtagcatcttgaaagaggtgtgcggggactcgggcagtggactttcataatcactactt

SEQ ID NO: 206 - DNA, 667 bp, unidentified
  source 1..667: mol_type = unassigned DNA; note = unclassified RNA viruses ShiM-2016 sequence
ttcacaccctgcattaatttgtgaacactttaaagggggggtcaggaggaaatgcctgactcgagatggcgtgtgggtcatgcaaacacccgttcccaggccgggccgggacccacgcaggtgagatgggacacctgtttgaatcgacgcgcataagttgttgtcgatcgggcgccagccttgttcttcttcactctgattccggagcttcagagtggcgagcctgtgcgatacgtaccggcgtatctgaggtgaggctgacaggggatccagaaagtagcgtcctggatggtttggccacctataaactccctgcccccgagtccaccgtccctgggcacggttaaaccgtgtcaacactggtcactgcgcggcgacgcgttgttggttggttagtggatctgagggaatggttgcggtccgctaccgggggcgttatcccgggcccctattttagggaaggactggtgcaccattttggaaagccagtcgacgctagtctccgtgagttgttcagtttttcgttgcttaaagtgacctaattaaggtgttcacagaccgttacttcagcttgactttgccgccaaacgtgcggccacatacatcccaatagggaacttttgtctgcacgagactgagcccagctcaacttgtccgttaaaccgag

SEQ ID NO: 207 - DNA, 674 bp, Neofusicoccum penoulivirus
  source 1..674: mol_type = genomic DNA
gcggtttttggccgccctcccggaatttgtggctttcctaaccgtgtgaaggtcatgtggtgttcgcgtgagtgtgtctagcggccctctaagggagcggtgggggttaaagcccgaccactagctgcacgtgtaaccatatgacatgtaacatccagccaccttccggcggtgaactggcgcgtctgagaacgctccggattctccggcccccagagggtccatcgtaaacggtgcggtaactcaaagtacgaaattgaggggtctcagccccataaaacaaaggaaatgagttataaagagggtagcgtgcggcaatcgcgcgtccataccgctaaaccggatgggttctcggcagggagtgtgtgcgacagtaacgagtagtgtcgactgcgcgggatttggccgctgtgaaatgcggtctgtaaaaagggatgttggggccttaccggtgattgagcttagtaactcttcccagtaccaggactccgtgactgtgcctcgcgcgcgacggagcttacgcaagtgtgtcttcggatcctgggaccggttcggttgacatggtggttcccattccctatcctattctcgctggcgaaacaccgcgtctccggagacgctgatgtgtataaaggcgaattgaaatttggaccaaaacaaaagaaaacgatcga

SEQ ID NO: 208 - DNA, 679 bp, unidentified
  source 1..679: mol_type = unassigned DNA; note = unclassified RNA viruses ShiM-2016 sequence
gcgccaactgttcgtcgtattatccaacgtcatggattccacaagctccgcagttcaagcagcttttgtggcctgcaccatcgggaaaatcggtttaactctgtataaaaaatggatggcaccccggtgggctgctgaccgctatctggctaaagctgatgctacaacccgtgtgatcatggaagaggttgagaatggacatgactttgaagtccatcaactcacagtcgacatatcctctcagaccatggacactccggaaaatagcaccaccaaacgtcgggttcggtctaaagccccctttcgtgcttaccttgtgaggtctggcaaggctaaatttggtctcatgaagcgaacacccgccaacgtcatgtgcgttcgcaaatacttgtacgacctatgtgttgtgcatggggtgatagcacgacatatttgtgagaacgtagacattgcttcagagcttgtcttcattcccaccgctcatgagttagaaacacttgctatgcagtctagccgatatggaaaacgtcagcatacagttaagaacatcctctctgaggatgcctctgactgttgatggggccctgctaagttggagggggtagacactgatccaagcgactaccccggactcactccaacctacgctgggatcccaaaacgacgaaagtgtttgtat

SEQ ID NO: 209 - DNA, 681 bp, unidentified
  source 1..681: mol_type = unassigned DNA; note = unclassified RNA viruses ShiM-2016 sequence
cagttctcaacacagaacaacgggtcatttgtcgaatgatgggatgcgacagttcccattttcccttgacactggaaatattatttcgttagataattactcatgtgtcagttgccttgccggagatccgcttagcaacactttacatcttcccctgtgccattttctggatggcctgcaaagccttacggggccgagctcgagtttcgtttatgcgttacgacaagtttacgattcaggttggaataccgccgtgatttcacgtatgccaagtgcgggtgtgcgtgccctctaagttagaggggttaagcagggatagggatgtttagtgtgtgttttgggatgtgaaggaagaaacagctgatatgtggggagctaaggagcgttttagttttattccagcgggtggatgagaagttgggagagaaatcgaccgcactggggcctgaacttgccctataccaacctcaccaaacccccctggggaaatgtccacggtgccaccttacggtggttccactcttttcatcgtgagtgcaacgacggtacttccatttaatattgccgagcggatccatgaaaccgctgagcgattgcgagtgacaaattgcgactgtgcctaacggcattggcgcgacggttaaaattgcacaacaataaagtaatccaggcctgaggcca

SEQ ID NO: 210 - DNA, 687 bp, unidentified
  source 1..687: mol_type = unassigned DNA; note = unclassified Sopolycivirus sequence
aaagttgtggtcttttgctccacatcacgtctaagcgtgagcaatcaacgtgattaaataaatgaatgcatagcgttttgtgtatacgtttacggactgtaaccctgaatacacaccttaataaaggcgaaaccctaatcgtctctattattgtagtcctccttgtcacgggacaaatgcagggcgttcacgcatcaaacctacgagcgttcaagagccttactccaatattgtttgaggttaaggcagccaccccatagaggcttaattcggcatttagagtccaaggttggagcacatgaatcaagtaatgtgtaattcgaagatggcgattaagtttaatcattctgaagtcctagcaagatggaagaaagatgtggatccgtgtggccgttagctttgatgtaatgtgaattgctgtccacccgtgtgggtcggctggacagaaaggggtacgacttggtccgcgcactctacggagggcataccctgtacccattctggcgatggatacaccgtctcaaacttttaaatacaacttatgtgctattatttttgctgctttatacgctgccctcaacctgctattttatatgctacaatattgatactgctatatttgctaacaattatattgctatatttcttataagttgaaaagtaagagacgctatatcctgagataaa

SEQ ID NO: 211 - DNA, 724 bp, unidentified
  source 1..724: mol_type = unassigned DNA; note = unclassified Mitovirus sequence
gggacctgatggtcctcgacggcggagaagagctttcgccctctcgccttcaacggttagttccgtgtaactcaacattacagttgaggtgcattgcgctgccttagaggggagacccccaaagccttaagtggtggataagtgttggacattatttgtttaacggctgtccgccgtaggttattaactctgtgtttaaaccttcgaagtatggaggatctgaagaacggtaatttattactgtaactttgggttagtacatacgaggaggtacatatgatttatgtccctacaatactaacgtatagcttactaaagctggctgcggcccaactgctgtaatggcggttggaaaccgaaggttagtgttcttaaattactttacaaacctatatatggacagtataccaggcactgattagttcataatcaggaaggagtaccggaaccctgtgcgaagaaaacctcgaaagaggcatgttttcacctgaaatcctcatagcagtaccttagacagtactcactagatggataggcagtcactggaaaccatgcatggtgctaacgggaaatgaccaaaaagtctagttatccgagagctacatatatagtaacccgagctgagtaacactcagaaggagggtagtgaaccatattggattggtccgtaacgttagaagtgatactaacaggatccctttgtggagctccagatattaatact

SEQ ID NO: 212 - DNA, 741 bp, unidentified
  source 1..741: mol_type = unassigned DNA; note = unclassified RNA viruses ShiM-2016 sequence
atgcactagtgcataactaagtgaagtttcagtgagcttttgtggattacccgctattagctcatatagctattagactgtgattttcgaaagcgaacgaaatggatctaagttttgtgttattgtgttgcgagtttttgcccctcctcgggttaccaggaaaacaagaaaaagctacgaaggccggctaagtgccttcaatttcgttttcgttttagggcgttgtctgaagtaggttcccaatctatttcagcctagtttatggtgcaaaagttattgctgagtgattaggataaatgagcctaaacgttatccgccttgacaaccgtttggtttatgcggaaatcatggatccccgtgggtgaagtgatattccggtaattgttaacggctcaagccagggtgcggtatgcgagtcagatccgaaatccataaatattcttccggtccaatattccgatacataatgtagagcaagaggccaaaggttaattatgaatgaatgatcgtgattcataatgtccccccttttcgttcccgtaattatgtattagctactggcccatcacaggatgatgggacactagtgaaagcgtgctcttctgggaggttgagcggcgctaggcgggcgacctgaacgcatatatggcaagtttgttctaatcacaaagataacaataagcgtgctgcataattaagctagttttgggagtcagcgggctactgaagtccgcacaccca

SEQ ID NO: 213 - DNA, 743 bp, unidentified
  source 1..743: mol_type = unassigned DNA; note = unclassified Mitovirus sequence
gggcgcgagcccacagtttcactaaataaccttgtgaaatggttatctttgtgacctgccttaattggcggcgcgcactggtaatttccctataggaaaattcctttaacgtggatttagtttcgtagttgttggtcataaggccgcctttcgcgagggcagcagttgacttgggtttgcaccccatttcactgtggtataaagccaacagttactttctatataaagcgttattgaagggtagttatcctgcctttctttttagtcggaaacagcgaaagatcaccgatctcgggtttgaaatagaacaccgatcacggaattgagctgcccggtagtaatactggggggtccgaggaaaagagggtaaggctaatttagccctatctgtacgatcagaaccttgaataaggcggctgcagcccgtagtgatacggaaactgaagtctttactcgatacacaataaagaactaaagcaacacaaacatataatttaaataaaatattgttcgcgactgccactaggtctttaaagtcactgtcaaagtgaagtgccgggatccaagtaaaattgggtcgcccgttgctgggtctcttattgagattcattcccgcaacgggtattaagatcgacagaggtcgggttaaggtaacgttatccttcctagcgacgtgtcataatcttttcaagtcaaatggtttaccttttttggttaaatcattgaaagcttgatctgttatt

SEQ ID NO: 214 - DNA, 748 bp, Reptilian ferlavirus
  source 1..748: mol_type = genomic DNA
gcaggttggcgagatatccatggcagtttcggatctaggtgtcattgttagaaaagtcataatgggcaattccgagagggacgaaaacttaacagcactaatgatgaagatgcaaaaacagcttgcaatccaggagggaaagctggaaactctgcaatccactgttgggaaaatctatgctaaagttgacctgatcaaggatcatgtctcgaagtacatgatattaacaagagaaggaggtaaagacagtcaagaacatgaacctaggagattgatacagtcttacacaggcccagggaaacccgaagccgtgatcaatgagcatggccaaatcaggctcaaaggaacgaccaggagtggcaccagttggaacacgaccccacatgatttggtggatcccacaagactgacgatgtccagagatgaatcaaatgctacaaggtttatacccaagcttgatgatgcttctagggcaactctcctcagcctcctaaccatgtccggcctggacaatgacactcaaagcacacttgaaggaataattatgagtgccacaagagtagatcagctaattgaggttcatgagatactcttggaaccataacaaccccatatatgatagacccagtatatctgtgcaatgtcgactctccaacctgacatctgagccacaccgccatagaacaaattccatccagtcatcaccttattaagaaaaacctaggaacaaagttccactggttccaga

SEQ ID NO: 215 - DNA, 752 bp, unidentified
  source 1..752: mol_type = unassigned DNA; note = Picornavirales sp. isolate war204pic2 genomic sequence.1 sequence
attggatatcctgacggatccagtccaaattttctttaatagaataacaaccatgagaatgcatgggcgcatactgttggatatatctagtttcgtaagatatatggtatttacagttttaacctaattgacgccatttttagataaatggtaactagtttcaaaaccctcgagattcgaaagaactcacccttccgtttgcgaaggcaaagaagttccgaaaatcccgtaacccccccaagatcggggatgaagggagaaggaaatctaatccttgtaattattattattttaagcgtctttctatatgtagttgtagagagagagtagagtagagagagagagaagaagagtaccaacagagaagtactattaacgaaagactcttaatttaatataatgaaaaggtcattacgatgaattccccagaagtgaatctaacatcaaaagttcatttcgaaggttttgaaactagttaccatttatctaaaaatggcgtcaattaggttaaaactgtaaataccatatatcttacgaaactagatatatccaacagtatgcgcccatgcattctcatggttgttattctattaaagaaaatttggactggatccgtcaggatatccaatactatttattagttaacatgttagtgacaggccttgtagccctaactatcgcatctgagtaaacagattagacaaatccaacgaatttattaggctttatcgccaatcttctacgtgtaacca

SEQ ID NO: 216 - DNA, 760 bp, unidentified
  source 1..760: mol_type = unassigned DNA; note = unclassified Picornavirales sequence
ggctcgtgaggctggttactagctgagacgctagcaagcacacggcacagaagggatccctcgtcgtcacaatatcaacttgaatttctgtttggttgataaacccattccattggtcagttaaaatcgttggtcataactctcgcggtcaagatctctgggatagaaaatccatcatttataaccgccctcacttgtcggatatgtctcattcttttgattgaatcctcttccttgtaaactgacctagtcctttacattgcggaccgattcctcaaatttatgactcagatgtgaaacccccttttctcaaaaaccccacttttctttgacttggcatgaatttggattattctgactatcgattttaggtttaaggcaattttggtaaatgagtgttgtggcttgtaaaccgcagctcatatgtttgacagaaagatcttgagaaacatgatactatttagtaggacctccgaacaatagtccctcatgactactcttgagatgaagttgtttattatatcttgttatattgatttagttcggtatactgagagcattcatctaacccacatcagtcccctaagttttcggacgacaaggctgattggagtatttgtctaaggtaataaatgatggattttctatcccagagatcttgaccgcgagagttatgaccaacgattttaactgaccaatggaatgggtttatcaaccaaacagaaattcaagttgatattgtgacgacgagggatccctt

SEQ ID NO: 217 - DNA, 762 bp, unidentified
  source 1..762: mol_type = unassigned DNA; note = unclassified Luteovirus sequence
tagacgtaggcaagtttaatcttgcaccaatatagaagtagttagcgctttccattgttacttataggagccaaatttggtgagtcccgatcgatggatcctgggaaacaggttcggtgaacaaaaagccggtaatctcggggagatgtcagctcccgtcgtatcactttcggttgcatatccaaagaataaccctatatttgacaactaaaaaatagatagtttccgcctctcttgtaaaccacatacaagatgcgagcttgtggagagtaccttcccttgaataaggagggttgaaagtttctggttcccaaaccattgatcaaaattggctctgcttctggtgattacactgccgctgaatcaacagcgtaaacaaattcctattggccgctccgtgaaaagagagtggctaatacgcccctttgatggcgttaaatgaaagcgtaggtcgtacgacaccccctgtcaaggacagccaaccttgcgaagtcgggagaatacccgatagactgtggtctagtattaaaatgactcgagggctcttcctcgttaaaaagggggcgacggcaggcaactgctgtcattaggcgaaagcctctttgttgttaaggtggccatcgggtccacctgccccgtaaagttgacacctttacagaagtgttcttgctagtaagagttatttccttgtgaagtaatacaagaacctcctcccggcatcttcgtatcgtgtttgaggaatctctagtgttattgttagtt

SEQ ID NO: 218 - DNA, 773 bp, Mumps orthorubulavirus
  source 1..773: mol_type = genomic DNA
acgggaatggagcctcagctgggtccaaggagaggtccgggtctttgagtggtgcaaccctatatgctcacctatcactgccgcagcaagattccactcctgcaaatgtgggaattgccccgcaaagtgcgatcagtgcgaacgagattatggacctccttagggggatggatgctcgcctgcaacatcttgaacaaaaggtggacaaggtgcttgcacagggcagcatggtgacccaaataaagaatgaattatcaacagtaaagacaacattagcaacaattgaagggatgatggcaacagtaaagatcatggatcctggaaatccgacaggggtcccagttgatgagcttagaagaagttttagtgatcacgtgacaattgttagtggaccaggagatgtgtcgttcagctccagtgaaaaacccacactgtatttggatgagctggcgaggcccgtctccaagcctcgtcctgcaaagcagacaaaatcccaaccagtaaaggatttagcaggacagaaagtgatgattaccaaaatgatcactgattgtgtggctaatcctcaaatgaagcaggcgttcgagcaacgattggcaaaggccagcaccgaggatgctctgaacgatatcaagagagacatcatacgaagcgccatatgaattcaccaggagcaccagactcaaggaaaaatctatgaactgagagccacaatgattccctattaaataaaaaataagcacgaacacaagtcaaatccaaccatagcagaa

SEQ ID NO: 219 - DNA, 774 bp, unidentified
  source 1..774: mol_type = unassigned DNA; note = unclassified RNA viruses ShiM-2016 sequence
agaacccctcgcgggtcttgcatgcaattaacgactcctctaattagaaggggtgtcacggggaagacaacgccccgtggcgagaaacgcacgactacatttctttgaccggtttacctgccgccgcccggtagtcgcacctgtagaaggacccaggtgttagcagagtgcgccgaagcgtgcacaatgctggtgcgtgccttattcttttgccgagtccgcccacggatcggtggaagcctggtggaggggacgggaccctcctgaggtgaaggcctgtggaaggggggggataggcacccctaaggattggcctcctgtacttccatgctacgagtcggcccggtccggggcttcattgtcaaccgtggcccacacgctggtaacggcggtgggttgctagccgaccttgcaaatggctacgaacccgaggtgtggcggatccacatcggcctattgctatttcgtgcgaattactgcccctgaggggaggtgacaaggctagagccagccgttggtagcttgccctctcaggcccagtaaggaatgcccgttgggacgcacgtaacagtagggtcgcctttgtacatagtgggacatgcatgccacctgatcaacgctggaagtacttccggtcccagtagttgtttcttgtccgggttacctacggtgcaaatcgtggatgccccgtatgagaaatgaccattgggaccgaaagcgcgaaaccaacgttagcaggccaaagggaatccccttgagcgaaattagcttgca

SEQ ID NO: 220 - DNA, 779 bp, unidentified
  source 1..779: mol_type = unassigned DNA; note = unclassified Mitovirus sequence
ggggggggtcccccgcgcaagcggtgtgggctcttcattgagcggtagctaccaactactctccacatgatggaaggaccttggttattccagatttactctggaccctggcttggttaagactgcaaacgccactaggcagttctataaaacggacatcagtgccccctatgctgttacttggtaaggaagaagaacccttcttcatcccgtcagcatctccatggctggagtataacaaaacgggtgagtgcacgacctgggtaaggacccagtgaggctccgaaagtaaggcttcgttgattgtagcgtaggtaacggtctatcactagacaagtgccccttaactctggaatctcgctaatcagagatcaacgaaataaccaaagataatcaggaacaccggacttatacctctgtatgtcgggggggagagactccccacctagtacttggacgacttcctcggaaggagtctaaggaacggtcaagggaatctcctacggtagagctggccaagtcagtttaagattatagtgatatagtcttcagagcaagtagatccttcccttcagaaaggaaggactctcctgatgatcctcgtgagaggagtcacctcacttcagacctcgtacgtgtggtacggaaggatccccagacggggagaaatctgtatctgtcggcgacaactcccaccatgccctcttgggggggattgaaaacccttttaacccttgagagtaaggaagcccttctctgaaaccccacttaacttcgtc

SEQ ID NO: 221 - DNA, 781 bp, unidentified
  source 1..781: mol_type = unassigned DNA; note = unclassified Mitovirus sequence
cttcgccaacaattacggtggcttccgatgatctgcgccagtaaggtagacgtaccccagaggatccttttaaaggcagtcatcttctccttgcacttgcagtgctggccacattgtaatggaacgtaaggaataccttaatatactactggccatagttatattccatcctgagggtaacctcttgtatatccagggtgccgccttttactaaaatatatacttcaaaactgttacctgtccgctaaaacctattggtaatctcaactacacataaagcaaggtttacgccgtctagttctattgtaccactgagaggctatctgtaacgggccccctgccgccagaggtagtacgatatgggttaaaggacccaatgttccccatcaagatataccatcgtcactggtagttcatcacactagctcacctagctctcccgaagattggtcgcttctgggtcttggggtgcctgagataggtacaggcataaatacaccacttacccgtgcagggtaccataccaaaactccccttaaatagcttccacatggttactgtccctaaactctctgagaaggaagtcgttaccagagggcatacgtgctcagtaataacaatggcgaccgaggagggtggtttactaactatagtacgtatttggagatactacgtgtgcgagatctccggccgacctaccccatggtagattgtgcccccctgctctgcagacgaaacacatgggacactgtataggaaacaaaacatatgcgaaattgtt

SEQ ID NO: 222 - DNA, 807 bp, unidentified
  source 1..807: mol_type = unassigned DNA; note = unclassified Alphachrysovirus sequence
tgataaaaaacaaaaaaccgctttttgccattatcactcaatcaactactagatatgaataaattagacgattttagcgatgaaggcggtgcccccgcgctaccggggggatggcgcagaacggaggtaggcaagactataactggctacctacgtgataacaatttaggcccatggaataagttaactcacggacaaactaaccaggtcagacggatgttctcagcccttactgttagcagtttagaaagcgtgtcatcgcctggcccaccaaggaggcggttaggatacattgtactgccgcctggtcacggtaaaagctatatactgaagataccaccgcgacctgtccaattggttgaagctgatcaggtgatggattaccacctggatcccaccctggcacggttgcgtaagaacgcaaaagctagtgggtattggcaagaatacgatactaactatgctcagaggttggattcacgattgccgttcggcgattgggtaatcatgctacctagcgatgagttgggagtaacgatggggtggagtagacttgggacttatatattggctctggacgcgtgggcaaataatctcaagggacgtaaaggctcgatatctgagtatagtactgtatatagtagggctcagctgattgaaggtgttaaatgtttcggtacaaacgcagaactacaggcagctgtattaagggatgttaacaagttcctgaccgcctgaagtacctgatgagtctcccccaggggaacgaaacgctgtcgcgtcgtaccaggggcaacgcaacgaaca

SEQ ID NO: 223 - DNA, 808 bp, unidentified
  source 1..808: mol_type = unassigned DNA; note = unclassified Orthorubulavirus sequence
gctcttaaagggacttgatcttcgccttcagactgtagaagggaaagtagataaaattcttgcaacttctgcaactataatcaatcttaaaaatgaaatgactagtctcaaggcgagtgttgcaactatggaaggtatgataacaacaattaaaatcatggatcccagtacaccaactaatgtccctgtagaggagatcagaaagagtttacacaatgttccagtagtaattgccggtccaactagtggaggcttcacagccgaacaggtgatattgatttcaatggatgaactagctagacctacactctcatcaacaaaaaggatcacacgaaagcctgaatccaagaaagatttaacaggcataaaactaactttgatgcagcttgcaaatgactgcatctcgcgtccagataccaagactgagttcgtgactaagattcaggcagcaaccacagaatcacagcttaacgaaattaaacggtcaataatacgctctgcaatataaaatgaggtgcagtcacacaagagacactcaacatgcatccaatcaagatccagactccatccatccaaaaacacgcccacaattgtcaacaccaagaaacaaccacagccgaaccatgctcaaccaaaagacccaaacaacacctcacatcaatagaaggctggacatgataaatttaataaaaaaagaaaagaagttaagtaaaatttaaaggacacaatagagaaaatctaggtccgaaagcttgcctctcagacagatcccaaaatcatagtccaaaccccaaacacagcagcagac

SEQ ID NO: 224 - DNA, 812 bp, unidentified
  source 1..812: mol_type = unassigned DNA; note = unclassified Dicistroviridae sequence
actggcctcccttattattaggagacttcaaaatgcgtacggggttaaacccgtacgcaattttgaagtctcctaataataagggaggccagtccgtctaggtagactcgtcatatatacatttattgttacggcaattaatttatatatttgaagaggcctattccggctgcccatagtgttattgtatccctctgatagattcaccgtttctaacactccaaaccaatgcaaaactgactttgtcgacattgatcgttaagagagaaacaaagatgttcaaggtactagctatggcgtcttaggagggcgtaaaactcccgcagtgacaggcgtatctgtctaccccttgactgtaatataagttgtatgaatgagtgcgtgctcccgcaagtaataatagtgagcaaaattaattttaagttagttttaagtctttcatatatatttatttcattggcatgtcacaaatcgtgcagtttattagtacctatacgaatcactgacttatgaaaatattatttcgatatctctaagatatagttttgcccagtgggagtctatatgatttcctgcgtgcttcggctgaggcaaaatttaagatttaatatgagtagtggaatatgtgaggatcatgtgggaaaatttaccggtgctggatctttcatttttattataggtccttccgcacggacaggttaaccgaatttggcacttcggatccctggataataattgccccctttccacctcagcaaagtttttgggttaataaagcttggatttgaggatcaaaatatttttctctcatc

SEQ ID NO: 225 - DNA, 814 bp, unidentified
  source 1..814: mol_type = unassigned DNA; note = unclassified Picornavirales sequence
cattgctacagcccttagagaatttactttacatggtaaaaacacgtataaatactggtattctgaattaatcaaactaaaagaagattattacgaaggatatgaatttgaatgtcttgttcaccgtgattaccacatggctctcaccgaaactcttggtggagatcatgtttggtacatgtaaagtccaaaactaaaactgtaaatatgtaaatacttttaaaatacgcccgtaatggcgttaaactattttggaaacattatatttaatggatccatgccccaaaggcaaatttgatgtgtgatcttgctcccttataggctcatcattataatctagtagtgctgcatcaaataatctcaggactttttagtcactacgcccaaactgagagttggcaatcccaatgaacaaaagttagatgaaccctgatttagtgttaattgaaactaaattgggttaaataaaccaattgctaacactaactcaaatcaaactaccactagtgttactagtggaatcctcaatattggagattcaacccccactcccgtccaaggtacacccgaggacgctcacactgaagctgctgttaatcaagtttttcagcatgctactaccaaattcatcgatgataatgataccgttaacagagatgaatccaccgtcgaacatatcaactctagttggttatcactcaacgacacacaatccactgagcaaactattattgattttctttcgaaacctatcattcttaattcaggtactttttccatttctgatacttattcttttcttaactactatact

SEQ ID NO: 226 - DNA, 827 bp, unidentified
  source 1..827: mol_type = unassigned DNA; note = Fesavirus 1 polyprotein gene, complete cds.1R sequence
gttttcatcaaagttgaagctcctgaaattgacagaagtgatagaagatttcaggagcttcaactttgatgaaaacattaatacgccttttgagtgcttcaggatccgtcatacgagactggagctccgcttgttgagcatcgatgtcgaaatttgaagttagaacgacgaatggggaagagaaatacacattgcctttgcctgaacactcagcaatattgagtggatagggagactcgtctgtcatttggataagattgaatatttcattatttcgatactctggatctttcatttgaaaaacgtcgttacacactgcgaatctctgataggcgtactggtcatggtatggggtgtttgacatgactgcgtatatatcccgggatttgtcaaagtcaggctctccaaggacagcacacaagtcatgtgccaattgtggaaccatgactgtcttcccaatacctgggacgccataaatatagattgtgtaaggtttcattttaccctcacagccgacgaatgatgctaagtttccagatatgattttttcgagcttacgaacccgatcctggattggtttaacttggtcagttggaatttcgtgcttctcggactttcgcacaaactgtcttccctgagacagcagggacaaaacctggagacgagaaactcgtgatttagttagttcagccaatacattccaggatcagcaggctcaggctgttgattggtggggtttggtgcgccttctccgccttgatatcattcaaacattctcgctatctgatgctatatcgaaaattggagttaaccagcaggaggaggaa

SEQ ID NO: 227 - DNA, 834 bp, unidentified
  source 1..834: mol_type = unassigned DNA; note = unclassified Marnaviridae sequence
tcaagcacgtaaacgtgacataggaaaatctgtttttgagcagaatttttcctatatcacgtttacgtgcttgacaatgtcaagtgtaatccgattgaggtgcaaggcctcatctgccgcgttagcggcgcgctaggaccgaaaaagcaaaccctatgtattctgctatttcgattcgtatacattgggcgttgtgatcgacccaaagcgcgctgcttacgcggcatagggcggtgtcgcaagacaccgcccgttgggggtgtaatccccccctttggagggttgaaccctccaccttagtcccagtaggttcccactgagcaaacccagcaatggatcccgtggaccattcggccagaccaacactctccggagttagtaattcatccgtttggacacgctacacatcgtcgactgctaatcacttcgtgcgtgctattgtgggccgtccgcgtccactctaagactttgtgctatatatttcaggggggggcccctgcctcccccactgcatatacattgacggaacccaccgtcgttaaacaagtggagaaaaacagcgagaactgaaactcgcagaaaccattgtgtcgctaaggctgccagaataggcttgcctggtgcagaaaggaacccataacctccgacctctccgttccgataaaggacgacgtcgaaggcgaaactgtaagttgatacttttgtgtatttgccaaacgagctcgtcgtaagaccctacgctcgtgtaacatttgcacaattgagatactgattggaccctctatgccctgatagctagatcgatacatttactcatcacagtaaaaggctgag

SEQ ID NO: 228 - DNA, 855 bp, unidentified
  source 1..855: mol_type = unassigned DNA; note = unclassified Picornavirales sequence
ggtgcaagccctccctcccacttggtggttggaggtgcacgttcaattccaaggcgtcctgcgcagtcgtcatgctgtgcggtgtacgtggtaccggctagtagatccgagagtgtacctggtgcgcagcccgttcctgatactcactagtggcaacccctgtatgaatgagccgtcttcagggttagttagtggcttaccgaatctatttctacctttcaacgcaccgacttaggtgtatacaatcaggacgttagtggtccttctgtaagtagtggcacaacttcttttgtggcagaccccgtggctgccatccagccggtcggccggtccgaccaggttgaagagttgtttgccccgaattccgttagttctattagtgactatttagctaagccgtatcaagtatttcaaggccctttcactgttgtggatccaattggtgccattttgtattccgccgacacttttacttattacactaacttgttaaaaataaacaagcttagaggtttctatggtctgcgggcaacgctgtgcgttcgccttgatctcaatggcactccttatcacgctggtcgtttgaggttgtgttattatccttgttattctgagaatccaaggaaggggtctgcccatgttcaaaatgttatttctatttctcagttgcctggtgttgacatcgaggcaaacgagacttctgttttacttcgcatcccttatgttgctactactcacttcattgaacttactgctggccctgttgattggggtcgtgtttacgtttctgttatttctcctttgcgtacggggcctgacaaccaacagcagatcaattatagggtctggacttgg

SEQ ID NO: 229 - DNA, 859 bp, unidentified
  source 1..859: mol_type = unassigned DNA; note = unclassified Bunyavirales sequence
gtttgaaataagctgtatgtgtgattgagatattgctattccgtcacatagaatttctgtgaatccactcttatctgatgtgaatgatgattcaaccactaatccactttcacatttgaaacaaccgtggcatgctgttagtttgaaatttgttattgctgccttttcaattagtgtttcaggttttttacctttgatagtgaaaatgaagtttagatcattcattacttctccaactttgtaaattttgtcagcaacatgtctgagattgtgctcagaatgcaaatttctaatcaatttgaagttatttttgcagcaagatttgaaagtgaaaaatcgatttcttgaaaagaaacaattatgtttgtaatcagcatcatcagaatcacaatcaaaatatggagtcattccgtcaacatgttgcagtgtgccaaatctatttgaaaattcagacctatcattaattgggccagaatacaaatggcctttgtaagatgcaaatatcttaccaacatcatctttggaatctccatcgaatgtgaatccatatttcttctgtgcaattagttctgttgaagatatatttctgcagaaggcttttgattgaaataatacacataattcaattgatttcttctctcctgttatcttgtagacatcagcacaatcacctaattttggttccatccagcaggttccacatgtgcaaccggtacctattgagaaacatccggatccgtcacaagaccaactacttgtatcttctgacgaaattattttgttgttcacagtttttgaaccaagtttgtctttacacttgtcacaattttctgtacaagtatcggtgctttcatatttc

SEQ ID NO: 230 - DNA, 861 bp, unidentified
  source 1..861: mol_type = unassigned DNA; note = unclassified Sopolycivirus sequence
aagaccaataagagctctatggaatgaacatgtagagcaatgtccaaattgcaaatatgtttattctgttttacgcagaccatatatagttccttcagttccttatttcagcactccaaaattccaaacttcagaaacctcatttccttttcctgaattcactaaacccataagaaaagaagaaaaatcgtcttctggtgaagatactgttgatgattaagtattctttatgagttgcagtctcttactctgcactgtgtctaggtggaaactatcagcacagtaaataagtgaatgtaacaagtttggtggatacttgtcggactgacgttataattcaccctgtatgtttggcgaaaaccctatcgtcttcatatggaagttctccttgtcacagaacaaatatgggttgcccccagcattaaccactaagcgtttaagagctcatgtctctctttagagatttgatgtatgagcaactctcccggggaggagaatttaggctgactcctaccaaggttggatcttgtgatacgtagcaagtataggatgatggctaattcttttattaaattcagaaggactagcaatctggatgaatttaccggatccgtagagtcatgtgtttaatgtaatgggggttactgtatactcgtgtgggtcgactatgcagaaagggggatctcgccatagagatgtcctgtacccattcttgcggtggacacatcgtacttaaattttaaatgtatttaatgctattattttgctgctttttgctagttatttgcttattttattgctattaataaccattttgctgactaagttgctttcgttaagttatattgctattcaactacg

SEQ ID NO: 231 - DNA, 863 bp, unidentified
  source 1..863: mol_type = unassigned DNA; note = unclassified Mononegavirales sequence
ggatcgatgaaggagatcctgggaattagtcttagaaaaacccgacagttactagtcaagcaatcatgaactatataacgccgacgattttggttgccgtcattgtgatcgcccatacagtggccattcggtcactgtcttacgacatgacggacagggtacctgtgatcgccctcatcaatgaccacgcttcgtggtttatgaaattgaccgtcagcccggtgactatcaatttttacgcgacgctgacctccttcttcgccaccttagccctgatgggtgtggtggtcaaaaattggcgggcgtatgtccgggacatacaacgaggggtggtgagggcggaagtgttgatgaggtcagcgtgactgcgctggtctgcttctagtttctccctgagagagttaatctgtggaacccgggatctcctgaggcggacacacgacagcattgtgcagcttacatcttgcataagatgctgtcgtgcttattttgagcgaattaaactcctcaattctgccgaagcagggggatcctagatttcaactagttattctctcagaggaatagtttggtttattttgttagtttcattgtttttttatgcatagttctatgtgtgtttgtttgttacacatattttgttttatatatatacacatgtatttttgatgttggtcatgtttgtctagcaattcggagccctatacactcatcttccctgattctaaattctctgtagaaattcacatatatgtgtatatgtatatatattttgatactgacctgctctacaaggagcttataacaaattgagaagtggcatatcttcttagaaaaacccgctagttactattcaaatcaaa

SEQ ID NO: 232 - DNA, 867 bp, unidentified
  source 1..867: mol_type = unassigned DNA; note = unclassified Dicistroviridae sequence
ttaaatagaatccagatcaattcgaagctttttaagtagccgatgtgtagaattttagtattgtccattttatagggtacagatcaattcgaaactataattgtaggtggccgtcacaagagcaaacaaaggtagatttattagagtccagatcaattcgaagctaataagtcaaaattataacaagttgaataactttaaaatattcaaaatcaaatttatttaaagaatagtactctctttttcgatagaatgttttaggaaaagagctcaatattactttattgttttcaaattattatgttttaacacaaaatatatttttgatagtagtgacagtctatttctctgtctaatgtcgatttcccgttatatgtggatcctagtgtgaattactagtaaaattttattccgtgtgcattcgtataatgtacttattgtttcaggcgatttagtaatgctgtttcaataatattaagaactaagattatttctatattctaatcaaagataaaatatagactcttgttatgaggaaagttttcccctctttcaagttttaataacgaaacaaatatagcaggttatttgttgaacgatcggtagttactccgatgattcgattacttccccttgacccaactttggttgaacttttagttcaggtatatgttgcattttccacgtgtgagaagcgtgttcttaagtgaaaggtaagttaggaaagaatttagtgttgcaaataatatagtgttatgtttcctcaaaccaggtgtgttcccctcgtttgttgtatttttagggcatccgtaattaaaggattttaattaattaaataagtacaccattaatgtaaatttttgttgt

SEQ ID NO: 233 - DNA, 892 bp, Achimota pararubulavirus 1
  source 1..892: mol_type = genomic DNA
caggagttcagcaacaagttcagaactcaagagacgccatcggagagagtttgatcttagatggactggaagaagaccccatgtcagtgaatggtgcaaccccatatgtgccccaatcactccaatcccacggagatttacatgccgctgtggagactgccctgatgtctgccccatgtgtgagggagattttaaggtacttaaaattgctggagaaccgttttaatcaaatggattggaagttggacaagctgattggacaacagagtacaataacccaaattaggaatgaacagatgggactaaaagctaatatggctatgatagaggggttgattacctctatcaaaatcatggatcctggggttggtactggagcaaacgccgcacaggccaaaaaattgttcaaagaagtgccggttgttattagtggtcctgttgtgggagagaacccattggtgacagctactgagcttgagatccaagatcttggcaaaccagcaataccatctaaagggagttcgaaaaaggctggactgactgaagcagatttggctgggtacaagatgaccctgatgacattgatcaaggattgcattcccaatgcttcgatgcaacaagagtttgagaggagagtaaatcaaatcaagaatgaagttgatttcaaggcgctcaagagagagatattaagagctgctgtctaagaagaatccaaattatgcttagtacccatactgcaaggctttcaaggaatcatgctgcttaaatagtgcacataatcaatacattccatgcaaacaaatgacatcctgattagtagatatagttaatttgcaatttaagaaaaaaccaaaagtgggcccggacccatcaagcccaggagccctcaacc

SEQ ID NO: 234 - DNA, 898 bp, unidentified
  source 1..898: mol_type = unassigned DNA; note = unclassified Orthonairovirus sequence
ctcgaagatatctaacccccgagaattacaaaccattcaaccaagagaacgggaagtggcatctgcctcggggacacttccttgtgaagtttagattcagagattcaaccttagtcatctcaagggattcacctctttctcaaaccctcttacagagaagttggctcactgtagaccaagtggagagtgaccaaccgtggatcccaacttaattgctctagtcatttaccttttgagcttgatctccattacagtttatcacctgtcaggtcccaactggccaagaataactgagaaagaagaggggccaagagacatacccaggcttctacaggagaatccctgccaactagtctctttccagaagctagtcactccaggaagaagtgtctgtgtaacctcacagaaaacaaagccaggaaacaggagtccagcagaaactctgggtgaggtccaggctgatgaagctgacgaactgatctgtgtagttgaacaacaactgcaagacttgggtgccaatgctgtcgctttggtagatcagaaagcaaaaggactccaggaaagactagtaagcacgtggaactacagcgaagataacctctcaacatcgccagtgttctggctggttatacttgtgttggctggttttctggtgctccgcagttctaatccaaggtacatccctagctgtccgagctgctgtaacaagtcagcaggtgaaagaaaagtagtgtacctagagtctgtacacactcagacgggaagaccaagaaggaaaagctcgagtactcaaaccgaagcagtccctgagaggataagccggtcatctcaaacagaaggaccactgacaaatccagtgcgagaaagtctacagctgctggaaatctgaccaatcaca

SEQ ID NO: 235 - DNA, 908 bp, unidentified
  source 1..908: mol_type = unassigned DNA; note = unclassified RNA viruses ShiM-2016 sequence
cgcggcaacgcgtacgtagagtctgtctcgatttggggtttaaccacccctggttcttctgatcaatatatatatgtagcaatggttttccttgtgttattttacgaatgatcacaagatttaaaacccctacatgtatgcatatcgagcagacaggttttttgagcgctagcagtcgatctactgccaccaacggattttaccaattcaatcctaacagcaattggaccgcgccccccttcgggggggcgcattcaggcactttgtgccgccgctttatgcggtttaagatgcatttgcatctggaatatcccgggattccactagaacaccgatttaacggtaccggggaccccccgcttatgcggggggtctcggcccatctgggccaaagatcttacgtcgatctcaacagcacgtaaacacgctctcccatcaacgggattgagcacttcttatacctttgaagtaaatttgggaacctttctacttccagtgatagtgaatcacaggacaatctgttcacggaacagggtacttacggatccaccgtaagcgtgaaattagtttggggagcgaaataccccatttgaccgtagttacgcactcgcgaagatgcacttacgtgcgtcttgcgaggaaaaaaatatctcgtgtggttacgcggtttgatgtaaaccacctgttgagagtctcatgatactcgtccggtacgccgggtagacaggacaggtccctgcaagccataaccttaaactggtaggttgcctcacatggtttttgaaatacatgctgtggaggctttccctattggataataaagcacgtgaccgacaattgataccaccttcgcggtggtatcaatcgtcggaaaatttcctccaagaagttttccggtgattgatatc

SEQ ID NO: 236 - DNA, 909 bp, unidentified
  source 1..909: mol_type = unassigned DNA; note = unclassified RNA viruses ShiM-2016 sequence
tgcaggtttccttttataggagacctgcacgtgtttttgtcgagatgaagagtagctgctcttctcagtattattgtatgatattttcattcatattctgcgttattttggataactaagaattggtgtaatttcacagtagtactgtgatttgcacttttttcttaccaatctgcgtatgaatccctgtttgggtttacatacacattttatttgaattcgacaatgaagtttagcaacttctttctgaaaactagctagagttcgacgatctctctggctaatgacaaataaccaatcaaaaagtcaaatgttcatgtatatatatatttagtagtgacctttatttagaaaaactttagatgatttatcgtcaagttgccctttgtgaagcgatcagctttttatatcgtttcatttttgtatacgtcttaattgacgttgtaagtacgttttgcatacctcacattgaggatagtatcgtttcctgactaagaagttaaactagtctaccaatagcaaccatataggatatagctttgtttttaacaaggtttaatctgatcttatgctcttgcttacggtgttttatgtatagaaaaatttttataaaaactacataattgtcaaaagaaaaagcgttacgtactgacgcatttatgttcacagtgtgacacaaaccttctatattttgattgtaaaataggctttgcctgaccatttatcaaatacaaactgtttcaaacgcctctccgagccatattggccgacgcgaatcgacataacagggtgagtttacagctgcagttgcagccgaggatccacttatttgagagagaattactcttaacgaaattttgaagtcacttctacacagttaagtctgagtaggcgttatccaaacgtaaa

SEQ ID NO: 237 - DNA, 911 bp, unidentified
  source 1..911: mol_type = unassigned DNA; note = unclassified RNA viruses ShiM-2016 sequence
aggaagctccacacaccctagccagtaacagttgttgcaatagctggaagggtaaagccaacgaaagcacaaactggacacacatttcttaatcggggttctgtccgggataatcgtaaccacccccgtcatcgcgtttgtgctatatagatttgtctaccttcctatccaggccaatatcagaggtcttgtcaacgaatatggccgtggctaggactaataggagaagacgtatgcggcgacttcgtcgcccccaaagagcgcgaccacccgttgtggtcgtagcggcgccacctggccgccggcgccggcaggcaccggctcagcgcccaggtgctagtagtatgtcccaagaaacctttgtgttttccaaggacagcctggctgggaacgcttcaggcgttctcacctttggaccgagcctcactgattgtgcagccttttcctcgggaatcctaaaggcttaccatgagtatcgtattaccatggtgcttctggagtacatcacagaagcctctagcaccgcttatgggtccatagcatacgagctggatccacattgtaagattaccagcctctcatccaccgtcaacaaattcggagtcacgaagaacggtcggaggagcttctcccggcgccaaattaatggcaccgagtggcacgatgcaacggaggaccaattccggatcctttataagggtaatggcgattcgaagatcgccgggtcttttcgtgtcacgattcgggttgagactcaaaacccgaaataggtagacgagagctcgcctcccactcccacaccagagccgactccggctccacctcaaccagaacccaccccctgcccccctgctaaacaagacagattttggggttatgagggtgtaccacaatcgaaaatttcctcgggc

SEQ ID NO: 238 - DNA, 930 bp, unidentified
  source 1..930: mol_type = unassigned DNA; note = unclassified Sobemovirus sequence
ctgcttgggatccgaccgatctcctaatgctaaaaccctccgctatggtccgtatgggcctggtagacccggccagagtgttcgtgaaacaagaaccccacaccaacaagaagctgagtgaaggtcgctataggctgatctcctcggtttccatcgtggaccagatcatcgaaagattgttatttggtccacagaaccagcttgagatagctacttggtcgaccataccgtctaaacccggtatgggcctaagtttgcggtcacaagctgagttgttgtggaatgatttgaagcataagcaccgactgagtcccgcgtctgaggcagacatttctggatttgattggtcggttcaagagtgggagctttggtctgatttaagcatgagggtaaatttgtgtgatgatatgcatgagggccttaagagattaatgatcaacaggtttaggtgctttatgttttcagttttccagttatccaacggagagctactagagcagacctcacctggaattatgaaatcaggttcttattgcacgtcctcgactaactccagaatcagatgcctcatgggcgtcctcattggctctccttggattgtagctatgggtgatgattctgtggaaggttgggtgaccggagctaaagagaagtacctcgagttaggtcatgtatgtaaggagtatagaccttgtgagaccaccagagatggtgagctatccaaggttaatttctgttcgcatgaactctctgagggaagattctggctcactagttgggccaagactctctataagttcctggactcacctaatgaatctcatgttgagttggagagagagctgagttctgggcccatgtggccccgcgtaaaacgttacttgtgtcaggtaggactgatccctgacaaaacattagaggaaaggaaag

SEQ ID NO: 239 - DNA, 936 bp, unidentified
  source 1..936: mol_type = unassigned DNA; note = unclassified Carlavirus sequence
gtttacaggcttgaaattgatatagtaagatacaggacaaatggccgatcaagatcaacgcaaacgcgagcaggaaatgaaagagagggcggcggaggagcaagctcgtcggaaggctcaagaaagcaagttgaaatcaccagaagcaaccggtagtggattgggtcattccatgatccaaacgcaacaacgattaactactctggaaggtctactgagggaggataggtctggcttgcaaatcacaaatgctagctttgaaaccgggagaccaccgttgcaaccaactgaagacatgagaggtgatccacaaaatatctacaacaggccatcaacagactttctgtgggaactgaaaccaaaacctgtttcaaacaatatggcaaattccgaagaaatgtcaaagatcaaagttaggctggaaggactgggtgtacccacagagtatgtatattcagtcattcttcaactggtgttcaagtgtgcaagtactagtagttcctcctatcaggatcctcaagggaccttcgaattcccaggtggtgctatcatggctgatgatgtggtgggaacagtgcaggagattgctggactccgtcgagtctgccgactctatgcgcccgtgacatggaattacatgcacctgcataataaaccaccttctgactgggcggctctgggttttcaatccagcactagatatgctgcatttgactgctttgactatgttgaaaatgaagcagctatcaaaccaagtggtggaatttcccctagacctagcagagctgaatatgtggcatacaacacgtataagcgacttgcgttggatcaagcgaataacaatgatacatatgcaaataatgattcggcaattactggtggtagaatgggtcctgaaattactaggaatttcaataatgcgaataataagaaact

SEQ ID NO: 240 - DNA, 942 bp, unidentified
  source 1..942: mol_type = unassigned DNA; note = Dicistroviridae sp. isolate rfb199dic1 genomic sequence.1 sequence
ttataattatatcgtattaaaggattttcattagttgtcatggttaaatcataaatacttggctaaaatggtttcttcgacaagtatcgtgtaaagttcttaaaactaataatcgtccagatcaacggtcagtgtacaggcgtgacatcctaatctcggccttacattctccactccatacgggggaatgacgcccctctcctaagagtgccgagagcgccacatgtatgtcttaagtttcttaaactctcttcaattgtacgtagggtatgtccctacgtacaattgaagagagtttaagaaacttaagacatacatgtggcgctctcggcactcttaggagaggggcgtcattcccccgtatggagtggagaatgtaaggccgagattaggatgtcacgcctgtacactgaccgttgatctggacgattattagttttaagaactttacacgatacttgtcgaagaaaccattttagccaagtatttatgatttaaccatgacaactaatgaaaatcctttaatacgatataattataacctgacctttacttagtgatttcacaaacggatcccgggtgatttcacgcacgactaagttttataatttgataaagattatgcgagtaataggctcttttgtagcttttagtgcatgtttagaaatttatttgttagcgaccattgaaaagcgaccctcgatgattacgatcacagaggttagcctgtcaagacatttaaataacgaaccagcatgctatactaattgagcaataccctagtttatcagcgattgatatcaaaatataagattcctcggaatcaaggtagtcccggtaaattatatttgtagcgaagacccccggaactgtaagcgatacacgaatgaagacgacgattcaagacggaatcagaatgcctcgtgggcgtaaacacaaacc

SEQ ID NO: 241 - DNA, 943 bp, Mivirus dermacentoris
  source 1..943: mol_type = genomic DNA
cgctgatagactcttagttttcgaccacatgcgcgcaacggaggttggtcgtgttctgttttaaaaacaaatcatgccggaaggcacagttttcagagatctcgttgttcgtttgcgctctattagtctccgctttgctagcctgaggcgttccgagccactgtgtacttccggtaccatcagtcaatcttgacgggcattcccctgagagattgaccagccagggggtaaccccggcagcgcgaggcgtcagccttcggcccgccgtcgcgctccaacgagatctccacgttcaccaggtcatccccatcgaccttccccccactctgacagctccccggaaagaggtgatctttccgtagaagatcggttgagcttgtcgacgacccaacgacgtcccagacctgtgttaggtgcagctggagtgtcttttgcaaaggccttgctctcaccgccccctggtcgccacgagccttgcccgccacccgctcgtcgtgtctcctcccctgagccacagccaggtccttccggctatctgagacacagcccgcgagaggttgccactccaggatccccacctgagtcaccctatctgaccccccgatcctctcctgaaccagacccggctggtctcttagccgaggaaggtcagggtgatcaggatcctgtggaagatcctgcgcttgtacagcacctcgccaggcttctcgagctaagcctagacctggagggagggatagaaggcggtgtgcaagctctgtttgcacaacaggaaggtgatcaagccgcaggaccagcccagccaccagcacccgaggccccccaagcggttgcagccccaccacctccgccgcggcccgatcgacgacagccagcggttcccgtcgcagttgcagcacctgctccaccagcccccgcagcagaaccggtcatccggccagcg

SEQ ID NO: 242 - DNA, 945 bp, unidentified
  source 1..945: mol_type = unassigned DNA; note = unclassified Hypovirus sequence
tccgaattcccgggatccgcctttgagatcttcctaggaaggccacctaaggaacttgccatagcccgtgtgagtgcttttatgcattctcatcacagttttctctcttggagaactatggttaagtttaggatttcattggtgaggccagtgggtctcggtcaaggcacagtgagggcctgtgcgtggttgtctccctcctctcccgcaggggaagtaaaacatacttgcaccgggacgcgatgacgtccgttatgtggataaaccatctctttaattaaaactcatcaaccgggggttgcacccgattgcaagtcaccactagaaatgacgacgaaagtagaagggtggcagagaagatgaaaaggtcggcggctaagatggtgtcttcttagtttgctttaagcgcggcaattcaacattgtcccgtcagattggccgcaatgcctcaaccttcaatcgcttcgggtactgagctcgcggtaaaccattgtaaacggtaacgcgtaggagtatagcactcttgcgtagtccctagtcattaaggaattactgtctctttacactacaccaagtggtcgggtccgtagggcctgatctttagcctctccggctatcgctgcgtatactgcagtctgttagtaggagtcatttcgaaatggtgatcccattcatacgaccgtgacgaactgaagtcactgatgtctctaaaagctaactaaaatttagtctgcggggtcgcagtacggctccctcatcgatctttttctggatgtaaaactccgcgtctcatcgctcaagagtataaaaggaaattgaatggtgacagctggaaagacagcaccccaattcttcaagtggtcacaaacatcgagctttagtttgcaaccaccaccgtttcaagaatatcgccgtttcgcaataccgtaaattgccattttcaac

SEQ ID NO: 243 - DNA, 946 bp, unidentified
  source 1..946: mol_type = unassigned DNA; note = unclassified Marnavirus sequence
gctaactgtttgccctatatagacaagtgtttagccctttaccgagaactggactgcacggagaggtagtcctagctcgttacgttggtcttccttggtataggtcatcaatggttatttgatgagagctttgatgtaattggatagagacgttttactcagataggtgatttctgtccgacacgcatgtcggtaaatatcaccaactttcgggataaccggatcctttgttatttgggattgttatattcttttgctccggagcatttgatattttataacaatttgcaggtggcgctgcatttacccgtagccatataaatagttgtaattatattgtatatatatacaactggtcgtcacttaatttgatctgtagataattttgatacacaattttgtttacaggtctttactgatcagtctctctgcctaaagaggcagaactaaccgtaattaacggacgacccctatgagtggaggatccacttggcgcgacattagttcatggtcatggcgcattatatgacccccgaagggtggctcccgaaacagccttttttgatggtcggaaatgtacatgaatttatttatgtgctgagtacggacatcgcaccctccaggagtattggattattcgagctacctgacttagtatggtcacctctttctcaatagaaattgcatacaagagggtaagggttcatgacctacattatgttttgcataatgataccgttccgataccaaggcattatttggtggcaacatcattagtgctaatgattacctgtgccacaccgtcgaacgtgtgaaattatcaggaggaatctggggggacctgctgtgacaagatagttggggcgactttcccccgactcttcttgttactgcaggtgcttcaattcgttgaagcatttgcggtaacaaccatctctattatttc

SEQ ID NO: 244 - DNA, 956 bp, unidentified
  source 1..956: mol_type = unassigned DNA; note = unclassified Allexivirus sequence
gtttacagtgtggtatattgataacaatgggaaacgagaatgaacaagacacagatccaaaacttgcagggcgaaaaggcactagaactgatgtaaacagccttgtccacacagaggagcaactcagggatccaaactacggccgtagacaagtgaatgacgttaatgtctctgaacacgattcttactctgaacttatgaagaagtacgaagatagattcaacaaactcaaagaaagctgcttcagggatctttcaagcgtgtcgatttcaaacagtggttgggaaactgggaggcccaaggctgtcattgctgacaatctaaaaggcgatgctgctaatatcttcacaaggccttcgatcgatgcattgctcgttcgtaatacagtacccgagtcaaataacatggccacagctgaagaattggccagaatatcagctaaggttcaagcactgggagctcctgaagaacatttggcagaggtcttttgggacgtggctaagtattgcgcaacagctggcagctcgccagctgtcaatccccagggtactattcagcttggtgggaggacaattacaagagacatggtgttcgctgttattaaagagtattcaacactccgtagagtttgcaggagttatgcacctattacttggaacaacatgcttttaaacaaccaacctccagcgaactgggatgctaaaggtttcactgaagacaccaagtttgcagcatttgacgtttttgatgccgttactaataaagctgctattcagcctctggaaggtctaattaggcacccgactcaggctgagcggattgcatatgccacccataagaagttggctctggaaaagagcgcacaaaatagcaggtatgccaacacttcggctgaagttactgggggcttgttcggctgttcccctcgcaacaatttccgtgagagtcgatgttaa

SEQ ID NO: 245 - DNA, 959 bp, unidentified
  source 1..959: mol_type = unassigned DNA; note = unclassified Hypovirus sequence
ttccaaaggatccactttgggaccccgcgttaaggtactatgattttgtacttacgtctcttggacgaccttaacatggtttatactctgtcgagttgctggtttcagtaattcagccacacattgtggttggccagcaggcggagtgtgatccagcttgggtgcaaccttcgttagctaatcgcagtagctaacctggggtgccctaaggccggaggaactcgttggttaagaataacccatttatcggtttcacaagctatgtagcctagatgatgttctcatcctacgtaaaactatgaaacgcgcagcttctcccacccctttagagagaggggaattggttgggtgcctagatcccaggagcactgagtagtgcactgtagctgatgttagacgttggtgtgaccatctgacattgtctctagccatgtccatcgaggttggcaacctaatgaggcctgggatgccttgtttcgcttctgacttcgcgatcagatcgttgactgagaacagtcgattaaacagcatgcattcttttgggtagatgtatgaaggtaaaagccgtaaagcgaccctcctcgactgatgcctttgtgccagcttgagagaactgaggacctggcgaagccagtgggtcaccttcaataggttcatggtgtgtgagttcatctcaccacaaacgttttccctctgtttagagattctggaatcgctagccgagaacggctgcccttgtattgctttggttctggtttatacgcttgagatcgtggaagttctcaaatccgaaatcaacgtgtgtagcacgaagacgtggtgtgcttgcacaagtcttcattctcaaggatagctgggttctttactagggcaaccccctagagccagccggttcggcacaagaacggtggaagatgtgggatgaaaactcctagcatcagaagtgcacttccatagat

SEQ ID NO: 246 - DNA, 993 bp, unidentified
  source 1..993: mol_type = unassigned DNA; note = unclassified RNA viruses ShiM-2016 sequence
atgcagtgtgttttacacactgcatgttatgttttggagagaaagtatttacgatatacttggatcctccgcttgattgcgtcggatcctttcatggtacattcactgcgagacataatgtaccataggaaggaattcgcaacatgacgaaggaagagtcaatttcgtggaatgccaattgatattacaattattttcatacgtctgtaacacgatacgtacaacccctaacttaatcgtaggttaccaacgcctacttcactgaatttatccacaataattcagtatttgtttagagtacctcaacactctatgtgtcgaagttgagacaggtttttaagtttgctctctgtatggttatttccgacagatgagcttacaatgcgttatgaagatgctatttttcctggagtcaatagtcgatgtcatttagacgtcgtgagatttataataaaaatgttagtcgtagctgctatgtgaaggcgtacgaccgaatgtttgaacgagattatcaggtttacttgatttatctacacttttgggcaactttgttgccatagcctcattttgattgtcgaattttgagtttgatctaaagattagacattgggactgattagtaaagaaaagacaagagttgatgggaattaactcgggacacgtcatacggtggacgtgaacgagttgcagggttctcatgatgtagagatacgtcataaaagggtgtggcacctcaaccacacttcgaaagctatcccctaagtgcatgggatgatatatttaagctgtttatgtttgcgccattgccatcgcttttgagccattggtggtaattcgcacattcctctatacagtggagattatttgaacttgtacattgagaagcgttacatactgtttgttggtcacggcagatgtatactcaaactttgattgaacattggaagaattgtcgaaatttcggtgataactcatgatttttggtgcttggaa

SEQ ID NO: 247 - DNA, 1000 bp, unidentified
  source 1..1000: mol_type = unassigned DNA; note = unclassified viruses sequence
tttgacaaaaaaacctcaaaaagtgcagctactattgaaaatcataatatacgctcttgcagggattggcttctggatatgactcaagtgttttcaaagagccaattatgcactaaatttgacaaccgatttaggtcggcaaaggcagcgcaaacaattgtttgctttcagcacgcagtgctgtgtagatttgcgccttatatgaggtacatcgagatgaagttgaaggaatccttgccgaaaaagtattatatacattcaggcaagggcctagatgagctgaacgattgggtcatcaagaacaagtttgacggcacttgcaccgaatcagattatgaggcctttgatgcttcacaagatcagtacattgtcgccttcgaattagagctaatgaggtacctcggtttacccaacgatttgatcgctgactatgaattcatcaagctgcacttgggatccaaacttggatcattcgcaattatgagattcacaggggaagcaagcactttcctattcaacactatggcaaacatgctctttacttttttgaggtatgacattaagggcaacgagagcatatgttttgctggtgatgatatgtgttcatcaaagcggctaacagtcaaaagagaattcgaaagcttcctatctatgatcaaactgaaggctaaagtgcaacatactaaaaatcccactttttgtggttggcacttgtgtccagaagggatttacaaaaaaccgcaattggtcttcgaaaggatgtgcatagctagggaaaccaacaatttacacaattgcattgacaattatgctattgaggtttcctacgcttatcggaagggtgaactgattacagcaagaatggatgaggaggagctgggggcatattatggctgtgttcgaactataatcaaacacaagcacctcttaaaatcagatgtcaagaagttattcgaaggtgcaacgatgtgatcttaggttgtagatatttaaattgaat

SEQ ID NO: 248 - DNA, 1000 bp, unidentified
  source 1..1000: mol_type = unassigned DNA; note = unclassified dsRNA viruses sequence
ttttcgtttgaggtacgaaagacgatgcgagccgaaagcgtcacttagaaccttgtccgttagattgattttgataacccagaaaaaacgtgccacgggtaacaacacgctaaacaactggaatctgctttacagtcaaagcagcaaagaccagcgacctaacacctttaagaaagaccgacttgtgctggggaaccgcctactcagcttttcaccggaacccgaagccttagcgattttacgaatcgaacgcgctactgaacgatagtgctcttttccaactgcgtatgagcataatgacgcatgccccaaagcgtcaatctcgtatcgaaacaaatgactcgagacgggttatcaccaaagtgacactaccacttttgccttagatgtcccaacagagaaagatagcgtgtaaggggcggctaccaccacaggatatagcagccgcaggtgttcgtcgccgggagacgcgccttgctgaggaccgaacgacgaaataaagtaggacctgactcgtctcgcaatgactgttttcagatgccgtggacttttgacgagtctcgcgcgtatggtccgaacgcggggatcgaaaggagccacacgtatcttgcattggtcttacgcatacacgtaatactaccatctattggtcttacgcatggagatcacacgtaacaccgcatgttgccgaggcgtaactctcggtgcaaggcgtgggtgagtggccggccgaagcctcatcagtctcgctgcgctaaggcaaacgacggactggtgtgagaaagggaggagagagggatcctgagtaacgacagactacggtaggaaggaatgtaagggtggggcttaggaacgaatcgaaagcccgcggtgtggaaacttggaggaaagaataggacttaggacgaatcgaaagcccagggtgtggagttactcactacctccccgctactacaccgccaaggatgttggatcgttcctgcctcaggcaaggatcggt

SEQ ID NO: 249 - DNA, 1000 bp, unidentified
  source 1..1000: mol_type = unassigned DNA; note = unclassified dsRNA viruses sequence
aagaaaatgaagactgtggtcattttcttccaccaacctcactctccctacggggagtgttcaggctggtgttcaaaatcacagtacacacatgcttgaagtgtgacaagggcgggctccggtccgcggctaaactttggccgtactctgtattacagtttgcctaagtatgctgatagctcaaatcgggaagtggtttggtggaccagagcccgttattcacacaccacacgatccaggacggctctggctaaggcgatccaggatgcgtataaacccactgccaattagctgaaccgccgactaggggatccgcgacatcgtctgggcctgtagcgtaccgtcatcactcttttaaggtacgcgcctgtgtctgggccgtcaactgcggggctggagcttagcgtctagctgcggcgttagtctgttttactgtttacgttgtaggcagtactaagacacacctcctaattttacacttttccaacctactcagcttgccgctttggttgggaagttcttaaaatgagctcctattttatagagctcaagtaacttttgtgcttataatccatcaatgtctcaggctgacaataaacgcggctccggtacatcggcggcgtgtgctcccggaatcataattagccgcaaatccttcctgtttggtcattgtgaccatccattggggtaactctcttttgaggggtgtggtcaaggcgaactcggatagctgaagactgctaacgtagtgcacatcaccgacttgaagatgtgttcgaacgtgccagggcacagcagcttaggctggcttccttggtggacagactgacacccattggggacctcttcctcacggtaagcgctcacgctcaacttccttcgacctgctatgcattcacatttatgtgaaataagtctccgctaactgaacgaaaccgagatagacgaaacttatttggtaagtccgcagcaaacagtcgcacgggttttaggcccgtgg

SEQ ID NO: 250 - DNA, 1000 bp, unidentified
  source 1..1000: mol_type = unassigned DNA; note = unclassified dsRNA viruses sequence
ggccaaccattgatatcttctttaactcccttggctgggttacagctgggatatctaagtgctacccaccatacaagcatgccctcactgcgggagcagtgcttcagctagttggccgcctaactggagtagttacaggccctttaaggagtcgggtcaccccttatagtatacagacccgtgccaggtttaacgagcctggctactactagttgtgtgcatggacctccgcaatcaatgcattctatttcctgcggctctaatcggtgtgactaaccgttggagtataaaagtcgggtcacatagtactacatctggccgcggcgcggtatcttgccccacacttattatttaccgccgtgcttcggaattacagatcggagaggcttctgcgctcttctgtgcccctcaggagtgagatctaactatgtctcatgtgtagttaactactccgcgtactctcattttccacctctgcaagaaaactaccagcggagggagcagtgaataaattgagctgcacgtctcgaggaaagccgggacgttaaactaggcccgcgcatcgaaggcgctcaacatgaggctagcttcggcaaaggcttaaccgttgcaatcaccccgtcgcggcctgggccccgggtcgcgattcgccagctgctggttcatcatgcagttaggggccccatggaatagtctatgcgttagcatgcggagcacttagtcccggtacagttgacagtaagtcaaagggattgctcttagcatgtggctggaacgggttttatgtccgtgcgaggagtgggaggatccccacccgagtgtaacgactgcgaagtcttaactagcgtgtaggaacagtctctctcgaagtgatgactcgaggggtaggccaccgttccaatcttcagtggtgtccttgcttataggcgtcactttaatcccaaaaatttctaagcagagagtagtgttagtagcattattctcgaaaccaaatttaaaa

SEQ ID NO: 251 - DNA, 1000 bp, unidentified
  source 1..1000: mol_type = unassigned DNA; note = unclassified dsRNA viruses sequence
gcggtttaaggagaagtgccagactctggacgtttcctcacacgcacgacaggctcggctgttgtgcgtgcttatcaaaccgagactctggtgcaagagggcttcttgtagcaccagcgaacgctagtggtggtgaagccagttcttatttgaatggttggctgacgagatgagaccggcgtacttgaagcttggacctctggtaagaggtgataaataactactcgcagatccctggcgtcagttcagtgggcaggaaggctggaaggccttgtggggtttatcgtcacgcagagcggtttggctcgctgtggccccacactacgcactctaaggtctcaataccgcgtggcgtaggccagcttttatagcgatttatctcctgaatactccgagcttcgagtttcggaggttggagtaaatttagcgttacctccgcgggcggcacgcggtttagcaaatatgcctaaaactggacctcgcattcaatcaggtgcttgcgagtcgcctaacacgtgggttgaaccttcgggatcccctttaccgccgcgaggtggagtgtaaccctgcgccatagtgactcagagacagaccctgccccttcaccctcaaaagtgataccgcgggattctggtgagtggaacgggaggtggaatccgcaaggcccaccacgcttgtccgtgcaagggaacacgcttgcaacttggagtgccaccgcgtaggcggcagacaggaatttattctctgtcgttcggcgatatcctaatacagttgtaatgcagtttccgagtgtaacgactgcgaactccttattctgagtaactgaacagtctctgacccaggcctcaagtgggcatacagtggggagggtgctatcatggctttcctttgcggatcgtcgatttcttcggttatttattagccgtcgtacaactcagaatcgtcctctttagagacggggtagcaacctagatagctatatattttctaactcacaaaa

SEQ ID NO: 252 - DNA, 1000 bp, unidentified
  source 1..1000: mol_type = unassigned DNA; note = unclassified dsRNA viruses sequence
acgcttatgctggcatgtccctagtgccggtagatttctcaccagttagcatggcagattacaaacccgctagcaacctcactttcccatccctcactcgtccgagcgcagtggatacaagcgacgtcgctaggaacccgcgagtagctagctctaaacgagctcctcgcgctgcagcttctgatattttaaacaggtttaaagagtttaacgcaccaccaccacccgaacccgcgcccgcacagtatgataatgacgcgccggctgcccagctgagctacgaggctaaataccccgttgaacaggcccaggttccaggtgatttcaaatattaccaacctgtggtggcagaagaccgagtacatgtggaacctgctgcagcgcctgatgcttacgatcgcttatctaagcaacaactgaaattagcgatcgaaaacaacatgcaactcttggctaagattcaaaactcacctattctaggtgagttagatttagatgctgaacgtaaacgccaggatgagttccgtcagcttgaagccacgcgtaatgcgcgaattcaacgcaggtctagctacgtaccttttggtcctgctcgtccacgcccggtgctcagccctcgctctacgccgaacaaacctcctgtcgtgcatggcaaactctctgaaaacgaagttaaccatgcacctgtagaggttaacgatgctgctgctgaacaggttcagcgtgaagttcgatctctaggtcgaccgataccaccgcctactaccgcggatccttttgccactctcgctagtgataagcgccgcccaggcacttattatcagaagaatgaggctactctcaatttcgatgacttggtaaaggagcagctcccagcaactaactttggacatactggcgcggacgttaacgtgcaggatgggatggcaactgactcactagcgaaaaactagtgtggaacgttgcttattaccgctctgcgcgtaacgttctcgccagt

SEQ ID NO: 253 - DNA, 1000 bp, unidentified
  source 1..1000: mol_type = unassigned DNA; note = unclassified Hypovirus sequence
ggcgacctccttccggcacgtcgtagacggcgaccggattaatcaatacagctagtacttctcagcacgctatagcgcagagaacaccaggggacgtcagggagaacgaagcacgtcgcgacctcgcgaggtttctacctccaaggggggctgcaggctaaggccgtatgaacgttgtactcccgcattttggatagatactgatcacgtgcgtccagcgaatcacgagatccctcgtccctgtagacgttaaatggcagcgcaggcggcgacaccgccctttcggttcttactaatcaccgcatccataaaagcggagataggcatgggtgtccaattaatcagtatgagatgggcagtgccgatcgctagcggcccacgggtctgacgatagcgttccgaaaggaaaagggctgatatcagatatcagatatataggccggcccacgtccgtagttccggctgtgtgcaaaccggtggcctagcttgggacttcgatcaccccaatgacgccatgaaaacgattcatccaattcttgctgtgttaacggtttatcttgggcgatagagccaactagctaagatcgtggtgaaatggttcgccttcgtggatcctcccgacactgtggtttcgacaccacaggtgctttcgaacttgaacttttatgcaattaccggcgcgggagcgccacattttggagtcgagactaagattacatcagttctatatgacgtagccacagagagcttgcgcctctcgcgttggacagcttatgccagtgactaacgatatcagatgaagctctgcgggatcttcggtgaaccaacttctttacctgtacgaaataaagggatctgtacctcgtcttgcgtgtctgaacgggaccgaaaatcgacttctaatgtagcagtttgcgtatggaagggatggcttgatagtgcggtttggaggtggtagcgtaggttgaaagagttctagggaacaaaacctccatacaat

SEQ ID NO: 254 - DNA, 1000 bp, unidentified
  source 1..1000: mol_type = unassigned DNA; note = unclassified Nodaviridae sequence
taagttgggcgctggaatagcgaaatccattaaagaaacttatggtgctcctaaatgtagagcgccggttggttacgcagcagtgcaatctactgaagacggccgtatattgcacttggttaccaaagctgtgagtagtgttccagctattaaacagaggaatgcatatactaagttcacggctgccctcttgcatgcttgtgaattatctatttctaaggaaataggtgtgccgaacggaataggttgtggcttagacaaattagatgcgaatatagttcggaatatactcgctgaagttggtcacatgaggggtaaggtctttgtaatttacaataatgcttaagtcagctattgatgtagcatttaaagctgtccgtgcttcagctaaaagtgcgttgacggcttggagagtgacgcctaatccaacgatggttgttgctaaaacaaaggtcggatccttggtccaaaccgttgccttagaactaagacaaagagcaatcaggcgcgaacatctaaacttatggaagcatcgcccagttcagccggttggttatataactgccatggtgcccaggcccaccctgcttaatagatttgttgaacatgtcttaagtaagttaatgtctgctataagggttattaaaacctatacatttaggttggtagcattaacagggacgggactttactggctcttttcaaccctcattcaggggccagcagttgtagttggtggcacctgtagtagaatatggcaagcaattgtcaggttctattataggcttaaagcccgatttaaaaggagtaagattaaaggaaccaatcggttcagaaaattagcgtcgaaggctgattataggataagagcagcatatatactctatcgagttaccaaacatagagttgctgatgcagttcaattctactccaagaaactggcgcgtatggcttgggacaagcaagcatacttttggtggacagctctgggagcagaaac

SEQ ID NO: 255 - DNA, 1000 bp, unidentified
  source 1..1000: mol_type = unassigned DNA; note = unclassified Vitivirus sequence
gtcctgagattcttcttgtggcctgaggagttaatacaagagtacaaaacactgaaactcatgatgggttgctccatgggagatctggcaataatgcgattctctggggagttcgggacattcttcttcaacactatctgcaacatggccttcacctgcctgacatacaacatcaggagggagacccccatttgttatgcaggggatgatatgtatgcgcctggagcacttgtggttagaaaggattatgagaaggtgctgggtgaactacagttgaaggccaaagtgaatgtcagttgttcaccacttttttgcggatggcggatgagtccctacggcattgtgaaggatccgaatctcttgttggatagatggaagatagccaagttctccggaaacctcgagaactgttttgtgaattacgcggtcgaggccatctatggatacaggttaggcgagatcctctatgacatcaatatcgatatcgatgcgcagcaagaattggtgagagagattgtgctggttaaacacaagctgccagcggccatagctaagtatttctctagcgacgtcaatgaagcgcattccgacggagaggaggtagatctacatctgagccctgaaggtgaactacttgattacactgatgccagagggagaggtggcactttttctaagtgggtcaaaggaaaagggaagatcaggtgaggaaaaaataaattaaaaccgaataaaaatagaggtgtgtagaaggttacttagctacggggtaactgctgacctctttaagttaggtgtgaataaaaacctaataatatagaaaccatcttacgtgtttgtgacttgttactgtctgattacggattgaatagagagagcgtagtgaggttactctcagaagtggacgcgaaggaagcggggaaaccggctctgagtttcaagagcctgatttgcaatctttgccgtggggtatcgccttccaacctgagtttacgaacga

SEQ ID NO: 256 - DNA, 1000 bp, unidentified
  source 1..1000: mol_type = unassigned DNA; note = unclassified Polerovirus sequence
ctagtagatcaattggtagcccgggttctgttccaaaaccagaacaagcgagaaatcgctctttggagggcaaatccctcaaaacccggttttggcttatctacggatgagcaagtgctggagtttgtacaggctctggccgcacaagtggaagtctcaccagaagaaatgattacctcgtgggagaagtaccttgtgccaactgattgctccggctttgactggagcgttgcggaatggatgctacatgacgatatggtcgtccgcaataaactcacactggacttaaatcctacaacggagaagttacgatctgcgtggctaaaatgcatctgcaatagtgtcctgtgtttgagcgatggcactctcctcgcccaaagggtccccggcgttcagaagtctggtagctacaacacaagtagttcaaattcaaggatccgagttatggccgcctaccactgtggggctgactgggccatggcgatgggagatgatgcccttgaatcagtcaacaccaacctagaggtgtataaaagtctaggtttcaaagtcgaggtttcaggacaactggaattctgctctcacatttttagagcgcctgacctcgcccttcccgtgaatgagcgcaaaatgctgtataagctcatcttcggatacaatccgggaagtgggaatctggaagtagtcgcgaactacattgccgcctgcgtatcagttctgaatgaactgcggcatgacccagatttagttgctctccttcactcgtggctagtctctccagtgctgccacaaaataattgaagagagagccgataactagccaagcatacatcagttgcaagcgttggaaagttttagtctgattaccaacagcctgacataatagattataaatttttagcaggatttgcgtttggattcttatccgcaatcccaatttctgtagcaggcatatacctagtctaccttaagatctcagcccacgttcgcgcaatcgtta

SEQ ID NO: 257 - DNA, 1000 bp, unidentified
  source 1..1000: mol_type = unassigned DNA; note = unclassified Metaavulavirus sequence
ccccagattatgttggcagcacaggcaaccaaagtgcagtgaatgtccatctggatcattctggattcctgggcacagaagagaatatgcattttccacaaataatggcctcacatacctctccagctggtgtaacccagtctgttctccagtcagaacaaatccaagagtcgagcaatgcagatgcggctattgtccatcagtctgcatcctatgcagagacgattcttcatagtgattccatggtgctgggtcggcttgcgaaaattgatgaaaaattatcagagattatgaagataataggaattataccatctatcaagaatgatattaatcagctcaaagctacaactgcccttcttagcaaccaacttgcagctattcaaatattggacccagggaatgctcagtgcaaatcactgaatgagatgcgagctgcatcaaggagtgctactgttgttgtatcaggcccaggagaactatctccacagttagtgagtgataaacttatatgtaaaaatgagctgggccaaccaattcccagagaggaatatagagccagtcaaccgaccaaatcatcgcccaatatggttacagatgctgagctagagagtttacaagcactcattgagacactggtagaacctgggaaaaagagggatagactagtctcacagctcaccaaagttaagactaaagatgattggaatagacttaaacgcgcaatctacaattcataactgtgaattcacgcctgcaactggaacattataaatgcctgacttaacacattaatccctataatcaccttacgctttaagttagctagataggatccttttcttgataccatttttctctctattactctctgaccttaccaaattataaatgtctctgagttacacgcctaatctcctgtacaattaataaaaaagaataacttgggggcgaccctatccacaccggcccagagaccccacagactcccaaactcacc

SEQ ID NO: 258 - DNA, 1000 bp, Mossman narmovirus
  source 1..1000: mol_type = genomic DNA
ataatggataagctcaagatcctagatgagatcaagcatgatgtagagagcatcaggaagacagttatgaagcatagtctgtctctcgcaactctggaagggcagttgagctcggtaatgattgcagtcccttcaactgggtcccaaccacatcaagtagaggtgaatcaggaccttaggcccctgcttgggcgagacaagggaagagggatccctgaagttggaaaaatgaaagtccaaacagtttcgtttgatgagcccaatcaatcaaggagtagtcgtgctcaactgccgaagattagagttgagcttgataagaagatactccctcctccaattgactcaagcaaaactaatgcaacaggatacaaacctgctcctactctaatctcaaaggaagtgatcatagcactgattgattctcggattaaggacaaggatatgaacactagaatgaggaggctacttaatacagccaagacacagagagaactagtggagatacataaggcaatcatcagtgctttaaagaatcaaggcagctaagcaacagtcagtttccattgggtatcaggtaaatttgatacgacattgcttgatacaaaactaaaaagtcaaatttagaatattcatcttagactacattagccctataaagtcagtagctcccttaatagattattggatacactccttagggtgatatcagttcaagataagcttcaaactaactcaggggtttatagaaaaatcggctggtattgacttgaatatttaaagatttctcaacatgttttcggtaataaagtatagtcaaccagcaccacaagtatcgtacttttagaggggatgatctttacacttatcaaagaccagaatactaatattaatctagtattgcttagctaaattagaccttaagatacatgcaacttactggccgctaatagcatattacaaaaaacttaggacgcaggtccatccctttactccagcaacc

SEQ ID NO: 259 - DNA, 1000 bp, Rinderpest morbillivirus
  source 1..1000: mol_type = genomic DNA
tggtgccgccgatcccctctcaggagaggccaactgcatcagagaaacccattaaaaagggcacagacgtgaaatcgacctcatctggaacgatggccgagtcttcatcgacaggtggtgcaacccgacctgctctaaagtcacagtggggaccgtcagggccaaatgcatctgcggagaatgccctcgcgtctgcgagcaatgtatcaccgactcagggatcgaaaacagaatctggtaccacaacctcgcggatatcccagagtaacattgagcctgaggatgattacgatgatgagctgttctcggatatccaagacatcaaaacagctctagctaaattgcatgatgaccagcaaattataattaccaggttagagtcactgctttcgctcaagggagagattgattcgatcaagaagcaaatcagtaagcagaacattagcatctctaccatagaaggccatctctccagcgtcatgatcgcaatcccgggatttggcaaggatcccaacgatcccactgccgatgtcgacatcaaccctgatctgagacccataattggtcgggactccgggagagcccttgctgaagtactcaaaaagccggcctcagaaaggcaatccaaggacactggcaaattagggatcgagtccaaaggcctgttgaagaaagagttccaactgaaaccaatagaaaagaaatctagttcggctatcagattcgtcccggacggcagtgttgcatctcgcagtgtgatccgttcaatcatcaagtcaagtcatctcggggaggatcgcaaggattacctgatgagtctcttgaatgacattcagggctccaaggatcttgctcagttccatcagatgctggtcaaaattctaaagaactagactcggcacaacatagctgatctcctcgcttcccctcagcttagctacagcttgcatgctcattataaaaaacttaggagcaaagcataacgcctcgcactcccaac

SEQ ID NO: 260 - DNA, 1000 bp, unidentified
  source 1..1000: mol_type = unassigned DNA; note = unclassified vectors sequence
atgttcctccgcccccgaaccccagtagggccagcacttccgagacacccattaaaaagggcacagacgcgagattggcctcatttggaacggagatcgcgtctttattgacaggtggtgcaacccaatgtgctcgaaagtcaccctcggaaccatcagggccaggtgcacctgcggggaatgtccccgagtgtgtgagcaatgccgcactgatacaggagtggacacccgaatctggtaccacaatctccccgagatcccagaataatgaagaagggggagactattatgatgatgagctgttctccgatgtccaagacatcaaaacagccttggccaaaatacacgaggataatcagaagataatctccaagctagaatcattgctgttattgaagggagaagttgagtcaattaagaagcagatcaacaggcaaaatatcagcatatccaccctggaaggacacctctcaagcatcatgattgccattcctggacttgggaaggatcccaacgaccccactgcagatgtcgaactcaatcccgacctgaaacccatcataggcagagattcaggccgagcactggccgaagttctcaagaagcccgttgccagccgacaactccagggaatgactaatggacggaccagttccagaggacagctgctgaaggaatttcaactaaagccgatcgggaaaaaggtgagctcagccgtcgggtttgttcctgacaccggccctgcatcacgcagtgtaatccgctccattataaaatccagccggctagaggaggatcggaagcgttacctgatgactctccttgatgatatcaaaggagccaacgatcttgccaagttccaccagatgctgatgaagataataatgaagtagctacagctcaacttacctgccaaccccatgccagtcgacctaattagtacaacctaaatccattataaaaaacttaggagcaaagtgattgcctcctaagttccaca

SEQ ID NO: 261 - DNA, 1000 bp, unidentified
  source 1..1000: mol_type = unassigned DNA; note = unclassified Nidovirales sequence
tattgaaaaactctctctttttcaaccaacttaaccagttgtttgaccgcctgcacagtgggcacttgagtatatttttcatatccccaaacagtttagatccgtccaattattaaacaaacaaaacaattgaaatattttatttttattggcagagtagttaactgcttgtttgtcaattgtgtaccagcacaccaaccccttgccaacctccactcagagcccaggatatccccgaaaggggcttcctgctggtgtgagctcttggccccacccctctcaagactcgtaaaacagtctctacccagatattctgcgaaagtagaaatcactcaatctttctcccatagctacaccgagaacaggataaccccgaaaggggcatcctgcgggtagctctctgagcgtgccagtagatatcttcaccgactctgctgggcgtatcggaaccagtccgtcccaaagtccgcaaccatccaagtagctcgaacgagcgaaaggatagggagtacctccttagtaggcctcagccgaaaagggtgggaaacagcggcgaggcccttgtggcctgaccgcagaaacgacctggtagtcgcttctcaacaacagacccgactggatgtgaaaacgtccgatgtggtcagcttgtaactagctatatacttggatatccctcacaaggggactccaggggggaggaactgacccctcccctaggtatatagtaagcaaaaccaggggcgatctgcgaagacacccttcaccacacagccggagaacgctgagtgaagccaagaatcctgtccagcgtaagcacacagggacacattcttgaagaatacctcataactagcttaaggcggttatttggatccgaaagctgaccaccgtcactttcgtggaattctatctgacaccaacacagtcggaaggaattattacatttcaacccccaaaagggaaggtgcaagaacacagcacgaacaaaaattaactaact

SEQ ID NO: 262 - DNA, 1000 bp, unidentified
  source 1..1000: mol_type = unassigned DNA; note = unclassified Picornavirales sequence
aaatccagcatcccccctgtggccccgcgcaggaaaggggataaagcgttagaaagtccgctttgttgacacacgtggataggttgagtggagagatatagccacttgatcgaatgtgttgaaagacacgctatgtatcactgacccccctaaggaatccagccgagaaactggatatcagtacgctcttttcaaaaaagagcaagaaagagagaagaagcacagacaatttgttaatagcagacccgctaaggttttcacaaaaacaaatttgaagtccgctaactctaaatcagccccggttaccaaagatccagctgttaccgttttgaataagaaaaagaaacacaagtttgatgataaagttgtcaaaactgtggatccttttgatatacaggatgaatcagaggttcccgtgattaatcctaatgagaattatgaagaattaggtcttgaaattcccagtcgccaagaggtcgttcccgaagaggtcatagctcaagaagcatttgaaaccctagatcaaggatcttgggatattgtacaagagtataccaaaactcaagaagatcttgatgatgagaaagtttttcttgaaagtttagccacagttcctcttacacctgttgaagaagataagaattatgaacctgaaccttttgaatatcaccctaactggagtgatcagtctcctgaagaggcgccaaagaaaccaaagttttcttttgagcctgagaccgtttcagattctgaagtcaaagaagagcttttaactgttaagaaaaagtctaatcctggactcgtagcttatagaaagaaagttgaagctcagcgcaaacaggttagagatgatcgccgtgaagagagagctcgtgccactgaatcagatattcgcaaaagtcgtgataacaagtacttaggagatcgcgagaatgctgaattcaatttccgtaacctgaagacaaagaagatacggtctaggacaaagaacacgactctt

SEQ ID NO: 263 - DNA, 1000 bp, unidentified
  source 1..1000: mol_type = unassigned DNA; note = unclassified Picornavirales sequence
tttccagagatttgatgccctttggtctaatttgagtattgatttgtacctgcattcgcagggtgggtttatcccatgcaccccgggttcattgagttgatttatcctcattgttcccacccgtttttgttgacccgtctgattttgattagttagcattgccacccttgccagaggttttctggtatttctgcactattgtatcattcatgctagtttgatagtagtgccccctgattgaggaatgatcttattcctaccttcaggttcacaccgcctagtaataggcctattgactcactgtaaaaggaaatgtcgtacataccttgtgatattactgattaagaagctgcgttttggacacgcgagaaagtccagaattagtttttgaccattgttttgtatggggaaatgaccccctaggatccgccataataaagtgacgattattttaaaggagttgtttgaagcctcagtttaactgatagctgataatgacaccatcctgtataacttaaagaatatatagcgccccgtgaaactactcgaatggtgaatcgagaacgtaccgggggttagtattaacgccttattccttgagatgtgtcaggtagtgtttccgtctgccgcccgctataggaacgcgaggttaatcccttgcatacattgccccactactcaactcatagagtaagaaaaagacgtgagtccgtgtttttactatgtctatctaggttattcggtacttgatacgaggcaagagaggcacaggccccgagtatcaagtataaagctaaagtcctgttataccataatggatgcggcagacggctcagctgttgaccaagtagggttaccaattgagattactgaaattaacatatttgtagaagaattacattattcagtaccgtccccttcacaggagttccgatctttgtatcggcctgtgttggaagaagtgagatttgtgtctcgcttacacgtggaaagagacagc

SEQ ID NO: 264 - DNA, 1000 bp, unidentified
  source 1..1000: mol_type = unassigned DNA; note = unclassified Picornavirales sequence
tggtaagatcagtggaaagcacaacaccgcttcccccgattatgtgacatctggcaagtgggcggatgggagcccctcagaatccctgtctctcttgacaggttgatttttaaatttcccatgccggacgaaggcgcttgcaataagtcaggcttattttcaggattctctttcttctcattcacgcgcgtcctatgcgtagtgagcggtttcgtgaggacccgttctcaggtgaccaccagacgcttgtttggaactatggcaccacctcaggtgtagactagtgaagacagtgtatctctacaggaaacctttggaggaaaagatttgtagtgcacctcttggaatagactgtgaaaacggttgagaccaagagctctgctatgtaaagaggctgtggagcaacgtgtggtaacacacgccacagtggccaaaagccaagtgggcagaaactctcttctaatatgctgtacccacggcagaagattggagagcaacgagttcaccctttacctccgcttcggcggctgcaatcctagtaacccaattgtggaatgtaccgacgaactgcctcaagctgtctgcattggtttgtgtaggaatgctatgcaggtaccctggttacaggatctgagcataggctaattgtctaagcaaacccaaaccaatttccccttttcttttccattggtgacgaactgcggatgtcgatatggcttcccaggcaattcacggtgttttcaacctcccaatggatcccctagaaggttttcagatgattagagtcttttattcccaaaataatttaaattttgatgagtattgcgcatctgttgtgcgcacttatccagctgttttgcaagaattggctccttttgttagagaaccggatcgtttcgtactcttttgtgctctttggtggcaagccaatcacgatgagggttatgagactgatccagaacccgaaccagaacaacagagttcggatgaagaagaacca

SEQ ID NO: 265 - DNA, 1000 bp, unidentified
  source 1..1000: mol_type = unassigned DNA; note = unclassified Riboviria sequence
tcgcgttacagccttccagctccgccgaataacactcattataagattcctcccccggcttatcctagttctggggttgtcctattccttttgtttttccttatcactgccatcccagtggtactttacttgtgatacatcattatgtctatcctgtaggagaatttccgaaatcattcacaattggagaaactgcatatacactttttcatccatcgttgaagattacgatgtttcatcctcgtcggtttttctaagtaggagatactctcaattagatcatcatccactggtaagaatgcatatacactttcttgccttctgttggagatgaagggtttatcatcctcatgaaagtgacttttagagatgttcactggtatttgtattccgtggaagacactgattgtctttcctttctctggacaacccctagcactacttttaccggtgcggaggagttagaggttaattcgaggcgtttattattgtccgcaatgacgttaaactattaatgattcttatattaacgatttataatacttaatactgtaatacatttaacactacaaccgataactatcggtgatgggaattagagtcaacttcgatcttgaattgaagctctgttatctattccaatgccgctactctcccggcacgtaggagaaacacgggcgcatggctgcggctcggatcactattcactttggattttgatttaatacatgatttgctgttcccctgggtagttcccagtagcggagttggcaatgataacagccttagatggagcagggatgtagggaatatgttcgggtgaacctcaaaaggggaatctcatttaactaggttaaaatgacgtgtgggataacaacgtgcccactaaccattatagttatctaaataaccactatcccgtgcaattagcgcatgccctaaacgacgttttccatccgtgtatagagtggatcccttggattgagatctcaacaatctc

SEQ ID NO: 266 - DNA, 1000 bp, unidentified
  source 1..1000: mol_type = unassigned DNA; note = unclassified RNA viruses ShiM-2016 sequence
agttccggagaaggagcactgtcggaacattatataataccacgcttcacgtggtcttgtataccggcattgtgaataccgtaaacctcttcaaggtacctcagtgtttgaattatttagctgaggataaattttcttaaatgagttgtcactgtacataatactcttcaagtagtacatacctcacgtaatttagaaaaggtgtttgaattctttaaccttttcaccttgaatttggcttaatcaatcatgtggatcttatgagcacggatcctgatgctgaaaagtgagcctagacgtggaggaacctgcaaggcgggtgttctttaaggctgtcgtaccctagctgagacagggggggtcccaatactgtcgaagccagacttttagaacatgtgccgctatcgaagggtagcacgcgggcgcgccctcctagagcgaagttcagccagtaagtatcgattgattaatcgacggtggacatgagcacccatcagtcaataaacaccccgttgggagagagaaacgaacgaggaatggcacacctcacaataaaaagccgttgtattctctttccggcctgggagtctcaaaccttcgaaccaattggttccgctacatatattggggacaattatgtggtgctacatccctcggacctaaggtagatcgtgtttatctacttgatagaacctcctgcacctcagagtgcggtccgtagtagaggcaagagaatagtatagcggtcagaaacaaactggattcttcaaaggtacgatttctcagactgagcagactgggtaaacctgctcctaaaaagcataaggggaaacccactgcaggcgtgaggcatttttcaaatgcctttttcgctaaatgggccatcgacccaactaagtccctcctagaggagctcctcggaacgcccgtaactgaggaggaattccggactttcgagcggggtttgtggaggcggccagtgattgtgccggcgcggtgt

SEQ ID NO: 267 - DNA, 1000 bp, unidentified
  source 1..1000: mol_type = unassigned DNA; note = unclassified RNA viruses ShiM-2016 sequence
cgggatcccgatcccggtgtagttttattctgttatgtggcgaacgataacggatgtataaactttgactcgatatcaaaatagactagatgcctatactcgataattgtcctaacggacattgtttcacccagaagtggtgttatgcagtgtcctattaggacctgcatagagatagtatgttgtaagctccaacctctttgtcttaacgcatattgtttatgaagttcatgctaaaactcaatacgcaaaagatgccttcctttgttgggctgtaaatacgatgaaggaccattcctctttaaaaagtcaaaacgacggtatattctgtacgtttgaataacccgtgtctcacggaaatgtgaggaatgttttctggtgtgacatttaaaaagcacaccagtgcaagatgttaatgatatattgagtggtgtatcatatacttgtatagcttaaagccttcacacgatggagtagaattcgtacgtgtgtcgtataattccagtacattccatattgagcgctccgctcttatggaagtgattagattaggagaactctctacgtggtacggtgcagtactttaaagcacttaatacacggagaactgtatgttcgtgtacgatcttactataggatagtaattgtctcgaaacaaacgacatttttgttgaagattagtatgtgcagattgctttagaatggcgctgccgattggaaaagaaatctgaattgaaacttttgtatgataatgccaaattaacttttggatggctctgcaactggaaaagatgtttagacgacaacttcggttagataatgtctaattacgatctgagaacactattattttggatgcattgtgttgcgcgtttctctgagcgctaccaaagtagtaattgaaacctccttttggagggtagtagagcacggatgtcgcaatgaataacaaaccaaaactttttggtttgagttcattgcgtcaagttctgttattaac

SEQ ID NO: 268 - DNA, 1000 bp, unidentified
  source 1..1000: mol_type = unassigned DNA; note = unclassified RNA viruses ShiM-2016 sequence
aaagggcaacaacaatgtttatgcttatcacaaaagcaattaaggaacgtgtgttatagttcccactttatgtgacctaatgacggtgagcttccgtaagcaagtccgtacatactgaagaatactttgaaagaatctgcaacatggttctctctcgatagtatatatcaggtgacaaacacacactcaacccgattatttcgcgagttctcgataagagaccgcaccaggtcgagctggaggggtgtaccaatccccgcctaacgttgaacttataacgtctgttagtattgttgtaacaaaacaatcctagatgattttggatcctcaatgtatagattgatcacaagagtagtatggtattgattgaaattgaggctatatttaattcgaagattgtagagttcaatatgaaagcattccaagcaggggaccctgtgttagtacgttagaaattggaatcccccgttcagaggtttctgacaaataggatggttgacacatatgtgaatgttattcagttagagtagatttaattttggtacgtgagcagccaactcatgtacaaactgggtcagttaattggaaaacgcaaggagagttttcactgcaatgcagtctagctttagcaggaccaaaattaagttgtagaagactgaatatttacataggaggacgtacactgatggatttaactcgacctctgtgtcgagacggtgaggattaggaaagttccctactacttctcctaggacgccggtgcgactgtgtacgagtcgtacggaaagtgtgatctttagagagcacgaagtttaagtggggcctgacatggtaaagagtctgaaacagttcactgtaaaggtgaaccttggcaagctcgtgatcgatacgagattataaagcaagttcgatgtttccagatttcccttccccgcgccccaccccagaacactcacactttagtcttgtaaattttgaacaagactaaagattattgaaa

SEQ ID NO: 269 - DNA, 1000 bp, unidentified
  source 1..1000: mol_type = unassigned DNA; note = unclassified RNA viruses ShiM-2016 sequence
tttgttaccaaaatatttattcgtgtgttttatttgagcgattcgttagagtggctttcctagaacgccaccctatccggattcgtaaaacctcctagcaggtttcctcgaaccctgttagttatttgtttttacattgcatttattctcgttgatagagaactatcactttgctcgctccacagcgatacgtggatccccgcgcattacgcgcaagggaactttcacttgagtacggaaactttgtattcagatctattagattaattatgctacctatagcttgactataggtgttaaagtcccttcaagaaaactttagcagacgtgtgagactagaggacttcggtctagcgtctattagattctgtcatgaattggaaaagaactacttcttgtttttgattcccgaccccggttgtgttaagtaagatatcatctagcacccatgagtggttaaccccacatagatacagatattaaaattagccggcgaaagccttgagggtttgcacccctctctaagcctccatcaccgcttcatcgcggcgggggttactttttatttgcttctgaaagtctaacttttatttacgctctacttgaagagaaactagcgttcaaggcggtcgtcacccagactgtgactagcattgagagtgcgaatactctctcgtttattacttaccttgcttttgctttgcttattggctacattgttggcctatgggcttggcacgagagcattgtcccttcccaatctggtaaggctgagcgtaaagctcagtgggataaaaaacaaaagaacaagcgtaaggccgctgagaagcgtgccaaagcgcaacaagccaaagagaaacgtgaacttgagtctaagaagaaagtgactttcgagtcatctggacccaagtacgaatctcagtcaggcttttggtttggtgattccaaatggactaagtaccattggaccaaatttttcctgattggcacctacacgttc

SEQ ID NO: 270 - DNA, 1000 bp, unidentified
  source 1..1000: mol_type = unassigned DNA; note = unclassified RNA viruses ShiM-2016 sequence
ctttataatatgtttttcgtgtatacgtcgtttagatgtgcgtcggcagcgattgtcccgtcgcatttataacatgacggtgtagatttactgcaatatttctacatgcggtgtgcaggaccctggagtagtgtatgttctcctttagacctgtgactacgtgagcgtgctaggttctcccttggaattacggttgcgtggttccttgggcgtgcttagccttgtccattggaggctgtacatatcctgttgagttgtggctctcattcaaaagccccggtgttgtgtgttgtttgctcacccggaagccttttgcagaaggcacgtcttcccacagacttgtaaatagtgggcggtgcttcctgtcgtaaccaggatccccctttccttgccttgagggtatcaaggcgaattgtgttgagatccccggatgggtctcctcactcttatgctaccatccaatcccttactgccgcgaggattatgtgcggtagactgggtcctactcctcgggtggggtagttcccttttatattaccacccaaacagttattttgatcttaactccttatttatatatccatttatgatttttatcaattgtgttaatggtttgccgcaattgagttttttgtattctagtggagttttgtgataaatggctgccatcgacggacgtcgatttgaacattaatgatatagtagtgaaaaatagaagtacattgatgttcttgtgtcggacagcaatatttgaccagtatgaaaaatattgtaaataacctttctttctgattggttctgtccggctgcgatacggtgagaaaacctgttccacagcgttgacatcgtctggtgttaagtttttgccatttgactgatagccatctcaattgagatgttgccctactaaactcttttggtcttaatacctggtgtcactgtgagttctgcgagtcaattctcacttacatccccggcccaaccctcctttccatcaaaa

SEQ ID NO: 271 - DNA, 1000 bp, Sclerotimonavirus penicillii
  source 1..1000: mol_type = genomic DNA
cgctcctcacctaccgctttcttgagagtttgttgagccttgttagccgcttcaagctcaggtcgtagttccgggaactcactcagaatccatttgttcttgatcaccgcctctttaattatgcgaagcgctcccatcccgaagtcggcgagaaggaggaacatattcatgaaagataaggcggatcccatccacggccgaccgatcatctgcaccactttgcttgtcatctgagaccggacaggctgatacgataaaaaagacgcgtagaccttcttcaagactgagtcagcaaggaatacagagtcggatacaaaaatctttggttcaccaatcactgaggcaagtgctgcaccttgacgtcgttcattgaacgcagaacgattcttgtcggtaactggtttattaccggctaggtaaagaagaccaaagtaggctccaagctcatcaacatccgtatccagaagagtaagaagctcctctgcagtgacgtcctctgcatcttcgaagttcgttttgagaacagattgttcttctgcctgactcagatcatctctaccaagacctgttatgtcgataggagtagcgcttgatccagtgaagttgaccctagcgttcagtaagattgctgtggcagatgcaagcgctctaatgatgaccgctttatctttactcttcaaaatttgaagcgcaaggaaggcaagagtctcatgacctcctccgtagaccacgttgatagtcacatcaattttcggcagatccggaatttcatatctaacgcgctgatcattcagttcgacagatgagtcgtcccacatactcaattgacccggagtgggtgggatgactttaggcaagtttccagtgttagcggaagacatagttgttcttaggattgaagtagatgaataagattatcgtttctcctagtttctttaaatgtacagaacgacctattctacaggatctgtaggtcctccgtgataagcatactaccaag

SEQ ID NO: 272 - DNA, 1000 bp, unidentified
  source 1..1000: mol_type = unassigned DNA; note = unclassified RNA viruses ShiM-2016 sequence
acctgaatgtgccaaagaaatggtctgggcttaaatccattaaaccacatggatccccaaccactatcaagaaggggtatttgtggctggtgcgtgacgaccagccaaccctggttgcagtgaagttggggtggatgccaggcataattgcacatgatggatccactatccctggggatagtggcgcaccaatcactgatgagcatggcaacattttagccatacacaatgggtatttgcgtgacagtcaggttaatgccgcgttggcgcccccacaagtagttgttggtgggggtgttcaggacgaactggtcaatcttcgtgctacgaaccgtagaaatgaggagaagatgactgagatgttcgagcaaatgcggcagcttaagttgttgtgcgaaaagcatggtatcatgggtgaggttgaacaggaagcgcgtggtgcgagaaagcgaatggtcaatcatcagcggaagccattgcgcatatggagtgaccaagaatatgagaaattattggatgatggattcacacgagacgaacttaaggcgatagccacaaagcgccgtaaggaatatgattactatgaggatgttgagcctgagggttatgccaaagttcaggttaattcacgcgatgataaagttgacaacatgaaatccagttgtgtcagtgagacaacgactgaaaagcatgatcagaaacttgctaaagcgattacgaagtttgagcaagctgttgatggactcaagactgatgtgatagacgagacctaccctgacaaacaagttgaggtcgcgattgatctacacacggggcttgaccacaaacatgttagcgtgactaagacattgggcgatgcaggcaaacaggatttacgggaagccctggctaccattcagaactttatggttcagtggtcagctggggccaaccagcctcgagaggagatcgaactggaaacacggagagtaaaagagcactgccccctatatcaaatggg

SEQ ID NO: 273 - DNA, 1000 bp, unidentified
  source 1..1000: mol_type = unassigned DNA; note = unclassified Riboviria sequence
cggcaggggatgtgagggacagacagtttcgtcaacttcgtgactactctatctcgtccggtcactgggtagtccacatgagatttgaaagaatctaagtgtacgcctttgatccactctctgccattcaaggtgaattgctccgcgtttccctctggagagcccttgcgctgatgacccaatctacggtgcctgcgttcccattatagcttatttgatatgtcgaccacaacgatcccccaatccgagattgatgcggctcttgtcgtactcgccgagtccccctctgagcgccaggaagtagcacccgaaatcgccgaacttgggcttaacgcgatccgtactgcaacaagcgatattgcctggaatggtgctccgctctggatccaacccaattacgccttgtatcgcgatcacatcgcacaattcatctatggagggaagaataaggttcctatcgtgttagcgggttcaacattctgtgatgttgcctatactggggagaaattgcccattcctcttccgattctcgtcattggctgggggaagacgcgcgttgccgaagaagttgcagaacagttcaggaattctggctttaaagattcgatgatccgctccgtcccggtccttgttaaggcgaatccaaccatcgaggacgctcgtcaggctattaatgccaaagcttcccttacctccccctgctctgccgagcatatgaacgtcttcgccttccgccagctaaacacgatcctaaacttggcctcttgtttcttgaagatccaccaatatcccgctttccttgacgaagatgccgtgtccgacttttgcatggctgattggcaacaggttgatcccgatgctgacaaacacaccactcatatggacgttgatgatgagaatgttcgagataagaagacttcaggctggaaggtacctagagattagtacaatggagtttccgaaccgtgctgacctttttgtaattcgctagggattgaag

SEQ ID NO: 274 - DNA, 1000 bp, unidentified
  source 1..1000: mol_type = unassigned DNA; note = unclassified Riboviria sequence
ttgcaagcatgcaattcgctctcctcttaattagaaggggtgctccggggaagacaacgccccggggtgagaaactcgtgtcccataattcaatccggtctgcctgccgccgcccgtgggacgtacctgtagaaggacccaggtattggacagtttgcagcgtggtttttactgagtggcgacgtcgaaaaatgaaaactaaaaatgctccctgcggtgtgtcgtcacctcggatggggcctgtcgtcacttgggggtcgcgcatcacttataagtgcgtggctttgttcgtttgctgcagtccggcgagtgccttattcttttgcctgtccggcctgtgacaggtggaagcctggtgtgcggggacgggacccgcctgaggtgaaggccggtgtggggggggagataggcaccctaagctcgccaagctgaaccccacacactacgagtcggcccggtccggggctgccccatctgcataggggttagtcaacagtggtcacgcgctggtaacggcgtgtggttgcaagccgaccttgtgaatggttgcggagccgagtcgcagcggtactgcgatgacagtcgtctgtggtgtggtgctctcgtgctgcccgtggaggaggtgaagaggtttgagccagccgcaagtagcttgccctcttaccggtggtgcggaaatttcccccttggggccgcccccgcggatgctgtcgcctttgtacataacaggtagcatgcgtatcccatacattacgtgtacgttaatatacccaccccgctggccggattcgtgcgagctgttggccgtagtgcccttgggccgtgcctggcttgtcgtcgcggattccgccagccacggggggctttacgtcgtctctgctaggagaggcggcgtctaaagggatccccttgagtcgaattcgtcagcttacctagccgtggcgtcgccaccgctagcgtgtgtttgcgcacggttcaccgtgcgtgtggtgttcgggtg

SEQ ID NO: 275 - DNA, 1000 bp, unidentified
  source 1..1000: mol_type = unassigned DNA; note = unclassified RNA viruses ShiM-2016 sequence
ttgccgatgttcaagcgtgggaacgctgggctaatgacccgactatcgatgccgcgcaaaaatggcgtgagcatcagccgtggtcgcggaagtcaggatcgcacacgtgcggtggatccaacgaggtttggtttgcaaccgaccatcgagacagagtcatgactttccttcgttatgattatactgtcacttccagcgcgacagtttggattaaagaacccagacctacgctttcgcgtagtatggggcttgacctccaaggtgtcatcccagccgcttgggatttgactgcgttttcctgggcggccgattggtttgggaattgctctcaagttatcaaggctgcaaattgccttttacttgggcccgagccaatgggtggatgggttacgactgtagttcgtggtaaagttaccgtgaagaaaagtccacacccacaagataaacagacagaagtccgtcaccatgagacctttaatgttaagtggaagaagcgtaggcccctagctttttgggaccgcttcccctcgttagagtataggcctaatctcgacccgtggagggtcgttgacatggcttctcttggtataatattctctaaagggcacaaagtgccaggagttatcaaacatggataagagtgcttacaagctctataccattggtcgggacgaggtagtttatgccacgcctgaccacacagtgtcaaattcagacactctcactatgcgacgtacgtcttccaaaaaacgtacagtcaagggaggtaatgttgaacttacgccacagcgcgtaaattacaactttaccaagactattgacgggaacttgatcacgctgtccgtcacaagtacaattgtacctgggactgatacagctcaggcgaagaccttctttagtgacgcgcttaccgcgttcgcagaggaatttgccggatctgcaatctccggtgacatcactcggactccctttaactaactttttataaggaacaattttt

SEQ ID NO: 276 - DNA, 1000 bp, unidentified
  source 1..1000: mol_type = unassigned DNA; note = unclassified ssRNA positive-strand viruses sequence
tcatccgacatactccgggacgccaagaaccctgagccgccattctcatcctgcggcggtcgtggcgaggtctgtccctcccgtcatgatttccccggagccttgctctgtcactccgattactacctctacgacgagctctcttatgtcattcgtgggcacacttttatcatcaatcactcgtttcttgaagagaataagcacttccacaatgaagcgttcatcacgaagaaaggcgacggagtaatcatgtccacccctgacggcactgaatatcagcacccatacaacatctggaaagccgaaggttgtatcataggatccggtggtgctgccgtctatgcccgagtctatcgtgggccctcaatggatgtttactacgcctatcccgcttctggcacttatcatagtgatgatccacaccgcttaaaacgctcagaccaattcgagaatctccgccttagtagtggcaacattgccagactctctttcaaatccgtcaagattcaaaccacctccggtgacaccatcctcgattgccctcgcgatccctttgaaagagcagttgccaaatgcggtagcggtgtccgtgatctgaagttcttacccacgctatcttcatatatcatatccaaattaaccatgcacgatttagagattaataacgcacaagacatcttagaattagcaaacatcatgtgtgagcgcttcgcttttgacttctactcccactcccatcttgagtatgatcccaccaacataaacatcttcactaggtgtcgtcgtcatgctatgctgctggcccgcgctattcgccacaccctagcacgcaatataacatgttcgattattaatcgtcccatcttacggcaatttacaccttgggcatttaaaagcatcaccatgcctgcttacatcaagcaccgacgtgcacgtcacatcgacttaagacttgcgtctgacaggcctaagccctttcgtgacgggcgcccgatacttg

SEQ ID NO: 277 - DNA, 1000 bp, unidentified
  source 1..1000: mol_type = unassigned DNA; note = unclassified ssRNA positive-strand viruses sequence
gggcacataccgttatgagaaaacggggggcagatgttccggcgatagtgacacatcgttaggcaacgtgagcatcatgctggcgattacgagggtggtttgtgagaggctaaaaggcatacacgtcgagatagcaaacgacggagacgatcaggtactgatggttgaggaaaaccacctcaacagcctggtcgaggagctcagccccacattcatgcggtttggtttccgcgtgaaagtagaggacccggtttgggaattcgagagaatagatttttgccaaaccagaccgatcttcctgtcacccaacgcgccaattatgtgccggtacccaatgcaatctatgtctaaagatgtagcgtcgttcctcaatatagaaagatctgagggatggaaatacatgctgcgagcgataggagcttgcgggtcttctagtttctcacaagtaccagtacttgggaagttctacagagcgttaagttccacatcaaacaagtcagaacacacatggtggaaacgcactggggtagatcttggattcaaacaactcacgaccaacgtgggcccggtccaatatgacgaaataacggcacgaagctccttctataaggctttcggcatactacctgacacccaaatggccctagagagggcaatagacgaatggtacataagccccacaccaccaattgagcacgtccataagttctcgagtgagtacccagtggttgaaggttgggcctaattgtagggtagcaataggtatagctagcctgcccccccccgcttgctgggccggtgggggcagcaccgcagacaacgtggttgagtttgggaacatagatccgaacaccacgtcacgggtaggccacacccgcggagtcaggctgattgccataattggcaggtggggccacgccgtttggccaaaccacccgggtcaccggtagggagaggtctctagggatccgagtgctgccctgttgtaggggcacgctca

SEQ ID NO: 278 - DNA, 1000 bp, unidentified
  source 1..1000: mol_type = unassigned DNA; note = unclassified ssRNA positive-strand viruses sequence
tacacattgaagtagccaatgatggagatgaccaggtgttgatggtcgagacaaaccaactcgacaacctggtcaaggagcttagtcccacattcgcgcgatttggttttcgcgtgaaagtagaggatcctgtctgggaattcgagagaatagatttttgccaaaccagaccgatcttcctatcaccaggtgagcccataatgtgccgatacccaatgcagtctatgtccaaagacgttgcgtccttcctcaatatagaaagatcagagggatggaaatacatgctcagagctataggagcatgtgggtcttctagtttctctcaagttccagtgcttggtgagttttatagtgcgctcagctccacatcaaacaaagatgaaaccaaatggtggaggcgcacgggagttgatttggggtttaaacagcttaccaacaatgtaggcacgatcccttacgacgaggtcacggcacgaagctccttctataaggccttcggaatcctcccagacacccaagcagcactcgaaagcaaaatacgcaactggaatatgagctccgtaccacacatcgagcaagtccacaaattctcgagtgagtttcccgtggttgacggatgggcctaacttagggaatacagttaggttaagttagtcggcccctcctcttgctggctgggtgagagggggggccagcgcagactggttggataggtttgggaacatagatccgaactccaatcaacgggtaggtcgcacccgcgtagtcgagaatgattaccataattggtaggtgaggtcacgccgtatggccaagtcacccgagctttcggtagggggtctagttgttgagtgccattatgacataaccaactagacaccccacatttggagaagcggcttgcccacgctccaacattccatggatagattgaacgacgaaatgtcattgtcttgccgtcagaggcgttcccctctccaaggctagcccgacgtgcgcc

SEQ ID NO: 279 - DNA, 300 bp, Pestivirus A
  source 1..300: mol_type = genomic DNA
gcgaaggccgaaaagaggctagccatgcccttagtaggactagcataaagaggggggtagcaacagtggtgagttcgttggatggcttaagccctagtacagggtagtcgtcagtggttcgacgccttggcataaaggtctcgagatgccacgtggacgagggcacgcccaaagcacatcttaacctgagcgggggtcgctcaggcgaaaacagtttgatcaactgctacgaatacagcataataggttaggccagaggcccactgttctgctactaaaaatctctgctgtacatggcac

SEQ ID NO: 280 - DNA, 301 bp, unidentified
  source 1..301: mol_type = unassigned DNA; note = unclassified Sicinivirus sequence
tgtggtgattagtagaccccctggaggtacccgttttggatctgaccagggacccgtgactataccgttccggtaattcgggtttaaaacaatgaacgtcaccacacactttctttttccctttattttatttgtttgttcagtatgttttatgagttgctcattattgctgcccttgtcgtgattcttgtttcaccgcatgatacccagtgtcttattgtcgtctgtttggtcaattttcttgtatactttctttggacaattccagggttagaccttccattatacccagcaatacaac

SEQ ID NO: 281 - DNA, 303 bp, unidentified
  source 1..303: mol_type = unassigned DNA; note = unclassified Picornaviridae sequence
tggccaccggggaaaaacggctactgtgcaccacctctgcaccccacgccgaccacgcctaaccatggcgttagtaggagtggaggaccactgcagagggtcctggtgtgcgacagtcagtggtagagtagacagtcctgactgggcaatgggaccgcgttgcgtatccctaggtggcattgagatttctctgccacccaccagcatggattcctgtggggggggccccatgggctaggtctatactgcctgatagggtcgcggctggtcgactgctgactgtataaccagttgtaacttact

SEQ ID NO: 282 - DNA, 304 bp, Enterovirus B
  source 1..304: mol_type = genomic DNA
tagttggtagtcctccggcccctgaatgcggctaatcccaactgtggagcagatacccacgcaccagtgggcagtctgtcgtaatgggcaactctacagcggaaccgactactttgggtgtccgtgtttcttttatttattcctacgctggctacttatggtgacaattgagagactgtagttatattgccatcagattggtcatccggtggagaataaaacagttgctcacctgtttgtcagtcctgcaccgtcgtgccatagagtcttaactgcccctcaacatcgtcgtaaacacgctgga

SEQ ID NO: 283 - DNA, 305 bp, unidentified
  source 1..305: mol_type = unassigned DNA; note = unclassified Picornaviridae sequence
gtggctggccaccacggaataacggcaattgtttgtatgtgggaggtcaagcctgcctagccgataacctttgaccgggtgtgtaggatagaacaggaacccactacaggcgacaggttatggtagagtggatacctagccaggggcaatgggactgcgttgcatatccctaatgagccatcgagatttctctggccattacccggtgatggttgtgtggggggggccccacacactagatccatactgcctgatagggtcgcggctggccgaccataacctgtatagtcagttgactttgaatc

SEQ ID NO: 284 - DNA, 306 bp, Enterovirus B
  source 1..306: mol_type = genomic DNA
taactggtagtcctccggcccctgaatgcggctaatcctaactgcggagcagatacccacatgccagtgggcagtctgtcgtaacgggcaactctgcagcggaaccgactactttgggtgtccgtgtttccttttattcttatactggctgcttatggtgacagttgaaagattgttaccatatagctattggattggccatccggtgacgaacagagcaattatttacctatttgttggttttgtaccattaaatcacaaagttttaaaaacattgaaccttgttttagcatttaatacagcaaa

SEQ ID NO: 285 - DNA, 306 bp, Enterovirus B
  source 1..306: mol_type = genomic DNA
tagtcggtagtcctccggcccctgaatgcggctaatcctaactgtggagcagatacccacgcaccagtgggcagtctgtcgtaatgggcaactccgcagcggaaccgactactttgggtgtccgtgtttcatttgttcctacactgactatttatggtgacaattgagagactgtaactatactactatcagattgaccacctggtataaaataaaacagttgttcacctgtttatcagcctcgcaccgttgtactgtaaagcctcagacaccccccaacactatcataacacgtagatcattaaa

SEQ ID NO: 286 - DNA, 306 bp, Enterovirus B
  source 1..306: mol_type = genomic DNA
tagttggtgatcctccggcccctgaatgcggctaatcctaactgcggagcacatgctcacaaaccagtgggtggtgtgtcgtaacgggcaactctgcagcggaaccgactactttgggtgtccgtgtttctttttattcctatactggctgcttatggtgacaattgagagattgttgccatatagctattggattggccatccggtgtcgaacagagcgatcatttatctgtttgttgggtttgtacccttaaatcttagagttttcaaaactctcaacctcgtactacaactaaactcagcaaa

SEQ ID NO: 287 - DNA, 306 bp, Enterovirus B
  source 1..306: mol_type = genomic DNA
tggttggtagtcctccggcccctgaatgcggctaatcctaactgcggagcacatgcccacaaaccagtgggtggtgtgtcgtaacgggcaactctgcagcggaaccgactactttgggtgtccgtgtttctctttatccctatactggctgcttatggtgacaattgagagattgttgccatatagctattggattggccatccggtgtcaaatagagcgattatctacctatttgttggatttatacctttgaattttgaagtatttaagaccctcaaccttatattacaactcaattcggtaaa

SEQ ID NO: 288 - DNA, 306 bp, Enterovirus B
  source 1..306: mol_type = genomic DNA
tagttagtagtcctccggcccctgaatgcggctaatcctaactgcggagcacatgcccacaaaccagtgggtggtgtgtcgtaacgggtaactctgcagcggaaccgactactttgggtgtccgtgtttctctttattccaatactggctgcatatggtgacaattgagagattgttgccatatagctattggattggccatccggtgtcgaacagagcgatcatctacctatttgttggatttgtgcctttgaattttgaagtattcaagactctcaaccttgtactacaactcaattcggcaaa

SEQ ID NO: 289 - DNA, 307 bp, Enterovirus B
  source 1..307: mol_type = genomic DNA
taattggtagtcctccggcccctgaatgcggctaatcctaactgcggagcagatacccacgcaccagtgggcagtctgtcgtaatgggcaactctgcagcggaaccgactactttgggtgtccgtgtttccttccgttcttatattggctgcttatggtgacaattggaagattgttaccatatcgctattggattggccatccggtgacgattagaacacttgtatacctatttgttagctttgcaccgctgaactacagagccttaagcaccctttgatcacattacaacacccaacacgtcaaa

SEQ ID NO: 290 - DNA, 307 bp, Enterovirus B
  source 1..307: mol_type = genomic DNA
taattggtagtcctccggcccctgaatgcggctaatcctaactgcggagcagatacccacgcaccagtgggcagtctgtcgtaatgggcaactctgcagcggaaccgactactttgggtgtccgtgtttccttttattcttatactggctgcttatggtgacaattgagagattgttaccatattgctattggattgtccacccggtgacaaatagaacagttgcttacctgattattagtttcgcaccactgaactacaaaaccttaaacaccctttaatttcatcacaacgcacaatacgttaaa

SEQ ID NO: 291 - DNA, 307 bp, Enterovirus B
  source 1..307: mol_type = genomic DNA
tagttggtagtcctccggcccctgaatgcggctaatcctaactgcggagcagatacccacgcaccagtgggcagtctgtcgtaatgggcaactctgcagcggaaccgactactttgggtgtccgtgtttccttttactctcatactggctacttatggttacaattgagagattgtgaccatattgctattggattggccatccagcgacgaatagaatagttgcttacctgtttgttaacctcgtatcactgaactacaaagccttgaataccctttaacttcatcataacgctcagtacgctaaa

SEQ ID NO: 292 - DNA, 307 bp, Enterovirus B
  source 1..307: mol_type = genomic DNA
tagttggtagtcctccggcccctgaatgcggctaatcctaactgcggagcagatacccacgcaccagtgggcagtctgtcgtaacgggcaactctgcagcggaaccgactactttgggtgtccgtgtttccttttattcttatactggctgcttatggtgacaattgaaagattgttaccatattgctattggtttggccacccggtgacgaatagaacagttgtttacctaattgttagtttcgtaccactgaactacaaagccttaaacaccctttaatttcatcataacactcaacacgttgaa

SEQ ID NO: 293 - DNA, 308 bp, Enterovirus B
  source 1..308: mol_type = genomic DNA
taattggtagtcctccggcccctgaatgcggctaatcctaactgcggagcagatacccacgcaccagtgggcagtctgtcgtaatgggcaactctgcagtggaaccgactactttgggtgtccgtgtttccttttgttcttatactggctgcttatggtgacaattgagagattgttaccatattgctattggattggccatccggtgacgaatagaacaattgtttaactatttgttggttttgtaccgctgaaccacaaagccttaaacaccctttaatttcatcataacgctcaatacgttagaa

SEQ ID NO: 294 - DNA, 308 bp, Enterovirus B
  source 1..308: mol_type = genomic DNA
tagttggtagtcctccggcccctgaatgcggctaatcctaactgcggagcagatacccacgcaccagtgggcagtctgtcgtaatgggcaactctgcagcggaaccgactactttgggtgtccgtgtttccttttgttcttatactagccacttatggtgacaattgagagattgtaaccatattgctattggattggccacccggcgacgaatagaacagttacttacctgtttgctatcctcgtatcgccgaactacaaatccttaaacaccctttaatttcgtcacaacgctcaatacgttaaaa

SEQ ID NO: 295 - DNA, 308 bp, Enterovirus B
  source 1..308: mol_type = genomic DNA
tagttggtagtcctccggcccctgaatgcggctaatcctaactgtggagcagatacccacgcaccagtgggcagtctgtcgtaatgggcaactccgcagcggaaccgactactttgggtgtccgtgtttcttttttgttcctacactggctacttatggtgacaattgagagactgtaaccatattgctaacggattggccacctggtatagaatagaacaattgcttacctgtctggcagtctcacaccgttgtaccataaagcctctgacacccctcaacaccgtcataacacttaacacgttgaa

SEQ ID NO: 296 - DNA, 308 bp, unidentified
  source 1..308: mol_type = unassigned DNA; note = Human rhinovirus B strain HRV-B06_p1159_sR2067_2009 polyprotein1 sequence
gctgtgaccataagacaataatgagtaaaaagagaaacacggacacccaaagtagtcggtcccgtcccggaattgctcattacgaccttaatatcactggtttgtaatacaaggctccagggttaaggttagccgcattcaggggccggaggaatcacaaccaagcacatgcgagtcttcacaccatgtctataaaagggcgtaatgagcaattccgggacgggaccgactactttgggtgtccgtgtttctctttttactcattattgtcttatggtcacagcatatttgttaaatatactgtgatc

SEQ ID NO: 297 - DNA, 310 bp, Pestivirus B
  source 1..310: mol_type = genomic DNA
gcagccccggacatctaagggcatggctagccatgcccttagtaggactagcaaaaggaggggactagcagtagcagtgagttcattggatggccgaatccctgagtacagggaagtcgtcaatggttcgacactccattaaccgaggagtctcgagatgccatgtggacgagggcatgcccacggcacttcttaacctatgcgggggttgcatgggtgaaagcaccattcgtggtgttatggacacagcctgatagggtgtagcagagacctgctattctgctagtaaaaactctgctgtacatggcac

SEQ ID NO: 298 - DNA, 310 bp, unidentified
  source 1..310: mol_type = unassigned DNA; note = unclassified Enterovirus sequence
atgctgtgaccataagacaataataagtaaaataagaaacacggacacccaaagtagtcggtcccgtcccggaattgctcattacgcccttttatagacatggtgtgaagactcgcatgtgcttggttgtgattcctccggcccctgaatgcggctaaccttaaccctggagccttgtattacaaaccagtaatattaaggtcgtaatgagcaattccgggacgggaccgactactttgggtgtccgtgtttcttattttacttattattgtcttatggtcacagcatatttgttaaatatactgtgatc

SEQ ID NO: 299 - DNA, 315 bp, unidentified
  source 1..315: mol_type = unassigned DNA; note = unclassified Picornaviridae sequence
ttctgcttgctctacgtgcggcgcacgttaaaacgtcccggtggtgtctgtgagcatcatcgttactcttaggagaaacaattatcacaacatgttagtgcggcgcacttcaaacgtcccggggacattcgtgaatgtcatcgtaactccatggagaaatcaaaatcacgatagaagtactgattacggcagcctacaaaggcttgaagtttaccatgtacctgacgcttgcttctatttggacttacaactcttcagttgtgcggcaaccaccgcagaaaaacttagacagggtcctaccatgatgttggtagg

SEQ ID NO: 300 - DNA, 315 bp, unidentified
  source 1..315: mol_type = unassigned DNA; note = unclassified Cosavirus sequence
ctacaagctttgtgtaaacaaacttttgtttggcttttctcaagcttctctcacatcaggccccaaagatgtcctgaaggtaccccgtgtatctgaggatgagcaccatcgactacccggacctgcaaaattttgcaaacgcatgtggtatcccagccccctcctctcggggagggggctttgctcactcagcacaggatctgatcaggagatccacctccggtgctttacaccggggcgtggatttaaaaattgcccaaggcctggcgcacaacctaggggactaggttttccttatattttaaagctgtcaat

SEQ ID NO: 301 - DNA, 316 bp, unidentified
  source 1..316: mol_type = unassigned DNA; note = unclassified Picornaviridae sequence
gatgtcggatgacggctggccaccggggaaaaacggcaaatgtgcaccacctctgcaacccacgccgaccacgtttaaccatggcgttagtaggagtggaccactgcagtgggctctggtgtgcgacagtcagtggtagagtagacagtcctgactgggcaatgggaccgcgttgcgtatccctaggtggcatcgagattcctctgctacccaccagcgtggactcctatggggggggccccataggctaggtctatactgcctgatagggtcgcggctggtcgaccactgactgtataaccagttgtaactcact

SEQ ID NO: 302 - DNA, 317 bp, unidentified
  source 1..317: mol_type = unassigned DNA; note = unclassified environmental samples sequence
atcctcggctccgtcccggaaagacttaaaacttgtccctctgagcgcactagcgtgctcactaaaccaaagacagtattctgccatggataccataccggacacacactctttattgtcccaaaaggcttggcattgtaggcttgaaggctatttagccttggattcaccatccaagagaaccccacgtgcgtagcttgagtcagctagcacatagtggtccccgacttacttcaaaacttacaacaatcagctctgctcctaacgatcataaggagtatagcgtgaaatttcatgatcaaacccctgactgggtt

SEQ ID NO: 303 - DNA, 318 bp, Pestivirus A
  source 1..318: mol_type = genomic DNA
ggaacaaatcctcctcagcgaaggccgaagagaggctaaccatgcccttagtaggactagcatatagaggggggtagcaacagtggtgagttcgttggatggctgaagccctgagtacagggtagtcgtcagtggttcgacgctccagaatgcgagcctcgagatgccacgtggacgagggcatgcccacagcacatcttaacctaggcaggggtcgcctaggtgaaagcgggtggaccaaccgttacggacacagcctgatagggtgctgcagaggcccactggactgctactaaaaatctctgctgtacatggcac

SEQ ID NO: 304 - DNA, 319 bp, Pasivirus A
  source 1..319: mol_type = genomic DNA
acatggggtatgttgtctgtcctgttttgttgaaacaatatataagatcctttccgccgatatagacctcgacagtctagtgtaggaggattggtgatagtaacttgccccagaagagtgaccgtgacacatagaaaccatgagtacatgtgtatccgtggaggatcgcccgggactggattccatatcccattgccatcccaacaaacggagggtatacccactatgtgcgcgtttgcagtgggagcctgcaaatttagtcatactgcctgatagggtgtgggcctgcactctggggtactcaggctgtttatataat

SEQ ID NO: 305 - DNA, 319 bp, unidentified
  source 1..319: mol_type = unassigned DNA; note = unclassified Enterovirus sequence
gaatgcggctaatcctaaccacggagcacccaccagtaaaccagctgggagggtgtcgtaacgggtaactctgtggcggaaccgactactttgggtgtccgtgtttccttttgatcctattttggctgcttatggtgacaacgataagttgttatcataaagcttttgggttggccacctggaaaaagttatcagtgtttgatattgctcggctttcacgcctaccaataaaacaagctttatattacttaatttccttttacccaaaggaagaaatctctgaatttcatcttcaactgctcttaacattatcagcaag

SEQ ID NO: 306 - DNA, 321 bp, Enterovirus B
  source 1..321: mol_type = genomic DNA
agagtctattgagctaattggtagtcctccggcccctgaatgcggctaatcctaactgcggagcagatacccacacaccagtgggcagtctgtcgtaacgggcaactctgcagcggaaccgactactttgggtgtccgtgtttccttttattttttacactggctgcttatggtgacaattgagaaattgttaccatatagctattggattggccatctggtgacaaacagagcgattatttacctatttgttggttttgtaccattgaattttaaagtattaaaaacccttaacctcattctaacatttaacacagtaac

SEQ ID NO: 307 - DNA, 322 bp, unidentified
  source 1..322: mol_type = unassigned DNA; note = unclassified Enterovirus sequence
agagagttatgtatggacatgtccagtcaggtctaggggtcctgctggcgacagtgttctagcctgcgtggctgcctgcgtgtcctcacgggcacgaagccatttacttgacaaggtgtgaagagtcccgtgtgctcgtcttgagtcctccggcccctgaatgtggctaaccttaaccctgcagccagtacacacaaaccagtgtgtagctggtcgtaatgagcaattgcgggatgggaccaactactttgggtgtccgtgtttcactttttaccttttattatgcttatggtgacaatatatagacatatatattgacacc

SEQ ID NO: 308 - DNA, 323 bp, Pegivirus B
  source 1..323: mol_type = genomic DNA
ggtgcgcgtgaaaccttctcgtcacagaagattagcgcgctaggtacgccaaaggcgtaggcccccggcggtttgcaccgacgtgggacaatgcgctggaggattttacagccgacagagctgcaaaacctgtagtaaggccggagtaccggcctcccagcccgcgtcagcctaaacctggctgtcatacgcggtgtatggaggacatgtccaactatgggtgccttggggtggttccccttggcgtggtgtgacgaccatagcagtactgcctgatagggtcccggcggatgggtcggctgtgtacatccgttgtccccccc

SEQ ID NO: 309 - DNA, 323 bp, unidentified
  source 1..323: mol_type = unassigned DNA; note = unclassified Picornaviridae sequence
ggaatgtggatgacggatgacggttggccaccggggaaaaacggcaattgtgcacctcctctacaacctacgccgaccatgcctaaccatggcatcagtaggagtgggcccctgtagtgggtcaaggtgtgcgacagtcagtggtagagtagacaatcctgaccgggcaataggactgcattgcatatccttaggcggcattgagaagcctctgccacccaccggcatggatttctatggggggggccccatagactaggtctatactgcctgatagggtcgcggctggtcgaccactgactgtataaccagttgtgtataac

SEQ ID NO: 310 - DNA, 324 bp, unidentified
  source 1..324: mol_type = unassigned DNA; note = unclassified Enterovirus sequence
agcctactgagctacttgagagtcctccggcccctgaatgcggctaatcccaaccacggagcaggtgaccataaaccaatggttggcctgtcgtaatgcgcaagtctgtggcggaaccgactactttgggtgtccgtgtttccttttacctttttcattggctgcttatggtgacaatcatagattgttatcataaagcgaattggattggccatccggtgaaaatcagagcgattgtatacttgtttattggattcactccattaacaccaaactccctaacactcatcaaactagttttgttgataagacactactatcata

SEQ ID NO: 311 - DNA, 327 bp, Enterovirus B
  source 1..327: mol_type = genomic DNA
ggtgtgaagagtatattgagctagctggtagtcctccggcccctgaatgcggctaatcctaactgcggggcaagcacccacaatccagtgggcagcttgtcgtaacgggtaaccctgcagcggaaccgactactttgggtgtccgtgtttcctttatttttaaaactggctgcttatggtgacaattgagagattgttaccatatagctattggattggccatccagtcaccaacagagcaattgtgtacctctttgtagggttcataccacttaattttactagctacaacacactgtgtttcattatcgatttaaacacagcaag

SEQ ID NO: 312 - DNA, 328 bp, unidentified
  source 1..328: mol_type = unassigned DNA; note = unclassified Enterovirus sequence
ccggcccctgaatgtggctaatcccaaccacggagcgctcgccaacaaaccagttggtagggcgtcgtaacgggtaactctgtggcggaaccgactactttgggtgtccgtgtttccttttgatcctatattggctgcttatggtgacaacgataagttgttatcataaagcttttgggttggccacctggaaaaagttatcagtgtttgatattgttcggctctcgcgcctaccagtaaaacaagcattatactatttaatttccttttatccaaaggaagagatttctgagtttcatttacagttgctcttagtgttgtcaacaag

SEQ ID NO: 313 - DNA, 329 bp, Pegivirus H
  source 1..329: mol_type = genomic DNA
tgaactgttgttgtagcaatgcgcatattgctacttcggtacgcctaattggtaggcgcccggccgaccggccccgcaagggcctagtaggacgtgtgacaatgccatgagggatcatgacactggggtgagcggaggcagcaccgaagtcgggtgaactcgactcccagtgcgaccacctggcttggtcgttcatggagggcatgcccacgggaacgctgatcgtgcaaagggatgggtccctgcactggtgccatgcgcggcaccactccgtacagcctgatagggtggcggcgggcccccccagtgtgacgtccgtggagcgcaac

SEQ ID NO: 314 - DNA, 329 bp, unidentified
  source 1..329: mol_type = unassigned DNA; note = unclassified Teschovirus sequence
ttcccaccctcaccctctggatttgtaactgataagtgatgatccttggaagctaggtactcgttacgctggttttggattgtcttgtgcccaacactagttttcggactcttgttgtgtttaaacacagaaatctgattatttggttgtagatttactggacccaccctttgaaagacctgctctggcgcgagctaaagcgcaattgtcaccgggtattgcaccaatggtggcgacagggtacagaagagcaagtactcctgactgggtaatgggactgcgttgcatatccctaggcacctattgagatttctctggggcccaccagc

SEQ ID NO: 315 - DNA, 331 bp, Teschovirus A
  source 1..331: mol_type = genomic DNA
actagtccttggacttttgttgtgtttaaacacagaaatttaattacctggccatgaattcattggattaacccttctgaaagacttgctctggcgcgagctaaagcgcaattgtcaccaggtattgcaccagtggtggcgacagggtacagaagagcaagtactcctgaccgggcaatgggactgcattgcatatccctaggcacctattgagatttctctggggcccaccggcgtggagttcctgtatgggaatgcaggactggacttgtgctgcctgacagggtcgcggctggccgtctgtactttgtatagtcagttgaaactcacc

SEQ ID NO: 316 - DNA, 331 bp, unidentified
  source 1..331: mol_type = unassigned DNA; note = unclassified Teschovirus sequence
actagacctcggtcttctgttgtgtttaaacacagaaatcttgctatctgactatgaattcataggactaacccctctgaaagacttgctctggcgcgagcaaaagcgcaattgtcaccaggtattgcaccaatggtggcgacagggtacagaagagcaagtactcctgactgggcaatgggactgcgttgcatatccctaggcacctattgagatttctctggggcccaccagcgtggagttcctgtatgggaatgcaggactggacttgtgctgcctgacagggtcgcggctggccgtctgtactttgtatagtcagttgaaactcatc

SEQ ID NO: 317 - DNA, 332 bp, Teschovirus A
  source 1..332: mol_type = genomic DNA
actagaccttggtctcttgttgtgtttaaacacagaaatttttcctatttggttatgaattcattggatcaatccctctgagagacctgctctggcgcgagcaaaagcgcaattgtcaccaagtactgcactaatggtggcgacagggtacagaagagcaagtactcctgactgggcaatgggactgcgttgcatatccctaggtacctattgagatttctctggggcccaccagcgtggagttcctgtatgggaatgcaggactggacttgtgctgcctgacagggtcgcggctggccgtctgtactttgtatagtcagttgaaactcact

SEQ ID NO: 318 - DNA, 333 bp, Pestivirus A
  source 1..333: mol_type = genomic DNA
caatgattaggcctagggaatgaatcccccttagcgaaggccgaaaagaggctagccatgcccttagtaggactagcataatgaggggggtagcaacagtggtgagtttgctggatggcttaagccctgagtacagggtagtcgtcagtggttcgacgcctcagtgaggaggtctcgatatgccacgtggacgagggcatgcccaaagcgcatcttaacctgggcgggggtcgctcaggcgaaagcggtttattaactgctgcaaatacagcctgatagggtgctgcagaggcccactgtattgctactaaaaatctctgctgtacatggcac

SEQ ID NO: 319 - DNA, 333 bp, Pestivirus K
  source 1..333: mol_type = genomic DNA
tgctgtgagccccgtggtgagtgggggaaaggggttaaccaggcctctagtaccacaggcaccattggacagggcaactcgaacctgagagagaggtaccgaacccttaagccccgagtacggggtagacgtcaccgagtagtacacccaaagaccaccacattcaggtgtagggtctactgaagctcgggtggacgtgggcgtgcccaaagggaaatcggtggtggacctgggggttgggcccgccatgccccttcatggggtagacctcactgcttgatagagtgccggcggatgcctcaggtaagagtataaaatccgttgttcattaac

SEQ ID NO: 320 - DNA, 335 bp, Teschovirus A
  source 1..335: mol_type = genomic DNA
caacactagacctcggtctactgttgtgtttaaacacagaaatctcgctacttggttatgaattcattggatcaatccctttgaaagacctgctctggcgcgagcaaaagcgcaattgtcaccaggtattgcaccaatggtggcgacagggtacagaagagcaagtactcctgactgggcaatgggactgcattgcatatccctaggcacctattgagatttctctggggcccaccagcgtggagttcctgtatgggaatacaggactggacttgtgctgcctgacagggtcgcggctggccgtctgtactttgtatagtcagttgaagcacact

SEQ ID NO: 321 - DNA, 337 bp, Shanbavirus A
  source 1..337: mol_type = genomic DNA
accttttccccctctaaggcaatgcactttggtttattctcatggatcatgattttagaggctggccacctaggttaaacggcaattattagtgataggggtcaaacactcatcgtgaaaccgtccagtagcgaggagtagttccctatctactagtgactagtgtgagcagagtaggaggtatacaaggaagtgggacgctatttgctatccccgtattgagagttctctacaccttgtgtatacagtggattgggaagtccactctggtcctatactgcctgatagggttgttaactgtcagctcacacttagtataacagtttgtcaaacactt

SEQ ID NO: 322 - DNA, 337 bp, unidentified
  source 1..337: mol_type = unassigned DNA; note = unclassified Enterovirus sequence
tacccatggctaacgccatgggacgctagttgtgaacaaggtgtgaagagcctattgagctacttaagagtcctccggcccctgaatgcggctaatcctaaccacggagcaagtgcccacaaaccagtgggtagcttgtcgtaacgcgtaagtctgtggcggaaccgactactttgggtgtccgtgtttccttttatttttatcatggctgcttatggtgacaatctaagattgttatcatatagctgttggattggccatccggtgatttacagagacttgagaactaacccgcctttctacaacactcatttacttattaatctcacaatacaaa

SEQ ID NO: 323 - DNA, 338 bp, unidentified
  source 1..338: mol_type = unassigned DNA; note = unclassified Picornaviridae sequence
ctcgtgagtagtacttggccctgcccattacttgaggaccgactcttcttgactacaatgtgtttaaagtaacctggaccacattgtgtatccagacaactccattaggtaatgtacgctggagacgttttcagtgcatagggttctaaagtggtgctgaaatattgcaagctcaatggaatactgaacgctgaaaaccgccgctattatcttttgggccccttgtgggcaaacgttggctttaagcatatactgcttgggaatgcagtactggttgtagacagggtgatagcctaccggctggcgtagttgagttggtatagccagttgattgccat

SEQ ID NO: 324 - DNA, 341 bp, synthetic construct
  source 1..341: mol_type = other DNA
gccagcccccgattgggggcgacactccaccatagatcactcccctgtgaggaactactgtcttcacgcagaaagcgtctagccatggcgttagtatgagtgtcgtgcagcctccaggaccccccctcccgggagagccatagtggtctgcggaaccggtgagtacaccggaattgccaggacgaccgggtcctttcttggatcaacccgctcaatgcctggagatttgggcgtgcccccgcgagactgctagccgagtagtgttgggtcgcgaaaggccttgtggtactgcctgatagggtgcttgcgagtgccccgggaggtctcgtagaccgtgcacc

SEQ ID NO: 325 - DNA, 343 bp, unidentified
  source 1..343: mol_type = unassigned DNA; note = unclassified Flavivirus sequence
atataaatcccagtttggttaaacctatttcaaggcttaagttgtttattattttatcgccgctcgtgactataaagttgcctagcggagagagataaagaagaaggagttcaaggctcagggcagggcgcaagttccctggtccctaggccgctcgcaggaaggaggagtgaagaagaagaaagagaaggagaggaccaccgccgaaagaaggcaggtgcctcacaagagggccaaccagcgtgttggaccagtggccaacgccggacggcgtggtggcctgctgggacgcctggggattggatggagtgccttcctacaggaagacatcgttcaagccatc

SEQ ID NO: 326 - DNA, 343 bp, unidentified
  source 1..343: mol_type = unassigned DNA; note = unclassified Parechovirus sequence
acatggggcaggtgtgctgtgccaagagcaacactacggtggccgagccgatggttcgtcaccacgtagtaggactccgtagtgcttggttacggcggacgtaagtcagttgagtgatgtctaagtggcaaaccatgagtacatggtaaccttgtgtggactcgcgggacggaatttcctatcccattgactccttgtagcaaggtgggtatacccaaccacaatggcagcaccctgggtgggaacccaggggcctggattagtatccagtcacacagcctgatagggtggcggctcagccactgaccagcgtctctaaataattgtgagctgttcatgcacc

SEQ ID NO: 327 - DNA, 343 bp, Teschovirus A
  source 1..343: mol_type = genomic DNA
cttgtgcccaacaaaaggctttggtctcttgttgtgtttaaacacagaaattttgttactcggttatgaattcactggattaacccctttgaaagacctgctctggcgcgagctaaagcgcaattgtcaccgggtattgcaccaatggtggcgacagggtacagaagagcaagtactcctgactgggcaatgggactgcattgcatatccctaggcacctattgagatttctctggggcccaccagcgtggagttcctgtatgggaatgcaggactggacttgtgctgcctgacagggtcgcggctggccgtctgtgctttgtatagtcagttgaaattcact

SEQ ID NO: 328 - DNA, 343 bp, Teschovirus A
  source 1..343: mol_type = genomic DNA
cttgtgcccaacattggtcctcggacttctgttgtgtttaaacacagaaattcaactattcggttatgaattcattggatcaaccctcttgaaagacctgctctggcgcgagctaaagcgcaattgtcaccaggtattgcaccatcggtggcgacagggtacagaagagcaagtactcctgactgggcaatgggactgcattgcatatccctaggtacctattgagatttctctggggcccaccagcatggagttcctgtatgggaatgcaggactggacttgtgctgcctgacagggtcgcggctggccgtctgtactttgtatagtcagttgaaatgcact

SEQ ID NO: 329 - DNA, 347 bp, Pestivirus A
  source 1..347: mol_type = genomic DNA
aattccaaaacagaaatcaggcctagggaacaaaatcctcctcagcgaaggccgaaaagaggctaaccatgcccttagtaggactagcaaattggggggggtagcaacagtggtgagttcattggatggccgaagccctgagtacggggtagtcgtcagtggttcgacgccttaaggaaactaggtctcgagatgccacgtggacgagggcatgcccacggcatatcttaacctgcgcgggggtcgctcaggtgaaagcggcataaatgaccgttatggacacagcctgatagggtgctgcagaggcccactgtattgctactgaaaatctctgctgtacatggcac

SEQ ID NO: 330 - DNA, 347 bp, unidentified
  source 1..347: mol_type = unassigned DNA; note = unclassified Picornaviridae sequence
atgtttgtttcatcatatcactatttttgtatcctatcttgattaatcgcttagattggcttggggaagccgatgcgaatttccgccacctcacccccctcaattgtccaaatcagggactgggaaggttttaactaagggcataatttgtcagtggatggtctaggtacagagaatggcgcggtcacttcttctcagtgaacaccgtttgtcctaccctcttaggcccgccatctgctgaatttctgttgcagctggtagtcgcttttgtaattaatcactatagaaatacaatccactttcgtcttctttttgtatccccttctctatagattcgtgtgttttac

SEQ ID NO: 331 - DNA, 348 bp, Pestivirus A
  source 1..348: mol_type = genomic DNA
cgaaccactgacgactaccctgtactcagggcttcagccatccaacgaactcaccactgttgctaccccccccgggatgcccttagtaggactagcataccggggggggtagcaacagtggtgagttcgttggatggctgaagccctgagtacagggtagtcgtcagtggttcgacaccttagaatttaggtctcgagatgccacgtggacgagggcacgcccacagcacatcctaacctggacaggggtcgtccaggtgaaagcgggcaaccgttacggacacaacctgatagggtgctgcagaggcccactgtattgctactaaaaatctctgctgtacatggcac

SEQ ID NO: 332 - DNA, 349 bp, unidentified
  source 1..349: mol_type = unassigned DNA; note = unclassified Pegivirus sequence
ggacttcggtccccctgttactctgcgagccaccgcagagccagggttggtacgcccgaggtgttagaccccggccgaaagctcctaaccatggggttagtaggacgtggtaaatgccactgaggggttggagagctggtagagcgagtaagtcggcgtaaggcccgagtacgggcctcccagcccgggtcagcctaaacctggctgtgatacccggtgcatggagggcgtgtcccaacgctcgatcgctgtagggtgggtccctgcagttgggtgtggctaccctgctcgtactgcttgatagagtcccggcggacggaccagctctcgtcagtccgtggagttgcac

SEQ ID NO: 333 - DNA, 353 bp, Enterovirus B
  source 1..353: mol_type = genomic DNA
cccgtaggacgctctaatactgacatggtgcgaagagtcgattgagctagttagtaatcctccggcccctgaatgcggctaatcctaaccgcggaacacatgctcacataccagtgaggagtgtgtcgtaatgggcaactctgcggcggaaccgactactttgggtgaccgtgtttctttttattctcatactggctgcttatggtgacaattgaaagattgttaccatatagctattggattggccatccggtgacgaatagagcaattatatacttattcgttggatacatcccactcaactttaaagaactaagaactcttaattatatattgcaattaaatttcgcaaa

SEQ ID NO: 334 - DNA, 354 bp, unidentified
  source 1..354: mol_type = unassigned DNA; note = unclassified Enterovirus sequence
acccataggacgctctaatgtggacatggtgcgaagagtctattgagctagttagtagtcctccggcccctgaatgcggctaatcctaactgcggagcgcatgcccccaaaccagggggaggtgcgtcgtaacgggcaactctgcagcggaaccgactactttgggtgtccgtgtttccttttatctttgcaatggctgcttatggtgacaattgagagattgttaccatatagctattggattggccatccggtgagcaatagagcgatcatctattcctttattggatttgtaccattggactatactgcctttgtcacattgaaatacattctattgttgaacactataaa

SEQ ID NO: 335 - DNA, 355 bp, Pestivirus K
  source 1..355: mol_type = genomic DNA
gcattatgtatgggacatcctaaattggagtgagccccgtggtgagtgggggaaaggggttaaccaggcctctagtaccacaggcaccaatgaacagggcaactcgaacccgagagagaggtaccgaactcttaagccccgagtacggggcagacgtcaccgagtagtacacccaaagaccaccactaggtgtagggtctactgaggctcgggtggacgtgggcgtgcccaaagagaaatcggtggtggacctgggggtcggggccaccatacccctaaacagggtagaccttactgcttgatagagtgccggcggatgcctcgggcaagagtataaaatccgttgtctatcaac

SEQ ID NO: 336 - DNA, 356 bp, Pestivirus D
  source 1..356: mol_type = genomic DNA
gaactacatcatactcgtgtacaaaattggacattccaaaactcgattgggttagggagccctcctagcgacggccgaaccgtgttagccatacacgtagtaggactagcagacgggaggactagccatcgtggtgagatccctgagcagtctaagtcctgagtacaggacagtcgtcagtagttcaacgcaaacatgctctgcctgaaatgctacgtggacgaggcatgcccaagactgcttaatctcggcggggtcgccgaggtgaaacacctaccggtgttgggttacagcctgatagggcgctgcagggcccacgtataggctagtataaaaatctctgctgtacatggcac

SEQ ID NO: 337 - DNA, 358 bp, unidentified
  source 1..358: mol_type = unassigned DNA; note = unclassified Pestivirus sequence
gttcattctcgtgtacaaaattgggcatataaatttctgattcgattagggaatccctctagcgacggccgaactgggctagccatgcccatagtaggactagcaaacggagggactagccgtagcggtgagctccctgggaagtctaagccctgagtacagggtagtcgtcagtagttcgacgtggacgagagtccatctcgagatgctacgtggacgagggcatgcccaagacataccttaacccaggcgggggtcgtctgggtgaaatcacttagcgtgatgggggtacaacctgatagggtgctgcagaggcccgctattaggctagtataaaaatctctgctgtacatggcac

SEQ ID NO: 338 - DNA, 359 bp, Pegivirus A
  source 1..359: mol_type = genomic DNA
gtgatgccagggttggtaggtcgtaaatcccggtcatcttggtagccactataggtgggttttaagggagggttaaggtccctctggcgcttgtggcgagaaagcgcacggtccacaggtgttggccctaccggtgtgaataagggcccgacgtcaggctcgtcgttaaccaataggcaatgccggcgagttgacaaagaccagtgggggccgggcggcgggggaaggacccccgtcgccgcccttcccgggaggggtgggaaatgcatggggccacccagctccgcggcggcctgcagccggggtagcccaagagccttcgggtgagggcgggtggcatttcctttcttgtaccgatc

SEQ ID NO: 339 - DNA, 360 bp, Pestivirus B
  source 1..360: mol_type = genomic DNA
atacagattggatgttggcaaaaagtgaatcgataaatagggaaccttcccctcagcgaaggccgaaaggaggctagccatgtccttagtaggactagcaaagagaggggactagcggtagcagtgagttcattggatggccgaatccctgagtacagggaagtcgtcaatggttcgacgctctggcaacaaagagcctcgagatgccatgtggacgagggcatgcccacggcacatcttaacctatgcgggggttgcgtaggtgaaagcatcatcttgagatgttatggacacagcctgatagggtgtagcagagacctgctattccgctagtataaaaaactctgctgtacatggcac

SEQ ID NO: 340 - DNA, 363 bp, unidentified
  source 1..363: mol_type = unassigned DNA; note = unclassified Enterovirus sequence
cagggtcgcctttgtgtttgatgggttagtcgctcagtcagttaccccctgatagacctggcagatgaggttggaaacaccccactggtaacagtgttccagcctgcgtggctgcctgcccctctttttgaggggaagcccatatgtagacaaggtgagaagagccgcgtttgctaatcatgagtcctccggcccctgaatgcggctaatccaaccccacagctactgcgcagaaaccactgcgtgggtagtcgtaatgagcaattgtgggacggaaccgactactttgggtgtccgtgtttcctgttttaccttacattgcttatggtcacaacatatatgaaatcgtatatgttgttcacc

SEQ ID NO: 341 - DNA, 365 bp, Pestivirus A
  source 1..365: mol_type = genomic DNA
gctcttgtatacaaattggacatccacaaattaaaaatccggcctagggaaaaatccctctcagcgaaggccgaaaagaggctaaccatgcccttagtaggactagcaaaaggagaggggtagcaacagtggtgagttcgttggatggctgaagccctgagtacagggtagtcgtcagtggttcaacacctcggaaagaaggtcttgagatgccacgtggacgagggcatgcccacagcacatcttaacctggacgggggtcgcccaggtgaaagcagttttaaccaactgttatgaacacagcctgatagggtgctgcagaggcccactgcattgctactaaaaatctctgctgtacatggcac

SEQ ID NO: 342 - DNA, 366 bp, Pestivirus C
  source 1..366: mol_type = genomic DNA
aggttagttcgttctcgtatgtaatatcggacaaactaaaattctgatttggtttagggcacccctccagcgacggccgaactgggctagccatgcctatagtaggactagcaaacggagggactagccgtagtggcgagctccctgggtggtctaagtcctgagtacaggacagtcgtcagtagttcgacgtgagcaggggctcacctcgagatgctatgtggacgagggcatgcccaggacacaccttaaccctagcgggggtcgctagggcgaaatcacgctatgtgatgggggtacgacctgatagggcgctgcagaggcccactaacaggctagtataaaaatctctgctgtacatggcac

SEQ ID NO: 343 - DNA, 367 bp, unidentified
  source 1..367: mol_type = unassigned DNA; note = unclassified Pestivirus sequence
tataagctgggggtgggagcccagcttgtactaaagtttacagcacgtgtgtgaagtttacttagtcctgtagaggtgacggggataacctatgccagtgggtgtgtaccagtaaccattgaactacagggactgcaacctgggagagcacctagagcccctaaggcatgagcacatgccattcgtcaagtggtcagctggaaaggatcacccacctggaaaccactgtggacgagggtattcacccaagggtaactctattaattggggggggccccaattatcaacacaattgtgttgggtgtgctgcctgacagggtcccggctgatggcccaggaagcagtataatatcagttgttttggcac

SEQ ID NO: 344 - DNA, 369 bp, Pestivirus D
  source 1..369: mol_type = genomic DNA
gtatacgagagtagctcatgctcgtatacaaaattggacattctaaaagattaattggactaggattccctcccagcgacggccgaaccgggttagccatacctgcagtaggactagcagacgggaggactagctatcgtggtgaggtccctgagtggtctaagtcctgagtacaggacagtcgtcagtagttcgacacaaacttttgtctcgaggtgctacgtggacgagggcgtgcccaagacacactttaaccctggcgggggtcgctagggtgaaagcgcctaacggcgttggaactacagcctgatagggtgctgcagaggcccacgtaccagctagtataaaaatctctgctgtacatggcac

SEQ ID NO: 345 - DNA, 369 bp, Pestivirus E
  source 1..369: mol_type = genomic DNA
gtatacgcagttagttcatcctgtgtatacagattggagactctaaaaacaacgattcggaataggggcccgcggcgaagaccgaagacaggctaaccatgccgttagtagggctagcaccaaaacgcgggaactagacacttaggagagtggtctggctactctaagaggtgagtacaccttaaccgtcaagggttctactcctcagttgaggactagagatgccctgtggacgggggcatgcccaagagttagcttagccggggcgggggttgttccggtgaaagtagcaatattgaccacactgcctgatagggcggagcaggccccctaggtagtctagtataaaatgtctgctgtacatggcac

SEQ ID NO: 346 - DNA, 369 bp, Pestivirus K
  source 1..369: mol_type = genomic DNA
ggccaattaaagcattatgcgtgggacatcctaaatatttatgagccctgcggtgagtgggggaaagaggttaaccaggcctctagtaccacaggcaccaatggacagggcaactcaaacctgagagagaggtaccgaactcttaagccccgagtacggggcagacgtcaccgagtagtacacccaaagaccaccacttctaggtgtagggtctactgaggctcgggtggacgtgggcgcgcccaaagagaaatcggtggtggacctgggggtcggggccaccatgcccctttacggggtagaccttactgcttgatagagtgccggcggatgcctcaggtaagagtataaaatccgttgttcattaac

SEQ ID NO: 347 - DNA, 370 bp, Pestivirus D
  source 1..370: mol_type = genomic DNA
gtatacgaaagtagctcacgttcgtatacaaaattgactgtaccaaatccccaattcggttagggcccctcccagcgacggccgaaccgggttagccatacccgtagtaggactagcaaacgggaggactagcttacgtggtgagatccctgagtggtctaagtcccgagtacggggcagtcgtcagtagttcaacgcaatgtggagttgccttgagatgctacgtggacgagggcatgcccaagacacactttaaccctggcgggggtcgccaggtgaactcacctaatggtgttgggattacagcctgatagggtgctgcagaggcccacgcataagctagtataaaaatctctgctgtacatggcac

SEQ ID NO: 348 - DNA, 370 bp, Pestivirus D
  source 1..370: mol_type = genomic DNA
gtatacgagagtagctcaagtctcgtatgcagattggatacacaaaattgttgaattggtgtagggcccccagcgacggccgaactaggctaaccatgcccacagtaggactagcatacggggggactagctttcgtggtgagatccctgagcggtctaagccctgagtacagggtagtcgtcagtagttcgacacaaacgtggttttgtctcgagatgctacgtggacgagggcatgcccatgacacgctttaggcccggcaggggtcgccgggtcgaaaacacctcactgtgttggggttacagcctgatagggtgctgcagaggcccacgcataagctagtataaaaatctctgctgtacatggcac

SEQ ID NO: 349 - DNA, 370 bp, Pestivirus A
  source 1..370: mol_type = genomic DNA
gtaaaatactcgtatacatattggaaaagaaaaaaataataattaggcctagggaacaaatcctcctctgcgaaggccgaaaagaggctagccatgcccttagtaggactagcacaatgaggggggtagcaacagtggtgagttcgttggatggcttaagccctgagtacagggtagtcgtcagtggttcgacaccttggcataaaggtctcgagatgccacgtggacgagggcatgcccaaagcacatcttaaccagggcgggggtcgctctggtaaaagcagttagatcaactgttatgaatacagcctgatagggtgctgcagaggcccactgtattgctactaaaaatctctgctgtacatggcac

SEQ ID NO: 350 - DNA, 370 bp, Sicinivirus A
  source 1..370: mol_type = genomic DNA
cccgattgctgtcctgcttgtctggtgaactcggctggaagcattcagtttctggatttgctggtttgtggtgattagtagaccccctggaggtacccgtctggatctgaccagggacccgtgactataccgttccggtaattcgggtttaaaactatgaacgtcaccacccattttgttttgtttggttgggctggattgtttgtttagatgctcctagaatccctgttggtgattgtagcacttgttgtagtggtcgtctctcctagtgaattaccccagctgtttgctatttgcatctacaactttgtcttgatttttctctggttatttggtaccttagagctccccaattatcccaccattcatc

SEQ ID NO: 351 - DNA, 370 bp, Deltapapillomavirus 1
  source 1..370: mol_type = genomic DNA
tacctaaaggttcggacacaactccgcgcttcagcctccttaccaaaacaggtgggcagccctgtcttatacttagtggaaacgggaaccaaacgaagtgctttcggttccgttgcaaaaagcatttccgcaggcattacgagcacgtcacgaccacctggtggactgtgggcgagcgtggatctgagagacagggggatgcctgcattttagtaactttcaaaaactcctgtcaaagacaggacttcctcaaaactgtgcctttgccgccaggaatgcaagcgcaaggaattaccatgcatttagactattaacagacaatcttgcattgcacctgcagtgaaggacatctttgtgcagaaaaactgtg

SEQ ID NO: 352 - DNA, 371 bp, Pestivirus A
  source 1..371: mol_type = genomic DNA
agttctcgtatacacattggacactctaaaaatatattgtaattaggtctaggggactaaatcctccttagcgaaggccgaaaagaggctagccatgcccttagtaggactagcacaataaggggggtagcaacagtggtgagttcgttggatggctgaagccctgagtacagggtagtcgtcagtggttcgacgcctcggaggacaggcctcgagatgccacgtggacgagggcacgcccacagcacatcttaacctgaacgggggtcgtttaggtgaaagcggtttaaccaaccgctacgaatacagcctgatagggtgctgcagaggcccactgtattgctactgaaaatctctgctgtacatggcac

SEQ ID NO: 353 - DNA, 372 bp, Pestivirus D
  source 1..372: mol_type = genomic DNA
gtatacgggagtagctcatacccgtatgcaaaattggacgtctcaaaattcgattgggtgagggagccctcctagcgacggccgaaccgtgttaaccatacacgtagtaggactagcaaacgggaggactagccatcgtggtgagatccctgagcagtctaagtcctgagtacaggatagtcgtcagtagttcaacgcaggcgtggttctgccttgagatgctacgtggacgagggcatgcccaagacatgctttaatcccgacgggggtcgccgggatgaaaacacctactggtgttgggattacagcctgatagggtgttgcagagacccacgtataggctagtataaaaatctctgctgtacatggcat

SEQ ID NO: 354 - DNA, 372 bp, Pestivirus D
  source 1..372: mol_type = genomic DNA
gtatacgggagtagctcatgcccgtatacaaaattggatattccaaaactcgattgggttagggagccctcctagcgacggccgaaccgtgttaaccatacacgtagtaggactagcagacgggaggactagccatcgtggtgagatccctgagcagtctaaatcctgagtacaggatagtcgtcagtagttcaacgcaggcacggttctgccttgagatgctacgtggacgagggcatgcccaagacttgctttaatctcggcgggggtcgccgaggtgaaaacacctaacggtgttggggttacagcctgatagggtgctgcagaggcccacgaataggctagtataaaaatctctgctgtacatggcac

SEQ ID NO: 355 - DNA, 372 bp, Pestivirus C
  source 1..372: mol_type = genomic DNA
gtatacggtgttagctcatcaccgtatgcaagattggacaaaccaaatctcaatctggctcagggcatccctccagcgacggccgaactgggctagccatgctcatagtaggactagcaaacggagggactagccgtagtggcgagctccctgggtggtctaagtcctgagtacaggacagtcgtcagtagttcgacgtaagcggaagctcacctcgagatgctacgtggacgagggcatgcccaagacacaccttaaccctggcaggggtcgccagggtgaaatcacactatgtgaggggggtacgacctgatagggtgctgcaggggcccactattaggctagtataaaaaactctgctgtacatggcac

SEQ ID NO: 356 - DNA, 372 bp, unidentified
  source 1..372: mol_type = unassigned DNA; note = unclassified Megrivirus sequence
tgggctcttttccgtacggtggcgtgacgaaccaccgtgcgtgaccctgctaagtcgtctgtgcctctcgggcatgtcgtggctccggctccgatatgcttgggacaacggatgggcggcttggtggggctagtcaccccgtttttggacttcctggttttgactccctctttgtctttcgggcttggtccaccgacggactaattggtatctgcaaggcctatagcctcgttctgaaatgccctagccaaagggacgtagtaggatcttggtgtttcccttgcagctctaccgaccgtattagctagagctaggactgtgcaggatgtttcagacctctttttgagcaatctgggacaagaccccggtctg

SEQ ID NO: 357 - DNA, 373 bp, Pestivirus A
  source 1..373: mol_type = genomic DNA
actagataaaatactcgtatacgtattgggcatttaaaaatataattaggcctagggaataaatccccctctgcgaaggccgaaaagaggctagccatgcccttagtaggactagcataatgaggggggtagcaacagtggtgagttcgttggatggcttaagccctgagtacagggtagtcgtcagtggttcgacgccttgtcgcaaaggtctcgagatgccacgtggacgagggcacgcccaaagcacatcttaacctgagcgggggtcgctcaggcgaaagcagtttaaccaactgttacgaatacagcctgatagggtgctgcagaggcccactgtattgctactaaaaatctctgctgtacatggcac

SEQ ID NO: 358 - DNA, 373 bp, Pestivirus C
  source 1..373: mol_type = genomic DNA
gtatacgaggttagttcattctcgtatgcattattggacaaatcaaaatttcaatttggttcagggcctccctccagcgacggccgaactgggctagccatgcccatagtaggactagcaaacggagggactagccatagtggcgagctccctgggtggtctaagtcctgagtacaggacagtcgtcagtagttcgacgtgggcagaggcccatctcgagatgctatgtggacgagggcatgcccaagacacaccttaaccctggtgggggtcgctagggtgaaatcacacaacgtgatgggggtacgacctgatagggtgctgcagaggcccactaacaggctagtataaaaatctctgctgtacatggcac

SEQ ID NO: 359 - DNA, 373 bp, Pestivirus C
  source 1..373: mol_type = genomic DNA
gtatacgaggttagttcattctcgtatgcatgattggacaaattaaaatttcaatttggatcaggtcctccctccagcgacggccgaagtgggctagccttgcccgcagttggactagcaaacggagggactagccgtattggcgagctccctgggtggtctaagtcctgagtacaggacagtcgtcagtagttcgacgtgagcagaagcccacctcgatatgctatgtggacgagggcatgcccaagacacatcttaaccctagcgggggtcgctagggtgaaatcacaccacgtgatgggagtacgacctgatagggtgctgcagaggcccactattaggctagtataaaaatctctgctgtacatggcac

SEQ ID NO: 360 - DNA, 373 bp, unidentified
  source 1..373: mol_type = unassigned DNA; note = unclassified Sicinivirus sequence
gtgtcattaaggtgtgtttggaagttcgaattagctggtttgtggtgattagtagaccccctggaggtacccaattcggatctgaccagggacccgtgactataccgctccggtaattcgggtttaaaacaatgaacgtcaccacacaattacttttctcattttattttcatcattgtcttcctatttaccgattacactcgatttccttggatgttcctggagatttccctggttacctggaccctcattattgttgttgtttcacccagcgagctgtcccaattgcttattatttgcgcttacaacttcgtcctaatatttttctggttgatcgggttgattgagctcccgggctatcctgccattcaac

SEQ ID NO: 361 - DNA, 374 bp, Pestivirus C
  source 1..374: mol_type = genomic DNA
gtatacgaggttagctcattctcgtatacatgatcggacaaatcaaaatctcaatttggttcagggcctccctccagcgacggccgaactgggctagccatgcccacagtaggactagcaaacggagggactagccatagtggcgagctccctgggtggtctaagccctgagtacagggcagtcgtcagtagttcgacgtgagcagaagcccacctcgagatgctatgtggacgagggcatgcccaagacacaccttaactctagcgggggttgctagggtgaaatcacaccatgtgatgggagtacgacctgatagggcgctgcagaggcccactattaggctagtataaaaaatctctgctgtacatggcac

SEQ ID NO: 362 - DNA, 374 bp, Pestivirus D
  source 1..374: mol_type = genomic DNA
gtatacggggtagctcatgcccgtgtacaaaattggactttccaaaaaactcaattggattagggagccctcctagcgacggccgaaccgtgttagccatacacgtagtaggactagcagacgggaggactagccatcgtggtgagatccctgagcggtctaagtcctgagtacaggatagtcgtcagtagttcaacgcagacatggttctgccttgagatgctacgtggacgagggcatgcccaagacgcgctttaatcctggcgggggtcgccagggtgaaaacacataccagtgttggggttacagcctgatagggtgctgcagaggcccacgtataggctagtataaaaaatctctgctgtacatggcac

SEQ ID NO: 363 - DNA, 374 bp, Pestivirus C
  source 1..374: mol_type = genomic DNA
gtatacgaagttagctcaccctcgtatacataattgggcaggtcaaaattccaatttggttcagggcccccctccagcgacggccgaactgggctagccatgcccacagtaggactagcagacggagggactagccgtagtggcgagctccctgggtggtctaagtcctgagtacaggacagtcgtcagtagttcgacgtgagcagcagctcatctcgagatgctatgtggacgagggcatgcccaagacacaccttaatcctggcgggggtcgccagggtgaaatcacactgcgtgatgggggtacgacctgatagggtgctgcagaggcccactattaggctagtataaaaaatctctgctgtacatggcac

SEQ ID NO: 364 - DNA, 374 bp, Pestivirus C
  source 1..374: mol_type = genomic DNA
gtatacgaggttagctcgttctcgtatacgatattggatacactaaatttcgatttggtctagggcacccctccagcgacggccgaaatgggctagccatgcccatagtaggactagcaaacggagggactagccgtagtggcgagccccctgggtggtctaagtcctgagtacaggacagtcgtcagtagttcgacgtgagcaccagcccacctcgagatgctacgtggacgagggcatgcccaagacacaccttaaccctggcgggggtcgctagggtgaaatcacattatgtgatgggggtacgacctgatagggtgctgcagaggcccactattaggctagtataaaaaaatctctgctgtacatggcac

SEQ ID NO: 365 - DNA, 374 bp, Pestivirus A
  source 1..374: mol_type = genomic DNA
ggaaaaaacactcgtatacatattgggcgattctaaaacgataattaggcctagggaatgaatccccttcagcgaaggccgaaaagaggctagccatgcccttagtaggactagcataatggagggggtagcaacagtggtgagttcgttggatggcttaagccctgagtacagggcagtcgtcagtggttcgacaccttggaagaacaaggcctcgagatgccacgtggacgagggcatgcccaaagcacatcttaacccgggcgggggtcgctcaggtgaaagcagtttaaccaactgttacgaatacagcctgatagggtgctgcagaggcccactgtattgctactaaaaatctctgctgtacatggcac

SEQ ID NO: 366 - DNA, 374 bp, unidentified
  source 1..374: mol_type = unassigned DNA; note = unclassified Enterovirus sequence
ggtacctgtggctaaaagccacaggacgctagttgtgaacaaggtgtgaagagtctattgagctacaagagagtcctccggcccctgaatgcggctaatcccaaccatggagcaagtgctcacgcaccagtgagtagcttgtcgtaacgggtaactctgtggcggaaccgactactttgggtgtccgtgtttccttttatttttataatggctgcttatggtgacaatctcagattgttatcataaagcgaattggattggccatccggtgaaagtgagatatattatatacctttttgttggatttactccaatcaattccttcacttatcagctcatcactataactctgttgattagaagcatataccaca

SEQ ID NO: 367 - DNA, 375 bp, Pestivirus C
  source 1..375: mol_type = genomic DNA
gtatacgaggttagttcgttctcgtgtacaatattggacaagaccaaaattccgatttggcctagggcacccctccagcgacggccgaactgggctagccatgcccacagtaggactagcaaacggagggactagccgtagtggcgagctccctgggtggtctaagtcctgagtacaggacagtcgtcagtagttcgacgtgagcaggagcccacctcgagatgctatgtggacgagggcatgcccaagacacaccttaaccctggcgggggtcgccagggtgaaatcacaccatgtgatgggggtacgacctgatagggtgctgcagaggcccactaacaggctagtataaaaaatctctgctgtacatggcac

SEQ ID NO: 368 - DNA, 375 bp, Pestivirus I
  source 1..375: mol_type = genomic DNA
gtatacgagattagctcacactcgtatacaaattggatatgacaaattcaaattggactagggactccctctagcgacggccgaacggggttaaccatacctctagtaggactagcaaacggagggactagctatagtggtgagctccctgggaggtctaagttccgagtacggaatagtcgtcagtggttcaacgccggtaaaccccggccttgagatgccacgtggacgagggcatgcccaagacacaccttaacctgggcgggggtcgtccaggtgaaaacacccctttttgggtgctgggggtacagcctgatagggtgctgcagaggcccactaataggctagtataaaaatctctgctgtacatgagac

SEQ ID NO: 369 - DNA, 375 bp, Pestivirus A
  source 1..375: mol_type = genomic DNA
atttagaaaaggttctcgtatacgtattgggcaatcaaaaataatgattaggcctagggaacaaaccctctcagcgaaggccgaaaggaggctagccatgcccttagtaggactagcaaaatgaggggggtagcaacagtggtgagttcgttggatggctgaagccctgagtacagggcagtcgtcagtggttcgacacctaggatggtaggtctcgagatgccacgtggacgagggcatgcccacagcacatcttagcctgagcgggggtcgcccaggtgaaagcggtacagacagaccgctacgaatacagcctgatagggtgctgcagaggcccactgcaatgctactaaaaatctctgctgtacatggcac

SEQ ID NO: 370 - DNA, 376 bp, Pestivirus D
  source 1..376: mol_type = genomic DNA
gtatacgagagtagttcaggctcgtatgcaaaattgggtgtttcaaattttaaaattcgactagggccaccccccagcgacggccgaaacgggttagccatacccttagtaggactagcggacggggggactagccatcgtggtgagatccctgagcggtctaagtcctgagtacaggacagtcgtcagtggttcgacgcggtcatcgcatcgtctcgagatgccacgtggacgagggcatgcccaagacacgctttaatcctggcgggggtcgccagggtgaaaacgtcctagtggcgttggggttacagcctgatagggtgctgcagaggcccacgcataggctagtataaaaaaactctgctgtacatggcac

SEQ ID NO: 371 - DNA, 376 bp, Pestivirus D
  source 1..376: mol_type = genomic DNA
gtatacgagagtagctcatgctcgtatacagattggacacgctaaattttttaattagggttagggtgttccccccagcgacggccgaactgggttagccatacccatagtaggactagcagacgggaggactagccatcatggtgaggtacctgagcggtctaagccctgagtacagggcagtcgtcagtagttcgacactaacttggcttagtctcgagatgctacgtggacgagggcatgcccatgacacgctttagccccagcgggggtcgttggggtgaaaacacattacggtgctggtatcacagcctgatagggtgctgcagaggcccatgaataggctagtataaaaaatctctgctgtacatggcac

SEQ ID NO: 372 - DNA, 376 bp, Pestivirus A
  source 1..376: mol_type = genomic DNA
agatttaggaaagctctcgtatgcatattgggcaatctaaaataataattagacctagggaacaatccctctcagcgaaggccgaaaggaggctagccatgcccttagtaggactagcaaaatgaggggggtagcatcagtggtgagttcgttggatggctgaagccctgagtacagggcagtcgtcagtggttcgacgcctaggatgataggtctcgagatgccacgtggacgagggcatgcccacagcacatcttagcccgagcgggggtcgcccgggtgaaaacggtaaatacagaccgctacgaatacagcctgatagggtgctgcagaggcccactgtaatgctactaaaaaactctgctgtacatggcac

SEQ ID NO: 373 - DNA, 377 bp, Pestivirus D
  source 1..377: mol_type = genomic DNA
gtatacgagagtagttcatgctcgtatacagaattggatattctaaaatttgttaattggactagggtctcctcctggcgacggccgaaccgggttagccatacccgtagtaggactagcatatgggaggactagctttcgtggtgaggttcctgagtggtctaagtcctgagtacaggatagtcgtcagtagttcgacacaaacggagttttagtctcgagatgctacgtggacgagggcatgcccaagactcactttaatcctggcgggggtcgccagggtgaaaacgcccaatggcgttggaactacagcctgatagggtgctgcagaggcccacgcaacagctagtataaaaaatctctgctgtacatggcac

SEQ ID NO: 374 - DNA, 377 bp, Pestivirus I
  source 1..377: mol_type = genomic DNA
gtatacgagattagctcatactcgtgtacaaattggacgtagcaaatttaaaaattcggatagggtccccatccagcgacggccgaacggggttaaccatacctctagtaggactagcagacggatggactagccacagtggtgagctccctgggaggtctaagttctgagtacagaacagtcgtcagtagttcaacgctggtaaaccccagccttgagatgctacgtggacgagggcatgcccaagacacaccttaacctggacgggggtcgtccaggtgaaagtacccatctttgggtgctgggagtacagcctgatagggcgctgcagaggcccactgacaggctagtataaaaatctctgctgtacatggaac

SEQ ID NO: 375 - DNA, 377 bp, Pestivirus A
  source 1..377: mol_type = genomic DNA
agatttagctcaatctctcgtatgcacattgggcaagcaaaataacaattaggcctagggaaaaaataatcctcctcagcgaaggccgaaaagaggctagccatgcccttagtaggactagcatattggggagggtagcaacagtggtgagttagttggatggctgaagccctgagtacagggtagtcgtcagtggttcgacgccttagaatacaggcctcgagatgccacgtggacgagggcatgcccacagcacatcttaacctgagcgggggtcgcccaggtaaaagcggatgaaaaccgttactaacacagcctgatagggtgctgcagaggcccactgcactgctactaaaaatctctgctgtacatggcac

SEQ ID NO: 376 - DNA, 377 bp, Pestivirus K
  source 1..377: mol_type = genomic DNA
gcataatgcttagattggctgcattatgtttgggacatcctaaatttttatgagccctgtggtgagtgggggaaaggggttaaccaggcctctagtaccacaggcaccaatggacagggcaactcgaacctgagagagaggtaccgaactcttaagtcccgagtacggggcagacgtcaccgagtagtacacccaaagaccaccacttttaggtgtagggtctactgaggctcgggtggacgtgggcgtgcccaaagagaaatcggtggtggacccgggggtcgggaccaccatgcccttcacggggcagaccttactgcttgatagagtgccggcggatgcctcgggtgagagtataaaatccgttgtttattaac

SEQ ID NO: 377 - DNA, 378 bp, Pestivirus B
  source 1..378: mol_type = genomic DNA
ttgcatggtacgggctgagctacggattggatgttgacaaattttgaattggcaaagtaggtaactttcccctcagcgaaggccgaaaagaggctagccatgcccttagtaggactagcaaaaggaggggactagcggtagcagtgagttcattggatggccgaacccctgagtacaggggagtcgtcaatggttcgacactccatcattcatggagtctcgagatgccatgtggacgagggcatgcccacggcacatcttaacctatgcgggggttgcatgggtgaaagcgccattcgtggcgttatggacacagcctgatagggtgtagcagagacctgctattccgctagtaaaaaactctgctgtacatggcac

SEQ ID NO: 378 - DNA, 378 bp, Pestivirus K
  source 1..378: mol_type = genomic DNA
gcataatgctttgattggctgcattatgtgttggacacctcaaattaccacgcgccctgcggtgagtgggggaaaggggttaaccaggcctctagtaccacagacaccaattggcagggcaactcaaacctgagagagaggtaccgaactcttaagccccgagtacggggcagacgtcaccgagtagtacacccaaagaccaccatgtttaggtgtagggtctactgaggcttgggtggacgtgggcgtgcccaaagagaaatcggtggtggacctgggggtcgggcccaccacacccctttatggggtggaccttactgcttgatagagtgccggcggatgcctcaggtaagagtataaaatccgttgtttattaac

SEQ ID NO: 379 - DNA, 378 bp, Pestivirus K
  source 1..378: mol_type = genomic DNA
gcataatgctttgattggctgcattatgtgtgggacatcctaaattgtcataagccctgcggtgagtgggggaaaggggttaaccaggcctctagtaccacaggcacctatggacagggcaactcaaacctgagagagaggtaccgaactcttaagtcccgagtacggggcagacgtcaccgagtagtacacccaaagaccaccatttctaggtgtagggtctactgaggctcgggtggacgtgggcgtgcccaaagagaaatcggtggtggacctgggggtcggggccaccataccccgttatggggtagaccttactgcttgatagagtgccggcggatgcctcgggtaagagtataaaatccgttgtctattaac

SEQ ID NO: 380 - DNA, 378 bp, Pasivirus A
  source 1..378: mol_type = genomic DNA
gcataatgctttgattggctgcattatgtatggaacatcctaaattgttgtgagccccgtggtgagtgggggaaaggggtttaccaggcctctagtaccacaggcaccgatagacggggcaactcgaacctgagagagaggtaccgaactcttaagtcccgagtacggggcagacgtcaccgagtagtacacccaacgaccaccactcctaggtgtagggtctactgaggctcgggtggacgtgggcgcgcccaaagagaaatcggtggtggacctgggggccggggccaccatgctcctttacggggtagaccttactgcttgatagagtgccggcggatgcctcgggtaagagtataaaatccgttgtctattatt

SEQ ID NO: 381 - DNA, 378 bp, Pestivirus B
  source 1..378: mol_type = genomic DNA
gcttttgaccagtggctctgggttacttagccaagtccctttctcttattttcactagtttatgttgtgtgttgtctgttttgttttgtttaaattgtatacaagatccttcccgccgacacagacctcgacagtctggtgtaggagggttggtgatattaatttgccccaaaagagtgaccgtgatacgtggaaaccatgagtacatgtgtatccgtggaggatcgcccgggactggattccatatcccattgccatcccaacaaacggagggtatacccaccacgtgcgcgtttgcagtgggaatctgcaaatttagtcatactgcctgatagggtgtgggcctgcactttggggtactcaggctgttcatataat

SEQ ID NO: 382 - DNA, 379 bp, Pestivirus C
  source 1..379: mol_type = genomic DNA
tcctcgttgaaattctcgtatacagattgggtgttggcaaacagttaattagtgaagtagggaaccttcccccctctgcgaaggccgaaaagaggctaaccatgcccttagtaggactagcaaaaagagggggctagcggtagcagtgagtttattggatggccgaatccctgagtacagggaagtcgtcaatggttcgacactctggtaatataagagtctcgagatgccatgtggacgagggcatgcccacggcacatcttaacctatgcgggggttgcatgggtgaaagcaccatttacggtgttataaacacagcctgatagggtgtagcagagacctgctatcccgctagtaaaaactctgctgtacatggcac

SEQ ID NO: 383 - DNA, 379 bp, Pestivirus K
  source 1..379: mol_type = genomic DNA
gcatactcaggacttagaccaccctcgcatctgcatgatatcggacaaatcaaatttcaatttggttcagggcctccctccagcgacggccgaactgggctagccatgcccacagtaggactagcaaacggagggactagccgtagtggtgagctccctgggtggtctaagtcctgagtacaggacagtcgtcagtagttcgacgtgagcagaagcccacctcgagatgctacgtggacgagggcatgcccaagacacaccttaaccctagcgggggtcgctagggtgaaatcacaccacgtgatgggagtacgacctgatagggtgctgcagaggcccactattaggctagtataaaaatctctgctgtacatggcac

SEQ ID NO: 384 - DNA, 379 bp, Pestivirus K
  source 1..379: mol_type = genomic DNA
gcataatgctttgattggctgcattatgtatgggacatcctaaattgctacgagccctgcggtgagtgggggaaaggggttaaccaggcctctagtaccacaggcaccaataaacagggcaactcgaacctgagagagaggtaccgaactcttaagtcccgagtacggggcagacgtcactgagtagtacacccaaagaccaccacatctaggtgtagggtctactgaggctcaggtggacgtgggcgtgcccaaagagaaatcggtggtggacctgggggtcgggtccaccatgccccctttagggggtagaccttactgcttgatagagtgccggcggatgcctcgggtaagagtataaaatccgttgttcattaac

SEQ ID NO: 385 - DNA, 380 bp, unidentified
  source 1..380: mol_type = unassigned DNA; note = unclassified Sicinivirus sequence
tgcataatgcttcgattggctgcattatgtgtgggacatcctaaattgttaagcgccctgcggtgagtgggggaaaggggttaaccaggcctctagtaccacaggcaccattggacagggcaactcgaacctgagagagaggtaccgaactcttaagctccgagtacggggcagacgtcaccgagtagtacacccaacgaccaccatgtttaggtgtagggtctactgaagctcgggtggacgtgggcgtgcccaaagagaaatcggtggtggacctgggggtcgggcccaccatgccccccttacggggtagacctcactgcttgatagagtgccggcggatgcctcaggtgagagtataaaatccgttgttcgttaac

SEQ ID NO: 386 - DNA, 380 bp, Teschovirus A
  source 1..380: mol_type = genomic DNA
ttttgtcccgattgttgcaacattggcttggggaaccgaactcggttgcatttaagttgtgaacttgttggtctgtgatgattagtagaccccctggaggtacccgtctggatctgaccagggacccgtgactataccgttccggtaattcgggtttaaaacaatgaacgtcatcactcaacattctttcccattttattttgtatcttactgtcttagtatgctcattgagatttcgctggtagttgttgctttggttgtagtggttgtttcgcacagtgagtctcatcagcttctcacagtttgtatctacaattttgctttgaccttcctttggctgttcggatttcttgaacttcctaactatcctgctgttcaac

SEQ ID NO: 387 - DNA, 380 bp, unidentified
  source 1..380: mol_type = unassigned DNA; note = unclassified Pestivirus sequence
ttggaagctaggtacttgttacgctagttttggattgtcttgtgcccaacattagtctttggacttctgttgtgtttaaacacagaaatttgaacatttggctatagattcacaggataaaccctttgaaagacctgctctggcgcgagctaaagcgcaattgtcaccgggtattgcaccaatggtggcgacagggtacagaagagcaagtactcttgactgggtaatgggactgcgttgcatatccctaggcacctattgagatttctctggggcccaccagcgtggagttcctgtatgggaatgcaggactggacttgtgctgcctgacagggtcgcggctggccgtctgtactttgtatagtcagttgaaactcact

SEQ ID NO: 388 - DNA, 381 bp, Pestivirus Giraffe-1
  source 1..381: mol_type = genomic DNA
gtatagcagcagtagctcaaggctgctatacgattggacataccaaattccaattggtgttagggaccacctaggtgaaggccgacgacaggtagccattcctgttagtaggacgaaccgttatggtggactggttgctcaggtgagcaggctgcaatgcgtaagtggtgagtacaccacagccgtcaaaggtgccactggtaaggatcacccactggcgatgccttgtggacgggggcgtgcccaacgcaatgttagcggtggcgggggctgccatcgtgaaagctaggtcttgatggaccttgttgcctgtacagtctgataggatgccggcggatgccctgtgacagccagtataaagaatatccgttgtgattgcac

SEQ ID NO: 389 - DNA, 381 bp, Pestivirus G
  source 1..381: mol_type = genomic DNA
gtatacgagattagctcatcactcgtatacataatcggatataaccaaaacaatgatttggcataggaaataccccgatgcgaaggccgaaacaggctaaccatgcctttagtaggactagcacaaaatcggggactagccaaggtggcgagcttcctggatgaccgaagtcctgagtacaggacagtcgtcaacagttcaacgcgcaggacaggtctgcgtcttgatatgctgtgtggacgagggcatgcccacggtacatcttaacccagccgggggtcggttgggtgaaagtccaataggactggaagtacggcctgatagggtgtagcagagacccacctgttaggctagtataaaatactctgctgtacatggcac

SEQ ID NO: 390 - DNA, 382 bp, Pestivirus A
  source 1..382: mol_type = genomic DNA
gtatacgagtttagctcaatcctcgtatacaatattgggcgtcaccaaatatagatttggcataggcaacaccccgatgcgaaggccgaaaagggctaaccatgcccttagtaggactagcaaaaaatcggggactagcccaggtggtgagcttcctggatgaccgaagccctgagtacagggcagtcgtcaacagttcaacacgcagaataggtttgcgtcttgatatgctgtgtggacgagggcatgcccacggtacatcttaacctatccgggggtcggataggcgaaagtccagtattggactgggagtacagcctgatagggtgttgcagagacccatctgataggctagtataaaaaactctgctgtacatggcac

SEQ ID NO: 391 - DNA, 382 bp, unidentified
  source 1..382: mol_type = unassigned DNA; note = unclassified Pestivirus sequence
gtatacgagaattagatcaatctctcgtatacacattgggcatcccaaacagcaattaggcatagggaaaatcctcctcagcgaaggccgaatagaggctagccatgcccttagtaggactagcaaattgaggggggtagcagcagtggcgagttcgttggatggctgaagccctgagtacagggtagtcgtcagtggttcgacgccttaggatctaaggcctcgagatgccacgtggacgagggcatgcccacagcacatcttaatccgagcgggggtcgctcgggtgaaagctgttgtgctaacagttatgaacacggcctgatagggtgctgcagaggcccactgtgttgctactaaaaatctctgctgtacatggcac

SEQ ID NO: 392 - DNA, 382 bp, Pestivirus A
  source 1..382: mol_type = genomic DNA
gtatacacaaggttagctcaatccattgtgtgtacgattggatgttgcaaatttataatttgagatatagggacccattcatcacagcgaaggccgaacaagggtagccaatcccttcattaggactagcacaagtgatggactggagacgtggatgagtgagctgtagagaggaagtggtgagtacaccacagtcgtcaagagtactaccggtaaggatcacccgctagttatgctctgtggacgagggcatgcccaccttttctactagataccccgggggttggggtgtcgaaagtcgaaatatcgattgctcacacagtctgataggatgccggcggatgctccacgtataccagtataaaaatccgttgaatagcac

SEQ ID NO: 393 - DNA, 383 bp, Pestivirus H
  source 1..383: mol_type = genomic DNA
atgtatacgagaatttgcctaacctcgtatacatattgggcattctaaaaataaattaggcctaagggacaaatcctccttagcgaaggccgaaaagaggctagccatgcccttagtaggactagcaaaacaaggagggtagcaacagtggtgagttcgttggatggctgaagccctgagtacagggtagtcgtcagtggttcgacgcttcgtgtgacaagcctcgaggtgccacgtggacgagggcatgcccacagcacatcttaacctgagcgggggtcgttcaggtgaaagcggtttaaccaaccgctacgaatacagcctgatagggtgctgcagaggcccactgtattgctactaaaaatctctgctgtacatggcac

SEQ ID NO: 394 - DNA, 383 bp, Pestivirus A
  source 1..383: mol_type = genomic DNA
gtatacgcccagttagttcaggtggacgtgtacgattgggtatcccaaattaataatttggtttagggactaaatcccctggcgaaggccgaaacaggttaaccatacctttagtaggacgagcataatgggggactagtggtggcagtgagctccctggatcaccgaagccccgagtacggggtagtcgtcaatggttcgacgcatcaaggaatgcctcgagatgccatgtggacgagggcgtgcccacggtgtatcttaacccaggcgggggccgcttgggtgaaatagggttgttatacaagcctttgggagtacagcctgatagggtgttgcagagacctgctacaccactagtataaaaactctgctgtacatggcac

SEQ ID NO: 395 - DNA, 383 bp, Pestivirus A
  source 1..383: mol_type = genomic DNA
gtatacgagaattagttaaaactatcgtatacacattgagcattccaaaatgataattggacctagggaacaatccctcccagcgaaggccgaaaagaggctagccatgcccttagtaggactagcaaaatggggggggtagcaacagcggtgagttcgttggatggccgaagccccgagtacggggcagtcgtcagtggttcgacgcctggcgcgacaggcctcgagatgccacgtggacgagggcacgcccacggcacatcttagccagagcgggggtcgctcgggtgaaagtggtcaaacagactactacgaatacagcctgatagggtgctgcagaggcccgctgtaatgctactaaaaatctctgctgtacatggcac

SEQ ID NO: 396 - DNA, 384 bp, Pestivirus A
  source 1..384: mol_type = genomic DNA
gtatacgagaatttgcctaggacctcgtttacaatatgggcaatctaaaattataattaggcctaagggacaaatcctcctcagcgaaggccgaaaagaggctagccatgcccttagtaggactagcaaaataaggggggtagcaacagtggtgagttcgttggatggctgaagccctgagtacagggtagtcgtcagtggttcgacgcttcggaggacaagcctcgagataccacgtggacgagggcatgcccacagcacatcttaacctggacgggggtcgttcaggtgaaaacggtttaaccaaccgctacgaatacagcctgatagggtgctgcagaggcccactgtattgctactgaaaatctctgctgtacatggcac

SEQ ID NO: 397 - DNA, 384 bp, Pestivirus A
  source 1..384: mol_type = genomic DNA
gtatacgagatttagaaaagtctctcgtatacacattggacataacaaaataacaattaggcctagggaacgaatccctctcagcgaaggccgaaaagaggttaaccatacccttagtaggactagcaaacgagaggggtagcaatggtggtgagttcgttggatggctgaagccctgagtacagggtagtcgtcaatggttcgacacctatggaacgtaggtctcgagatgccatgtggacgagggcatgcccacagcacatcttaactttggcaggggtcgccaaagtgaaagtggcctaaccaaccactacgaacacagcctgatagggtgctgcagaggcccaccttcttgctactaaaaatctctgctgtacatggcac

SEQ ID NO: 398 - DNA, 384 bp, Pestivirus A
  source 1..384: mol_type = genomic DNA
gtatacaggaattaggaaaagctcctgtatacaaattgggcaattaaaaattgaagattaggcctagggaaagatccctctcagcgaaggccgaaaagaggctagccatgcccttagtaggactagcaaaatgagaggggtagcaacagtggtgagttcattggatggctgaagccctgagtacagggtagtcgtcagtggttcgacacctcggaaagaaggtctcgagatgccacgtggacgagggcatgcccacagcacatcttaacctggacgggggtcgcccaggtaaaagcagtttaactaactgttatggacacagcctgatagggtgctgcagaggcccactgcattgctactaaaaatctctgctgtacatggcac

SEQ ID NO: 399 - DNA, 384 bp, unidentified
  source 1..384: mol_type = unassigned DNA; note = unclassified sequence
cctacctcaagcagcagtagcagtagaaaagcagagaagcgctctcaaggtctgcaggttggagaatgagcgtaagaggaagaagggttgaagatatagagaggtgatagcaaggaggaggtgctcaggttaggagaccaatggtagcagggggtaagggtactttccctagttgagatagctatatatggctgggggaggtgctgggattgtttaaagattgtctaaatgtggcgcaagttctgttaatattttacctgacctttaccgtaaaaggaacaaggaagcatgtctttgcattacataacgcatgagtggttttaatctgttaccaattaacagagtacggtcagggttcgttgcggcttcctttgatacgtgggc

SEQ ID NO: 400 - DNA, 385 bp, Pestivirus A
  source 1..385: mol_type = genomic DNA
gtatacgagagttagataaaaatactcgtatacacattgggcaattaaaagtaataattaggcctagggaacgaatcctcctccgcgaaggccgaaaagaggctagccatgcccttagtaggactagcatagcgaggggggtagcaacagtggtgagttcgttggatggcttaagccctgagtacagggtagtcgtcagtggttcgacgccttaacatgaaggtctcgagatgccacgtggacgagggcacgcccaaagcacatcttagcccgagcgggggtcgctcggacgaaaacagtttgatcaactgctacgaatacagcctgatagggtgctgcagaggcccactgtattgctactaaaaatctctgctgtacatggcac

SEQ ID NO: 401 - DNA, 385 bp, unidentified
  source 1..385: mol_type = unassigned DNA; note = unclassified vectors sequence
gtatacgagaactagataaaatactcgtatacatattggacaacagaaaataactattaggcctagggaatgaatccctctcagcgaaggccgaaaggaggctagccatgcccttagtaggactagcataatgaggggggtagcaacagtggtgagttcgttggatggcttaagccctgagtacagggtagtcgtcagtggttcgacgcctcggtataaaggtctcgagatgccacgtggacgagggcacgcccaaagcacatcttaacctgagcgggggtcgcccaggcaaaagcagatcgaccaatctgttacgaatacagcctgatagggtgctgcagaggcccactgtattgctactaaaaatctctgctgtacatggcac

SEQ ID NO: 402 - DNA, 385 bp, Pestivirus B
  source 1..385: mol_type = genomic DNA
gtatacgaaattagctaaagtactcgtatacggattggacgttggcaaacattgaattgacaaggtagggaattttcccctcagcgaaggccgaaaagaggctagccatgcccttagtaggactagctaaaagaggggactagcggtagcagtgagttcattggatggccgaatccctgagtacagggaagtcgtcaatggttcgacactccgtcagtcgaggagtctcgagatgccatgtggacgagggcttgcccacggcacatcttaacccatgtgggggttgcatgggtgaaagcaccattctaggtgttatggacacagcctgatagggtgtagcagagacctgctattctgctagtaaaaactctgctgtacatggcac

SEQ ID NO: 403 - DNA, 385 bp, Pestivirus K
  source 1..385: mol_type = genomic DNA
atatggggcataatgcatagattggctgcattatgtgtataacatcccaaattgccataggctctgtggtgagtgggggaaaggggttaaccaggcctctagtaccacaggcaccatttaacagggcaactcaaacctgagagagaggtaccgaactcttaagcctcgagtacggggcagacgtcaccgagtagtacacccaacgaccaccacatttaggtgtagggtctactgaggctcgggtggacgtgggcatgcccaaagagaaaacggtgggggacctgggggtcgggtccgccatgcccctcaatggggtagaccttactgcttgatagagtgccggcggatgcctcaggtaagagtataaaatccgttgtttattaac

SEQ ID NO: 404 - DNA, 385 bp, Pestivirus B
  source 1..385: mol_type = genomic DNA
gtatacgagattagctaaagtactcgtatacggattggacgtcgacaaactttgaattggcaacacagggaaccttcccctcggcgaaggccgaaaagaggctagccatgcccttagtaggactagacaaaggaggggactagtggtagcagtgagtccattggatggccgaacccctgagtacaggggagtcgtcaatggttcgacactcctttagtcgaggagtctcgagatgctatgtggacgagggcatgcccacggcacatcttaacccacgcgggggttgcgtgggtgaaagcgccattcgtggcgtcatggacacagcctgatagggtgtagcagagacctgctactccgctagtaaaaactctgctgtacatggcac

SEQ ID NO: 405 - DNA, 386 bp, Pestivirus B
  source 1..386: mol_type = genomic DNA
gtatacgagattagctaaagtactcgtatacagattggatgttgacaaaatattgaattgacaaggtagggaattttcccctcagcgaaggccgaaaagaggctagccatgcccttagtaggactagcaaaaggaggggactagcggtagcagtgagttcattggatggcctaatccctgagtacagggaagtcgtcaatggttcgacactccatcagttgcggagtctcgagatgccatgtggacgagggcatgcccaaggcacatcttaacctatgcgggggttgcataggcgaaagcaccattcgtggtgttatggacacagcctgatagggtgtagcagagacctgctattccgctagtaaaaactctgctgtacatggcac

SEQ ID NO: 406 - DNA, 386 bp, Pestivirus A
  source 1..386: mol_type = genomic DNA
gtgtatacgagatttagaaaaagctcttgtatacatattgggcaatctaaacaacaatcaggcctagggaattaatcctcctcggcgaaggccgaaaagaggctagccatgcccttagtaggactagcataacgaggggggtagcaacagtggtgagttcgttggatggcttaagccctgagtacagggtagtcgtcagtggttcgacgcctcggaaatagaggtctcgatatgccacgtggacgagggcacgcccaaagcacatcttaacctgagcggggggtcgctcaggtgaaagcggttcaaccaaccgttacggatacagcctgatagggcgctgcagaggcccactgttttgctactaaaaatctctgcttacatggcac

SEQ ID NO: 407 - DNA, 386 bp, Pestivirus A
  source 1..386: mol_type = genomic DNA
gtatacgagaattattcgcccttctcgtatacgtattgggcaattaaaataataattaggcctagggaacaaaagtccccctcagcgaaggccgaaaagaggctagccatgcccttagtaggactagcataaagaggggggtagcagcagtggtgagttcgttggatggcttaagccctgagtacagggtagtcgtcagtggttcgacgccttggaataaaggtctcgagatgccacgtggacgagggcatgcccaaagcacatcttaacctgagcgggggtcgcccaggtaaaagcagttctaaccgactgttacgaatacagcctgatagggtgctgcagaggcccactgttctgctactaaaaatctctgctgtacatggcac

SEQ ID NO: 408 - DNA, 386 bp, Pestivirus B
  source 1..386: mol_type = genomic DNA
gtatacgagtactttagctaacctcgtatacagattggatgttgacaaacattgaattggcaaagtagggaacctttcccctcagcgaaggccgaaaagaggctagccatgcccttagtaggactagcaaaaggaggggactagcggtagcagtgagttcattggatggccgaatccctgagtacagggaagtcgtcaatggttcaacactccactaatcgaggagtcttgagatgccatgtggacgagggcatgcccacggcacatcttaacctatgcgggggttgcatgggtgaaagcaccatttgtggtgttatggacacagcctgatagggtgtagcagagacctgctattccgctagtaaaaactctgctgtacatggcac

SEQ ID NO: 409 - DNA, 386 bp, Pestivirus C
  source 1..386: mol_type = genomic DNA
tttgcccgattgtgcatacgaggttagttcattctcgtatgcacaatcgggcaaatggaaacttcaatttggttcagggcctctctccagcgacggccgaactgggctagccatgcccatagtaggactagcaaatggagggactagccgtagtggcgagctccctgggtggtctaagtcctgagtacaggacagtcgtcagtagttcgacgtgagcagaagctcacctcgagatgctatgtggacgagggcgtgcccaagacacaccttaactctagcgggggtcgctagggtgaaatcacaccatgtgatgggagtacgacctgatagggtgctgcagaggcccactattaggctagtataaaaatctctgctgtacatggcac

SEQ ID NO: 410 - DNA, 386 bp, Pestivirus A
  source 1..386: mol_type = genomic DNA
gtatacgaggttaggcaagttctcgtatacatattggacactctaaaaaaaaataattaggtctaggggacaaaaatcctccttagcgaaggccgaaaagaggctagccatgcccttagtaggactagcaaaataaggggggtagcaacagtggtgagttcgttggatggctgaagccctgagtacagggtagtcgtcagtggttcgacgctttgaagaacaagcctcgagatgccacgtggacgagggcatgcccacagcacatcttaatctggacgggggtcgttcaggtgaaaacggtttaaccaaccgctacgaatacagcctgatagggtgctgcagaggcccactgtattgctactaaaaatctctgctgttcatggcac

SEQ ID NO: 411 - DNA, 386 bp, Pestivirus A
  source 1..386: mol_type = genomic DNA
gtatacgagaagatttagctaaaaactctcgtatacaaattgggcattccaaacaacaattaggtctagggaagaatcctcctcagcgaaggccgaaaagaggctagccatgcccttagtaggactagcaaattggggagggtagcagcagtggtgagttcgttggatggctgaagccctgagtacagggtagtcgtcagtggttcgacacctcaaggttgaggtctcgagatgccacgtggacgagggcatgcccacagcacatcctagtctgggcaggggtcgctcagatgaaagcggttgagtcaaccgttacggacacagcctgatagggtgctgcagaggcccactgtgttgctactaaaaatctctgctgtacatggcac

SEQ ID NO: 412 - DNA, 386 bp, Sapelovirus A
  source 1..386: mol_type = genomic DNA
ccttccaaatcggatggactactggacttgaaactatggaaagtaaattggtgagattttggatacacttgaacggtagtagcgtggcgagctatggaaaaatcgcaattgtcgatagccatgtcagtgacgcgcttcggcgtgctcctttggtgattcggcgactggttacaggagagtagacagtgagctatgggcaaacccctacagtatttcttagggggaatgtgcaattgagacttgacgagcttctctcagagatgtggcgcatgctcttggcattaccatagtgagcttccaggttgggaaacctggactgggtctatactacctgatagggtcgcggctggccgcctgtaactagtatagtcagttgaaaccccccc

SEQ ID NO: 413 - DNA, 387 bp, Pegivirus C
  source 1..387: mol_type = genomic DNA
tagccactataggtgggtcttaaggggaggttatggtccctctcgcgcttatagagagaaagcgcacggtccacaggtgttggccctaccggtgtaataagggcccggcgctaggcacgccgttaaaccgagaccgttacccccctgagcaaacgacgcccacgtacggcctacgtcgcccttcaatgtctctcttgaccaataggcgatgccggcgagttgacaaaggccagtgggggccgggcggcaggggaaggacccctgtcgctgctcttcccgggggggcgggaaatgcatggggccacccagctccgcggcggcctacagccggggtagcccaagagccttcgggtgagggcgggtggcatttttcttccttaactgatc

SEQ ID NO: 414 - DNA, 387 bp, Pestivirus A
  source 1..387: mol_type = genomic DNA
cgtatacgagagttagacaaaatgctcgtatacacattgggcaaactaaataataataattgggcctagggtactaatccccctctgcgaaggccgaagagaggctagccatgcccatagtaggactagcataatgaggggggtagcaacagtggtgagttcgttggatggcttaagccctgagtacagggtagtcgtcagtggttcgacgccttagtataaaggtctcgagatgccacgtggacgagggcacgcccaaagcacatcttaacctgagcgggggtcgctcaggcgaaagcagtttaaccaactgttacgaatacagcctgatagggtgctgcagaggcccactgtactgctactaaaaatctctgctgtacatggcac

SEQ ID NO: 415 - DNA, 387 bp, Pestivirus B
  source 1..387: mol_type = genomic DNA
gtatacgaggttagttaaagttatcgtatacagattggacgtttacaaaacagtgaattggcaaaatagggaaccttcccctcagcgaaggccgaaaagaggctagccatgcccttagtaggactagcaaaaagaggggactagcggtagcagtgagttcattggatggccgaatccctgagtacagggaagtcgtcaatggttcgacgctctagcaattgcagagcctcgagatgccatgtggacgagggcatgcccacggcacaccttaacctatgcgggggttgcgtaggtgaaagcaccattttgtggtgttatgaacacagcctgatagggcgtagcagagacctgctactccgctagtaaaaactctgctgtacatggcac

SEQ ID NO: 416 - DNA, 387 bp, Pestivirus B
  source 1..387: mol_type = genomic DNA
gtatacgagattagctaaagtactcgtatacggattggacgttgacaaaatattgaattgaaaatgtagggaatcttcccctcagcgaaggccgaaaagaggctaaccacgcccttagtaggactagcaaaaggaggggactagcggtagcagtgagttcattggatggccgaacccctgagtacaggggagtcgtcaatggttcgacactccttcagttaaggagtctcgagatgccatgtggacgagggcatgcccacggcacatcttaacccatgcgggggctgcatgggtgaaagcgccattcgtggcgttatggacacagcctgatagggtgtagcagagacctgctatcccgctagtaaaaaactctgctgtacatggcgc

SEQ ID NO: 417 - DNA, 387 bp, Pestivirus A
  source 1..387: mol_type = genomic DNA
cgtatacgaggatttaggaaaaactctcgtatacagattgggcactcaaaaataacaattaggcctagggatcaaatcctcctcagcgaaggccgaaaagaggctagccatgcccttagtaggactagcaaattgaggggggtagcaacagtggtgagttcgttggatggctgaagccctgagtacagggtagtcgtcagtggttcgacacctacggcgtgtaggtctcgagatgccacgtggacgagggcatgcccacagcacatcttagcctgggcgggggtcgctcaggtgaaagcggtttaaccaactgctacgaatacagcctgatagggtgctgcaggggcccactggactgctactaaaaatctctgctgtacatggcac

SEQ ID NO: 418 - DNA, 387 bp, unidentified
  source 1..387: mol_type = unassigned DNA; note = unclassified Sapelovirus sequence
ccccaatccactaaccttttccccctcctttaatcggactgatatttgtgttttgacgcttgttttccttttgcggatgtcggttgcgtggctggccaccacgggaaaaatggcaattgtggattgatgggtctacacattctcaccgaacgccttgtgttattaggggagtctaagtgtccatcatgaagcgagtgtactggtaagagaggagacctagctaggggcaatgggacggcgttgcctatccctaattagccatcgagatttctctggcgattacccagtgatggtcgggttgtcggggggcaacctgcttagctccttactgcctgatagggtcgcggctggccgtatcagtacactatagtcagttgatgttcgaat

SEQ ID NO: 419 - DNA, 387 bp, Rosavirus B
  source 1..387: mol_type = genomic DNA
taaggtagcagatgatttagtgaaaagctttggattgtttggagttttgtagcgatgctagtagtgtgtgtggacctccccacgtggtaacacgtgccccacaggccaaaagccaaggtgttgaaagcacccctactagtcccagaccctcccatctgggaactcctctcatgaaaaaccctagtaactaatgatttggcttctcatcaacctctctagtcaaggctgaaggatgcccggaaggtacccgcaggtaacgataagctcactgtggatctgatccggggctctggtgcgaccgactgtccggcgtagcagggttaaaaaacgtctaggcccttctaccccaagggattggggtttccccaatcattttagaagttcact

SEQ ID NO: 420 - DNA, 388 bp, Pegivirus C
  source 1..388: mol_type = genomic DNA
tagccactattggtgggtcttaaggggtggtcaaggtccctctggcgcttgtggcgaaaaagcgcacggtccacaggtgttggccctaccggtgggaataagggcccgacatcaggctcgtcgttaaaccgagcccattatccccctgggcaaacgacgcccacgtacggtccacgtcgcccttcaatgtctctcttgaccaataggcgatgccggcgaattgacaaggaccaatgggggccgggcgtcaggaaatggactcctgccgctgcccttcccgggggagtgggaaatgcatggggccacccagctccgcggcggcctgcagccggggtagcccaagagccttcgggtgagggcgggtggcatttttcttcctgtaccgatc

SEQ ID NO: 421 - DNA, 388 bp, unidentified
  source 1..388: mol_type = unassigned DNA; note = Bovine viral diarrhea virus genotype 2 strain 1373 polyprotein1 sequence
gtatacgagattagctaaagtactcgtatatggattggacgtcaacaaatttttaattggcaacgtagggaaccttcccctcagcgaaggccgaaaagaggctagccatgccctttagtaggactagcaaaagtagggggactagcggtagcagtgagttcgttggatggccgaacccctgagtacaggggagtcgtcaatggttcgacactccattagtcgaggagtctcgagatgccatgtggacgagggcatgcccacggcacatcttaacccatgcgggggttgcatgggtgaaagcgctaatcgtggcgttatggacacagcctgatagggtgtagcagagacctgctattccgctagtaaaaaactctgctgtacatggcac

SEQ ID NO: 422 - DNA, 388 bp, Pestivirus A
  source 1..388: mol_type = genomic DNA
acatggggtatacgagatttagatcaatctctcgtatacacattgggctatcaaaaaagaaaattaggcctagggaacaatcctcctcagcgaaggccgaaaagaggctagccatgcccttagtaggactagcaaattggggggggtagcaacagtggtgagcttgttggatggctgaagccctgagtacagggtagtcgtcagtggttcgacgccagagatgaggcctcgagatgccacgtggacgagggcatgcccacagcacatcttaatctgggcgggggtcgctcagacgaaagcggttgtaccaaccgttacaagcacagcctgatagggtgctgcagaggcccactgcactgctactaaaaatctctgctgtacatggcac

SEQ ID NO: 423 - DNA, 389 bp, Pegivirus C
  source 1..389: mol_type = genomic DNA
tagccactataggtgggtcttaagggtgggtcaaggcacctcttactcctgcggcgggacagcgcacggtccacaggtgatggccctaccggtgtgaataagggcccgacgtcaggctcgtcgttaaaccgagcccgttacccacctgggcaaacgacgcccacgtacggtccacgtcgccctacaatgtctctcttgaccaataggctatgccggcgagttgacaaggaccagtgggggccgggcgttatggggaaagaccccctgcgctgcccttcccggtggggcgggaaatgcatggggccacccagctccgcgggggcctgcacccggggtagcccaagaaccttccggtgaaggcgggtggcatttttctttcctgactaatc

SEQ ID NO: 424 - DNA, 390 bp, Pestivirus A
  source 1..390: mol_type = genomic DNA
acatggggtatacgagatttagctaaaactctcgtatacatattggacattccaaacaataattaggcatagggaaaatcctcctcagcgaaggccgaaaagaggctagccatgcccttagtaggactagcaaattgaggggggtagcagcagtggcgagttcattggatggctgaagccctgagtacagggtagtcgtcagtggttcgacgccttaggatctaaggcctcgagatgccacgtggacgagggcacgcccacagcacatcctaatccgggcgggggtcgctcggatgaaagcggttgtaataaaccgttatggacacggcctgatagggcgctgcaggggcccactgtgttgctactaaaaatctctgctgtacatggcac

SEQ ID NO: 425 - DNA, 391 bp, Pestivirus H
  source 1..391: mol_type = genomic DNA
gtatacgcccggttagctcatgtcggcgtatatgattgggtatcccaaattaatgatttggtttagggactaaattcccctagcgaaggccgaaataggttaaccataccttcagtaggacgagcataatgggggactagtggtagcagtgagctccttggattaccgaagccccgggtacagggtcgtcgtcaataaggttcgacgcatcaacgagtggatgcctcgagatgccatgtggacgagggcgtgcccacggtatgtcttaacccaagcgggggccgcttgggtgaaagatggtcgattatgtggccctttgggagtacagcctgatagggtgttgcagagacctgctatatcactagtataaaaactctgctgtacatggcac

SEQ ID NO: 426 - DNA, 391 bp, Pestivirus H
  source 1..391: mol_type = genomic DNA
gttgggtgtgtttgggccgggtagctcatgtcggcgtatatgattgggtatcccaaattaataatttggtttagggactaactcccctagcgaaggccgaaatgggttaaccataccttcagtaggacgagcgtaatgggggactagtggtagcagtgagctccttggattaccgaagccccgagtacggggtagtcgtcaatggttcgacgcatcaaggaatgcctcgagatgccatgtggacgagggcgtgcccacggtgaatcttaactcaagcgggggccgcttgggtgaaagagggtcattatatggctctttgggagtacagcctgatagggtgttgcagagacctgctacattactagtataaaaactctgctgtacatggcac

SEQ ID NO: 427 - DNA, 391 bp, unidentified
  source 1..391: mol_type = unassigned DNA; note = unclassified Pestivirus sequence
tgcataaccctgattgtaattggctgggttatgcatgtgagaacgcaaaattttttaaattatgttaccggctttgaggttggcggaccagagttaaccaggctctcagtacgacaccctcctaaacaaagtcggaactgctgactaggagactatgcactcagcactaagcccggagtaccgggcattctactacagctctgcactcaacgacggctcttgaggcctagagtccaggatggctgtgtaagtagaggacatgtccaagtgtgaggtgtaatccggtgggggttgccggatttgctactggtagaccagtagtcatagactgcctgatagggtcccggcggacggcctaggcttagcagtataatagtccgttgtattcaac

SEQ ID NO: 428 - DNA, 392 bp, unidentified
  source 1..392: mol_type = unassigned DNA; note = unclassified Picornaviridae sequence
taactccttggctagcaaggagctgtggccgccaaaagtggtgatacactgactaatactctacttgggtacagtgagttggtccctttggaaagtcacctgatgatctttcaattggggtaggctacgggtgaaaccccttctccctccatttgttatacaaatgtggagtgacaacgctaaggccctggatagaaatgagttctttatggacaagaatttctcaacagggggagcaccggtgtatgtctttgaatgcgtcttgtgactgaaaaaggagcaggcttattgtgttcacatagagttaaggtgtaccctatgagtttagggctactcaggggcatgttaggttttaaaatgctcatttattgttttctatgagttgagagaag

SEQ ID NO: 429 - DNA, 393 bp, unidentified
  source 1..393: mol_type = unassigned DNA; note = unclassified sequence
agcgaagcgatcggtgtctcgggcactgtgacgataagcaaactcagcatcagggacgaggctggaggaagaacctacttatctaagcgccccgtctgagcagcagcgtcgaaaatcaacttcgtcttcgtcgtgaactgcgacgactggttgtgcgaacggcaacgatcctagtcgtagtgttggttctcgcccgtcgagacgcgcccccgcggactcggcgcctgctgacgcgtcgtctccgacgcgacctagcagcacccaatcctaagagtgtgcgaagggtcagagctccgcgtcggagcccaactccccgcataccgtgacgggagatacgtcgtggtctcatggcgccccaaccgcggttgtcgctgggtgagatcaaaatggaca

SEQ ID NO: 430 - DNA, 393 bp, unidentified
  source 1..393: mol_type = unassigned DNA; note = unclassified sequence
gattttctggttatcccttttggacttggtaggggcccacgtgcccacccacctctgtgtgtgttgatttctaatcgatgcctggcagtggcggccacctctccttactggtaaacctccggtgagtgaagttgtcaagctacaggtaccgtgcaggatgaaatgcgcacatgtgaacaaactaggagtcatacaccgggtcaaactctggaaacggagtccgggactctgaccttggttgggtgagctcgaggcatcacattgatggacgcgattcgctatccttccctagtaggaccttgtggtgtacccctggttgggaatccagggctggtcgggtgcagggtgacagcctgttctccacctcaaccattgtaggagaaatcaacccct

SEQ ID NO: 431 - DNA, 395 bp, unidentified
  source 1..395: mol_type = unassigned DNA; note = unclassified Kobuvirus sequence
accacgtctttcctccagatcgacagtcctgctgtgtgaattcccattgcgcacttagtggtgtcactgtgcgctcccaatctcggccgcggagtgctgttccccaagccaaacccctggcccttcactatgtgcctggcaagcatatctgagaaggtgttccgctgtggctgccagcctggtaacaggtgccccagtgtgcgtaaccttcttccgtcttcggacggtagtgattggttaagatttggtgtaaggttcatgtgccaacgccctgtgcgggatgaaacctctactgccctaggaatgccaggcaggtaccccacccccgggtgggatctgagcctgggctaattgtctacgggtagtttcatttccaattcctttatgtcggagtc

SEQ ID NO: 432 - DNA, 396 bp, Pestivirus D
  source 1..396: mol_type = genomic DNA
ctctgcagatatcaggggtgtatacgaaagtagctcaagttcgtatacaaattgactatgaccaaaatagtattcggcgtagggacaccctccagcgaaggccgaacggggttaaccatacccttagtaggactagcagacggagggactagccatcatggtgagcttcctgaggggtctaagtcctgagtacaggacagtcgtcaatagttcgacacgtgcgagtcgcacgtctcgagatgctatgtggacgagggcatgcccaagacactttctctagcctgggcgggggtcgcccaggtgaaagcacctgataggtgttgggagtacagcctgatagggtgctgcagaggcccatgcataggctagtataaaaatctctgctgtacatggcac

SEQ ID NO: 433 - DNA, 396 bp, unidentified
  source 1..396: mol_type = unassigned DNA; note = unclassified Teschovirus sequence
gataagtgatagtccttggaagctaggtacttgttacgctagttttggattatcttgtgcccaacaattgtctttggacacttgttgtgtttaaacacagaaatctttgattattggttgtgaatttaatggattcttcccttgaaagacttgccttggcgcgggctagagcgcaattgtcaccaggtattgcaccaacggtggcgacagggtacagaagagcaagtactcctgactgggcaatgggactgcattgcatatccctaggcatctattgagatttctctggagcccaccagcatggagttcctgtatgggaatgcaggactggacttgtgctgcctgacagggtcgcggctggccgtctgtactttgtatagtcagttgaaactcatt

SEQ ID NO: 434 - DNA, 399 bp, Pestivirus F
  source 1..399: mol_type = genomic DNA
tacgcggggtataacgacagtagttcaagtgtcgttatgcatcattggccataacaaattatctaatttggaatagggacctgcgacctgtacgaaggccgagcgtcggtagccattccgactagtaggactagtacaaataggtcaactggttgagcaggtgagtgtgctgcagcggctaagcggtgagtacaccgtattcgtcaacaggtgctactggaaaggatcacccactagcgatgcctgtgtggacgaggacatgtccaagccaatgttatcagtagcgggggtcgttactgagaaagctgcccagaatgggtagttgcacatacagtctgataggatgccggcggatgccctgtattttgaccagtataaatattatccgttgtaaagcat

SEQ ID NO: 435 - DNA, 399 bp, unidentified
  source 1..399: mol_type = unassigned DNA; note = unclassified Pasivirus sequence
attttctggccgtgtagctgcttttgaccagtggctctgggttacttagccaaatcccccttccttcacccttttaaatttgatggtctgtgttgtttgttttgtcttgtctaaataatatataagatccttcccgccgatacagacctcgacagtctggtgtaggagggttggtgttattaatttgccccagaagagtgaccgtgacacatagaaaccatgagtacatgtgtatccgtggaggatcgcccgggactggattccatatcccattgccatcccaacaagcggagggtatacccactatgtgcgcgtttgcagtgggaatctgcaaatttagtcatactgcctgatagggtgtgggcctgcactctggggtactcaggctgttcatataat

SEQ ID NO: 436 - DNA, 400 bp, Pegivirus C
  source 1..400: mol_type = genomic DNA
ggtcatcttggtagccactataggtgggtcttaagggtgggtcaaggtccctctggcgcttgtggcgagaaagcgcacggtccacaggtgttggccctaccggtgtgaataagggcccgacgtcaggctcgtcgttaaaccgagcccatttcccacctgggcaaacgacgtccacgtacggtccacgtcgcccttcaatgtctctcttgaccaataggctttgccggcgagttgacaaggaccagtgggggccgggcagcaggggaaggacccctgttgtcgcccttcccggtggggatgggaaatgcatggggccacccagctccgcggcggcctgcagccggggtagcccaagaaccttcgggtgagggcgggtggcatttttcttcctataccgatc

SEQ ID NO: 437 - DNA, 401 bp, unidentified
  source 1..401: mol_type = unassigned DNA; note = unclassified Enterovirus sequence
tttgatcgttatccgcaaaacaactacgcaaagcctagtatcatcttcaaagatatgtggttggtcgctccgctataaacccaatagcagacctggcagatgaggctagaaattccccactggcgacagtgttctagcctgcgtggctgcctgcgtaccctgcatgggtacgaagccatatattggacaaggtgtgaagagccccgtgtgcttgttttgagtcctccggcccctgaatgtggctaaccttaaccctgcagctggtgtgtgcaatccagcacatggccagtcgtaatgagtaattgcgggatgggaccaactactttgggtgtccgtgtttcctgttttacctttatatttgcttatggtgacaatatatatataacatatatattggcatc

SEQ ID NO: 438 - DNA, 402 bp, Pegivirus A
  source 1..402: mol_type = genomic DNA
tggtcaccttggtagccactataggtgggtcttaagagaaggttaagattcctcttgtgcctgcggcgagaccgcgcacggtccacaggtgttggccctaccggtgtgaataagggcccgacgtcaggctcgtcgttaaaccgagcccatttcccgcctgggcaaacgacgcccacgtacggtccacgtcgcccttttaatgtctctcttgaccaataggttcatccggcgagttgacaaggaccagtgggggccgggggtcacagggatggaccctgggccctgcccttcccggcggggtggggaaagcatggggccacccagctccgcggcggcctgcagccggggtagcccaagaaccttcgggtgagggcgggtggcatttttcttcctataccgatc

SEQ ID NO: 439 - DNA, 403 bp, unidentified
  source 1..403: mol_type = unassigned DNA; note = unclassified Pasivirus sequence
gcggctggatattctggccgtgcaactgcttttgaccagtggctctgggtaacttagccaaagtgtccttctccctttccctattatatgttttatggctttgtctggtcttgtttagtttatatataagatcctttccgccgatatagacctcgacagtctagtgtaggaggattggtgatattaatttgccccagaagagtgaccgtgacacatagaaaccatgagtacatgtgtatccgtggaggatcgcccgggactggattccatatcccattgccatcccaacaagcggagggtatacccactatgtgcacgtctgcagtgggagtctgcagatttagtcatactgcctgatagggtgtgggcctgcactctggggtactcaggctgtttatataat

SEQ ID NO: 440 - DNA, 404 bp, unidentified
  source 1..404: mol_type = unassigned DNA; note = unclassified Pasivirus sequence
gctggactttctggctgcgcaactgcttttaaccagtggctctgggttacttagccaaaaccccctttccccgtaccctagtttgtgtgtgtattattattttgttgttgttttgtaaatttttatataagatcctttccgccgatatagacctcgacagtctagtgtaggaggattggtgatattaatatgccccagaagagtgaccgtgacacatagaaaccatgagtacatgtgtatccgtggaggatcgcccgggactggattccatatcccattgccatcccaacaaacggagggtatacccgctatgtgcgcgtctacagtgggaatctgtagatttagtcatactgcctgatagggtgtgggcctgcactctggggtactcaggctgtttatataat

SEQ ID NO: 441 - DNA, 405 bp, unidentified
  source 1..405: mol_type = unassigned DNA; note = unclassified Aalivirus sequence
gctcttccctccacctcctttcaacgtctggcccacgaaacgggccacttttcaatcttaaataactatcccttttcttgttttgactttccggttaagaataatatggatcacacaattggattttctctaaggataatggataggatactttcgggataccactccctttctgtgctaacacaaattctaattctctacatctcttatatgctcgaagaggtggtgctgaaatattgcaagccattcttgcatgtaggtggtttagactcaagatgaatgttgtgttactcaagacaagtgtagctatcaccatggtattggtagcgtgaatcggattaccggtagtagcgcaatcttccgccatggtgctctagtgactagaggacaacgacatggcattgg

SEQ ID NO: 442 - DNA, 405 bp, unidentified
  source 1..405: mol_type = unassigned DNA; note = unclassified Enterovirus sequence
caaaaacctcaaagatcgttatccgctcattaactacgcaaagcctagtaacatcttggatgtggtaaagttggtcgctccctgcattcccagcagtagacctggcagatgaggctggatgttccccactggcgacagtgatccagcctgcgtggctgcctgctcacccaaacgggtgagaagccttattactgacatggtgtgaagagccccgtgtgcttaatgtgagtcctccggcccctgaatgtggctaaccttaaccctgtagccgttgctcataatccaatgagtatgcggtcgtaatgcgcaagtacgggatgggaccaactactttgggtgtccgtgtttcttatttttctttatctgcgttatatggtgacaatttatagaatatagattgtcatc

SEQ ID NO: 443 - DNA, 405 bp, unidentified
  source 1..405: mol_type = unassigned DNA; note = unclassified Enterovirus sequence
tgtgcttgtaacgccatgggggaaatcacttgatcgaacgcctagtaccatcatgtctttgactaggcgttcgatcaagtgatttcccccatcactagtttggtcgatgaggctaggaattccccacgggcgaccgtgtcctagcctgcgtggcggccaacccagcagttgctgggacgccttttttagggacatggtgcgaagactcgcatgtgcttggttgtgactcctccggcccctgaatgcggctaaccttaaccctggagccttgtgctacaatccagtagcattaaggtcgtaatgagtaattccgggatgggaccgactactttgggtgtccgtgtttcctgttttttccaaatgttttcttatggtcacagcatatagcatatatatactgtgatc

SEQ ID NO: 444 - DNA, 407 bp, unidentified
  source 1..407: mol_type = unassigned DNA; note = unclassified Picornaviridae sequence
ccactgtatatacatttaatcatttccccttctttttggtctctcttgtacataaggataaaacccctctaacaaagcctgttcttcagactattaagtatgacaatatattacattatctaactacacatgaaggccgtcgtgctttctcacgccttcccacctacttccatcttcacagacattgggtagaggcactttatcctgaaggactccagcccacatccactcatttatcttctgagactttccattgtaaatatctttgcggccattttcttcagacgtgtgagtggcatgcaaacgttcaagtccctccttttattttagttcgtaggcaacttatttataatattctttgcaaattgaatcttcttgatagtcttcctttcttcctttcagtggca

SEQ ID NO: 445 - DNA, 407 bp, unidentified
  source 1..407: mol_type = unassigned DNA; note = unclassified Hepatovirus sequence
ggataccaatggaacgaccgctgcgcccggcggggttaacttgttgattagcaacaagctgtagtttctaaaagtcctgacaccataggtccacgtcccgacctttggcattttaacttcattttggtgaagtccattgatcttctaggaggagtaggctatgggtgaaactcctcatgctagtacctatattaggagatgcattgtgtaggtgaaggtttccggtagaggtgagttttacgacgcaacctctcaacggatgtgggcccatctcacacactagatgctttggatgaatccaatctgagggtgtcattgttagggatctggatactaggtgccctcccgagaggtcgtaggggtaatcaggggcatataggtttccacacattaaatgttattatgtt

SEQ ID NO: 446 - DNA, 410 bp, unidentified
  source 1..410: mol_type = unassigned DNA; note = unclassified Picornaviridae sequence
gaaacccgtatacaccggaccttttctcccctccctctccacttacctttttcccctcttcggcatgaaacaaggattattcaagtggaaacgcgatttaatatgcggctggccaccgcggaataacggcaattgtgtatctgctggaagccaagcctgcctagccgatagcccttgaccgggtgtgtaggatagcccaggaaccagcaatacgcgacaggttatggtagagtagatacctagccaggggcaatgggactgcattgcatatccctaatgaaccattgagatttctctggtcattacccggtgatggttactagaggggggcctctagtactagatctatactgcctgatagggtcgcggctggccgaccatgacctgtatagtcagttgatttgagcaat

SEQ ID NO: 447 - DNA, 410 bp, unidentified
  source 1..410: mol_type = unassigned DNA; note = unclassified Enterovirus sequence
ttgaagctgtagcgttcgttacccgcacacgtactgcgtgacggctagtagcatcttgcattttcctttaggtgtttcgctcattgtggttaccccaccacatagatcagggcaatggggctacacaatccccactggcgacagtggtgtagcccgcgtggtgccccgcccaggctttgcctgggacgccttaggaaagacagggtgtgaagaccttaatgcgctacgtgtgagtcctccggcccctgaatgcggctaatcctaaccccgtagccatggtgcgcaatccagcgcatgtgtggtcgtaacgagcaattacgggatggaaccgactactttgggtgtccgtgtttcactttttatttgaaattgtctcatggttacagatttgtgtatacagatttgtaatc

SEQ ID NO: 448 - DNA, 411 bp, Pegivirus C
  source 1..411: mol_type = genomic DNA
ccgacgcctatcttaagtgagacgtaatggccccgcgccgaactggcgaccggccaaaaggtggtggatgggtgatgacagggttggtaggtcgtaaatcccggtcatcctggtagccactataggtgggtcttaaagggaggctacggtccctcttgcgcttatggcgagaaagcgcacggtccacaggtgttggccctaccggtgtgaataagggcccggcgctaggcacgccgttaaaccgagcccgtcatccccctgggcaaacgacgcccatgtacggtccacgtcgcccttcaatgtctctcttgtaccaataggttttgccggcgttgttgacaaggaccagtgggggctgggcggtaggggaaggacccctgccgctgcccttcccggtggggtgggaaatgc

SEQ ID NO: 449 - DNA, 412 bp, Deltapapillomavirus 1
  source 1..412: mol_type = genomic DNA
ttagtcatactcaaggtgtaaatattcatttgatctttgtacagtttttataccatatttacattattataggttactggttgctacatcctggtcatagtcacatcatcatcataggtctaggtcacaattaggtttgtcagatactcaagacgacgtggaatctctcttgtcacctgaatcctatcctttactgtcctatcctatcctatactgcctttgttttgttatccaaagtcagcaagtgccatctttctccaagtgcaatgtcatctgcctgtaatcccaaaagctggtgtcatccttgtcagtagaacagtcaaactaagcctttgaaaagaaagcctcacacggaaaccttgtatgtatacctcgtgaaaaagctttgaactgccacgacattgacgcctgc

SEQ ID NO: 450 - DNA, 413 bp, unidentified
  source 1..413: mol_type = unassigned DNA; note = unclassified Sapelovirus sequence
gttgtatcccccataccttaccctcccttccacacaggacggacaaatggacttggacttacggcaagaacatatggtatggcttttggatacggatgaatggcagtagcgtggcgagctatggaaaaatcgcaattgtcgatagccatgttagtgacgcgctccggcgtgctcctttggtgattcggcgactggttacaggagagtaggcagtgaactatgggcaaacctctgcagtattactcagggggaatgtgcaattgagacttgacgagcgtctccttggagatgtggcgcatgctcttggcattaccatagtgagcttccaggttgggaaacctggactaggcctatactacctgatagggtcgcggctggccgcctgtaactagtatagtcagttgaaacccccc

SEQ ID NO: 451 - DNA, 414 bp, Tremovirus A
  source 1..414: mol_type = genomic DNA
ggagcgcacggtatatatgtgctcccgcatggcaggggcgtgctaccttgccccttgacgcatggtatgcgtcaaactgattttggatttgtcttaaggattagtcgctttgtgccgaaaatctctttgcgtttcacagaaccatcctaaccatggatgtagtatgggaggcgtgtataggggtgagtaggatctctcatagagggataggcatgccattcaaatccggggagtactccggctctgacattgggacatttgatttaaccggacctggttcagtatccgggttgtcctgtattgtcacggtgtatccgtcttggcatgttgaaaaggtatctttgggtaatcccttcctactgcctgatagggtggcgtgcccggccatgagagattaagggtagcattttaacc

SEQ ID NO: 452 - DNA, 415 bp, unidentified
  source 1..415: mol_type = unassigned DNA; note = unclassified Teschovirus sequence
cccctttgaacttgtaactgataagtgatagtccttggaagctaggcacttgctgcgctagttttggattatcttgtgcccaacactagtcttcggactcttgttgtgtttaaacacagaaattttgttatctggttatgaattcattggatcaatccttctgaaagacctgctctggcgcgagcgaaagcgcaattgtcaccaggtattgcaccaatggtggcgacagggtacagaagagcaagtactcctgactgggcaatgggactgcgttgcatatccctaggcacctattgagattcctctggggcccaccagcatggagttcctgtatgggaatgcaggactggacttgtgctgcctgacagggtcgcggctggccgtctgtactttgtatagtcagttgaaactcacc

SEQ ID NO: 453 - DNA, 415 bp, unidentified
  source 1..415: mol_type = unassigned DNA; note = unclassified Teschovirus sequence
ctccctttgaatttgtaactgataagtgatgatccttggaagctaggtacttgttacgctagttttggattgtcttgtgcccaacactagtcttcggactcttgttgtgtttaaacacagaaatctgattgtctggttgtggatttattggattaaccctttgaaagacctgctctggcgcgagctaaagcgcaattgtcaccgggtactgcaccaatggtggcgacagggtacagaagagcaagtactcctgactgggcaatgggactgcgttgcatatccctaggcacctattgagatttctctggggcccaccagcatggagttcctgtatgggaatgcaggactggacttgtgctgcctgacagggtcgcggctggccgtctgtactttgtatagtcagttgaaactcatc

SEQ ID NO: 454 - DNA, 415 bp, Rhinovirus B
  source 1..415: mol_type = genomic DNA
ggttgtacccacgaccaaaagcctttaaccgttacccgccaatcaactacgtaacggctagtaccatcatgtttttaatctggtgttcgatcaggtggtatcccccactagtctggtcgatgaggctaggaattccccacgggtaaccgtgtcctagcctgcgtggcggccagcccagcttatgctgggacgcctttttaaagacatggtgtgaagacccgcatgtgcttgattgtgagtcctccggcccctgaatgcggctaaccctaaccccggagcccagcaacataatccaatgttgtttgggtcgtaatgagtaattctgggatgggaccgactactttgggtgtccgtgtttccttttattcttatattgtcttatggtcacagcatatatatcatatatactgtgatc

SEQ ID NO: 455 - DNA, 416 bp, unidentified
  source 1..416: mol_type = unassigned DNA; note = unclassified Teschovirus sequence
cttccttttaattcgtaactgataagtgatagtccttggaagctaggtatttgttacgctagttttggattatcttgtgcccaacatttgttttcgaacatatgttgtgtttaaacacagaaatctagtttctttggttatgagtttaatggaatatccttttgaaagacttgccttggcgcgggctagagcgcaattgtcaccaggtattgcaccaatggtggcgacagggtacagaagagcaagtactcctgactgggtaatgggactgcattgcatatccctaggcatctattgagatttctctggagcccaccagcatggagttcctgtatgggaatgcaggactggacttgtgctgcctgacagggtcgcggctggccgtctgtactttgtatagtcagttgaaactcatt

SEQ ID NO: 456 - DNA, 419 bp, unidentified
  source 1..419: mol_type = unassigned DNA; note = unclassified Picornaviridae sequence
gggttttacgaaacccgtatacaccagaccttttctcccctccccctccacctaccttttccccctctttggaccgaaacaaggacacgtaagtggaaacgcgattttatatgtggttggccaccacggaataacggcaattgtctacatgtgggaagtgcaacctccctagccgataacccctgaccgggtgtgtaggataggaaaggtgcccactgtgggcgacaggttatggtagagtggatacctagccaggggcaatgggactgctttgcatatccctaatgaagtattgagatttctctgctcattacccggtgatggttgtgtggggggggccccatacactagatccatactgcctgatagggtcgcggctggccgaccataacctgtatagtcagttgaattcagccaag

SEQ ID NO: 457 - DNA, 419 bp, unidentified
  source 1..419: mol_type = unassigned DNA; note = unclassified Sapelovirus sequence
tattacggtaccggtatatcttagtccatttcccccttccctctccacttaccttttccccctcttgtgacggatacttttggttttgactgtatgctagaaaaccctctgatatctggatggcctccagggaataaaggcaattgtggatcgctggtattgggctctgtcggggaaagtaggttaaccataccactagtaccagtctgagcaccccagtgtgaagcgacagtacatagtagagttgggagtgaggcttgggaaatgggactgcattgcatatccctagtgacctattgagatttctctgggcaccaccttgctgagcttaccaggggggggcccctggtactggcccattactgcctgatagggtcgcggctggccgactgtgtattgtatagtcagttgaatttaac

SEQ ID NO: 458 - DNA, 419 bp, Sapelovirus A
  source 1..419: mol_type = genomic DNA
cttaaggtggttgtatcccctaccccatcctcccctccaaacaggacggacaatcggacctgacatctggcgagaagaattggaatggtatttggacacacttgaatggcagtagcgtggcgagctatggaaaaatcgcaattgtcgatagccatgttagtgacgcgcttcggcgtgctcctttggtgattcggcgactggttacaggagagtagacagtgagctatgggcaaacccctacagtgttacttagggggaatgtgcaattgagacttgacgagcgtctcgtagagatgtggcgcatgctcttggcattaccatagtgagcttccaggttgggaaacctggactgggtctatactacctgatagggtcgcggctggccgcctgtaactagtatagtcagttgaaaccccccc

SEQ ID NO: 459 - DNA, 420 bp, Pegivirus C
  source 1..420: mol_type = genomic DNA
gttggtaggtcgtaaatcccggtcatcttggtagccactataggtgggtcttaagggtgggtcaaggttcctcttacgcctgtggcgggacagcgcacggtccacaggtgttggccctaccggtgtgaataagggcccgacgtcgggctcgtcgttaaaccgagaccattacccgcctgggcaaacgacgcccacgtacggtccacgtcgcccttcaatgtctctcttgaccaataggctttgccggcgagttgacaaggaccagtgggggccgggtgcagggggaaggaccccctgtactgcccattccggcggggtgggaaatgcatggggccacccagctccgcggcggcctgcagccggggtagcccaagaatccctcgggtgagggcgggtggcatttttctttctgtaccaatc

SEQ ID NO: 460 - DNA, 420 bp, Aichivirus B
  source 1..420: mol_type = genomic DNA
cccggtggtttgatggtagctctcttatggttctgccctggcaaggctatagagtactgtgatccgctgcggacgccatcctggtaacaggacccccagtgtgcgcaacagtatgctcacggttcgccgtgtccaccatgactggaacactgctttcatgaaacagtgtgtgtccaatccctgtgatcagtatcaaccacaccacctaggaatgctaggaaggtaccccaattcgttgggatctgatcctaggctaattgtctacggtggtgctcctttttattttcacttcacttctctggtcacaactgcttgattctgtgtttgctgcttcctccgctctcactgccattctcaagtgttcacactgtccaagttcctttggttgatctcttccacttgccactgtcaactcttgtc

SEQ ID NO: 461 - DNA, 421 bp, unidentified
  source 1..421: mol_type = unassigned DNA; note = unclassified Teschovirus sequence
ccccccctcctttgaatttgtaactggtaagtgataatccttggaagctaggtacttgttacgctagttttggattgtcttgtgcccaacattggtcttcggacttctgttgtgtttaaacacagaaattttaacacctgactatgaattcaatggaccaccccttttgaaagacctgctctggcgcgagctaaagcgcaattgtcaccaggtactgcaccaatggtggcgacagggtacagaagagcaagtactcctgactgggcaatgggactgcattgcatatccctaggcacctattgagacttatctggggcccaccagcgtggagttcctgtatgggaatgcaggactggacttgtgctgcctgacagggtcgcggctggccgtctgtactttgtatagtcagttgaaactcacc

SEQ ID NO: 462 - DNA, 421 bp, Enterovirus C
  source 1..421: mol_type = genomic DNA
agtctggacatccctcaccggcgacggtggtccaggctgcgctggcggcctacctgtggtccaaagccacgggacgctacatgtgaacaaggtgtgaagagcctattgagctacaaaagagtcctccggcccctgaatgcggctaatcccaaccacggatcaagggtgcacaaaccagtgtacaccttgtcgtaacgcgcaagtctgtggcggaaccgactactttgggtgtccgtgtttcctttttaattttgatggctgcttatggtgacaatcatagattgttatcataaagctaattggattggccatccggtgagagtgaaatatattgtttacctccctgttgggtttactctaactaacttctccatttataaacttgtcatcacagttttaataattagaagtgcagtttaca

SEQ ID NO: 463 - DNA, 423 bp, Pegivirus C
  source 1..423: mol_type = genomic DNA
catggacgaaagcccgtggatggacggtgacagggttggcaggtcgtaaatcccggccgccctggtagcgggtataagtctgagggaaacccactagaggcttacgtgttcttgtccgagtggacgtgcacggtccacaggagacgcctattccggtgtgaataataggccgactcgagcggagtcgttaaactgaggaccgtctgagagatggtaacttggcctgcgtacgggaacgccgctaaagaatacagtgggttaagtccggcgggttggcaatcccagcagggcgggggggttctactgttgaatcctgccagttcctctcagatggtaggcatggggggacccagctccgcggcgcgctacagccggggtagcccaaaatccttcgggtgagggcgggtcccatgtccctttttg

SEQ ID NO: 464 - DNA, 423 bp, Pegivirus C
  source 1..423: mol_type = genomic DNA
gtgcaagccccacaaaccgacgcctatttaaatagacgttaagaaccggcgcctgcccggcgaccggccaaaagttggtggatgggtgatgccagggttggtaggtcgtaaatcccggtcatcttggtaaccactataggtgggtcttaagggttggtcaaggtccctctgaaccctgtggcgagaaagcgcacggtccacaggtgttggccctaccggtgtgaataagggcccgacgtcaggctcgtcgttaaaccgagcccattacccacctgggcaaacaacgcccacgtacggtccacgtcgcccttcaatgtctctcttgaccaataggctttgccggcgagttgacaaggaccagtgggggctgggcgtcgggggaaggacccccggcgctgcccttcccggtggggtgggaaatgc

SEQ ID NO: 465 - DNA, 424 bp, Hepatovirus G
  source 1..424: mol_type = genomic DNA
gtcttcttttatccgggctcacgtgatgccaatggtccgacccatgcgcccgtgggggttaacacatggattagccatgtgctgtaggccctaaaagtcacgttcacgtaaggcttggatgaaactcatgtctgttaactgagggtggtaagttacattgatcttctaaagagggtaggctacgggtgaaaccctctaggttagtactcatattgagagatacctccagtaggtgaaggtttccggatattggtgagtttaacgacaataaccattcaacggatgtgggcccacctcactggttagatgccttgtaatccaacacccaaggggatatgagtgaattcttagtcccaagtgaccctcccgaaaggttgtaggggtactcaggggcatttaggttttccacatttaaagtgaattg

SEQ ID NO: 466 - DNA, 426 bp, unidentified
  source 1..426: mol_type = unassigned DNA; note = unclassified Teschovirus sequence
ccccccccctccccctttgaacttgtaactggtaagtgatgatccttggaagctaggtacctgttacgctagttttggattatcttgtgcccaacactagtctttggacttctgttgtgtttaaacacagaaatctgattgcttggttatgaattcactggactaacccttttgaaagacctgctctggcgcgagctaaagcgcaattgtcaccgggtattgcaccaatggtggcgacagggtacagaagagcaagtactcctgactgggcaatgggactgcattgcatatccctaggcacctattgagatttctctggggcccaccagcgtggagttcctgtatgggaatgcaggactggacttgcgctgcctgacagggtcgcgggtggccgtctgtactttgtatagtcagttgaaactcacc

SEQ ID NO: 467 - DNA, 426 bp, Teschovirus A
  source 1..426: mol_type = genomic DNA
ttgaaaccccctccctttgaatttgtaattgataagtgatgatccttggaagctaggtacttgatacgctagttttggattgtcttgtgcccaacattagtctttggacttctgttgtgtttaaacacagaaattttgttatctggctacgaattcattggattaatccctctgaaagacctgctctggcgcgagcgaaagcgcaattgtcaccgggtattgcaccaatggtggcgacagagtacagaagagcaagtactcctgactgggcaatgggactgcattgcatatccctaggtacctattgagatttctctggggcccaccagcgtggagttcctgtatgggaatgcaggactggacttgtgctgcctgacagggtcgcggctggccgtctgtactttgtatagtcagttgaaactcact

SEQ ID NO: 468 - DNA, 426 bp, Teschovirus A
  source 1..426: mol_type = genomic DNA
cccccctcctctccttttggactcgtaactgataagtggtagtccttggaagctaggtactcgttacgctagttttggattatcttgtgcccaacattggacctcggtcctgtgttgtgtttaaacacagaaatcttgacacttggttatgaattcattgtatcaacccttttgaaagacctgctctggcgcgagcaaaagcgcaattgtcaccaggtattgcaccaatggtggcgacagggtacagaagagcaagtactcctgactgggtaatgggactgcattgcatatccctaggcacctattgagatttctctggggcccaccagcatggagttcctgtatgggaatgcaggactggacttgtgctgcctgacagggtcgcggctggccgtctgtactttgtatagtcagttgaaaagcacc

SEQ ID NO: 469 - DNA, 427 bp, Pegivirus A
  source 1..427: mol_type = genomic DNA
ctggacgaaagcccgtggacgggcggtgacagggttggcaggtcgtaaatcccggccgccctggtagcgggtataagtctggaggaaacccgtgaaccggcagcgtgaagctctgctagcgaacgtgcacggtccacaggagacgccgattccggtgtgaataatcggccgactcgagcggagtcgttaaactgaggaccatcagggagatggcaacttggcttgcgtacgggaacgccgctaaagtcacagtgggttaagtccggcgggttgacaatcccagcaaggcgagggggtgctattgttgcaccctgccagtccctcccttttggtaggcatggggggacccagctccgcggcgcgctacagccggggtagcccaaaatccttcgggtgagggcgggtcccatgtcccttttattcaggc

SEQ ID NO: 470 - DNA, 427 bp, Pegivirus C
  source 1..427: mol_type = genomic DNA
tggacgaaagcccgtggatggacggtgacagggttggcaggtcgtaaatcccggccgccctggtagcgggtataagtctgagggaaacccactagaggcttacgtgtacttgtccgcgtggacgtgcacggtccacaggagacgcctattccggtgtgaataataggccgactcgagcggagtcgttaaactgaggaccatttgtaagatggcaacctggcctgcgtacgggaacgccgctaaagaatacagtgggttaagtccggcgggttggcaatcccagcagggcggggggactctattgttgagccctgccagttccttacaagtggtaggcatggggggacccagctccgcggcgcgctacagccggggtagtccaaaatccttcgggtgaggacgggtcccatgtccctttttatggctc

SEQ ID NO: 471 - DNA, 427 bp, Pegivirus D
  source 1..427: mol_type = genomic DNA
cggcgcggtgttttgggttcagggcagtaggggcagccgggccagcagtagctggctcctggtaccaccaccctacccggacgacctccctcgcgaaaggtcgccacggtctgtggctcgacgacgcctacaattcagtccgaggggcgcagccctcgttaaactcagacttgattcctcgcctttgatctggccaggggtttaagtgaacgccgcccttttaatgtttaatagggttctttcccggcgggttgacaaacacttccctgggcttttcttcggcttcggtttcatgttgcttcggcacccatgagcgcacaggggggggaccctgcgacagtccgccaagaggaaaatccttcgggtgacctcgtgcgcaacccaatccctttctcttccacatggcgtgtctgtggtgcatgctgtg

SEQ ID NO: 472 - DNA, 428 bp, unidentified
  source 1..428: mol_type = unassigned DNA; note = Sicinivirus sp. strain RS/BR/2015/1R-1 polyprotein gene, complete1 sequence
tggctggaagcattcagtttctggatttgttggtttgtggtgattagtagaccccctggaggtacccgttctggatctgaccagggacccgtgactataccgttccggtaattcgggtttaaaactatgaacgtcaccacccattttcttttcctattttattttttcttatattctgatatacgtgtgagtattgatgttccctgatctttgtgtctggtctgcattttcagttattcaatttggttgggctgggctctttatttagatgtttttagaggtctttcttgttattgtagcgctcgttgttgtggtattgtctcctagcgaattatcccagctgttgactatttgcatctacaactttgtcttgatttttctctggttatttggtaccttagagctccccaattatcccaccattcatc

SEQ ID NO: 473 - DNA, 430 bp, unidentified
  source 1..430: mol_type = unassigned DNA; note = unclassified Sapelovirus sequence
cccctccacccttaaggtggttgtatcccacataccccaccctcccttccaaagtggacggacaactggattttgactaacggcaagtctgaatggtatgatttggatacgtttaaacggcagtagcgtggcgagctatggaaaaatcgcaattgtcgatagccatgttagtgacgcgcttcggcgtgctcctttggtgattcggcgactggttacaggagagtaggcagtgagctatgggcaaacctctacagtattacttagagggaatgtgcaattgagacttgacgagcgtctctttgagatgtggcgcatgctcttggcattaccatagtgagcttccaggttgggaaacctggactgggcctatactacctgatagggtcgcggctggccgcctgtaactagtatagtcagttgaaaccccccc

SEQ ID NO: 474 - DNA, 430 bp, unidentified
  source 1..430: mol_type = unassigned DNA; note = unclassified Sapelovirus sequence
cctccacccttaaggtggttgtatccccataccctaccctcccttccaaagcggatggatatacggacctgaacttttggcgagtacatatggtatgattattggatacaccctgaatggcagtagcgtggcgagctatggaaaaatcgcaattgtcgatagccatgttagtgacgcgcttcggtgtgctcctttggtgattcggcgactggttacaggagagtaggcagtgagctatgggcaaacctctacagtattacttagagggaatgtgcaattgagacttgacgagcgtctcctagagatgtggcgcatgctcttggcattaccatagtgagcttccaggttgggaaacctggactgggcctatactacctgatagggtcgcggctggccgcctgtaactagtatagtcagttgaaaccccccc

SEQ ID NO: 475 - DNA, 430 bp, unidentified
  source 1..430: mol_type = unassigned DNA; note = unclassified Enterovirus sequence
cgcgaggcataggttgtacccacggccaaaaaccttcaaccgttacccgccaatcaactacgtaacagctagtatcatcatgtctttgtctaggcgttcgatcaggtggttttcccctccactagtttggtcgatgaggctaggaaatccccacgggtgaccgtgtcctagcctgcgtggcggccaacccagcatcagctgggacgccttttcagagacatggtgtgaagactcgcatgtgcttgattgtgattcctccggcccctgaatgcggctaacctcaaccccggagccttgtattgcaatccagcaatattaaggtcgtaatgagcaattctgggacgggaccgactactttgggtgtccgtgtttcctgtttttcataaatttttcttatggtcacagcatatagtacatatatactgtgatc

SEQ ID NO: 476 - DNA, 431 bp, unidentified
  source 1..431: mol_type = unassigned DNA; note = unclassified Enterovirus sequence
aggtcgatgagtcactgcattccccacaggcgactgtggcagtggctgcgttggcggcctgcctatggggcaacccataggacgctttaatgttgacacggtgcgaagagtctactgagctagttagtagtcctccggcccctgaatgcggctaatcctaactgcggagcgcacaccagcaaaccagctggtaatgcgtcgtaacgggcaactctgcagcggaaccgactactttgggtgtccgtgtttccttttattcttattatggctgcttatggtgacaatctaagattgttatcatatagctattggattggccatccggtgactaacagacacatcatttacctttttgttggatttgttccactaaactcactctcatatcaaaccttattgtacatccttaagtccaattatttaaagcaact

SEQ ID NO: 477 - DNA, 432 bp, Pegivirus C
  source 1..432: mol_type = genomic DNA
gggtgatgacagggttggtaggtcgtaaatcccggtcatcttggtagccactataggtgggtcttaagggctggtcaaggtccctctggcgcttgtggcgagaaagcgcacggtccacaggtgttggccctaccggtgtgaataagggcccgacgtcaggctcgtcgttaaaccgagcccgttacccacctgggcaaacaacgcccatgtacggtccacgtcgcccttcaatgtctctcttgaccaataggctttgccggcgagttgacaaggaccagtgggggttgggcggtgggggaaggacccctttcgctgcccttcccggtggggcgggaaatgcatggggccacccagctccgcggcggcctgcagccggggtagcccaagaaccttcgggtgagggcgggtggcatttccttttctgtaccgatc

SEQ ID NO: 478 - DNA, 433 bp, Parechovirus A
  source 1..433: mol_type = genomic DNA
ctctattagtgagataccacgcttgtggaccttatgctcacacagccatcctctagtaagtttgtaagacgtctggtgacgtgtgggaacttgtgggaatcaatattttgctttaaagcatccattagccagcggataaaacacctggtaacaggtgcctctggggccaaaagccaaggtttaacagaccctagtggattggtttcaaaacctgaaatattgtggaacacactcagtacctactgatctggtagtaatgcaagcactagttgtaaggcccacgaaggatgcccagaaggtacctgtagggaacaagagacactatagatctgatctggggctggctacctctattttggtgagtcagttaaaaaacgtctagtgggccaaacccaggggggaccctggtttccatttattttacaaaggcact

SEQ ID NO: 479 - DNA, 433 bp, unidentified
  source 1..433: mol_type = unassigned DNA; note = unclassified Picornaviridae sequence
agtagtggccgtaagccacttttctttctttataacctatcactatactccaacttaatcttctctacttggactaggatctactggttatcgatgagtcgtgatgcttagtgatttggatagggaaatcccacctgagggtaccgatggtatcactcaaacgggtaggggagatacccatttgctattggctgaaccggattaccgatgtacgccagtattagcagtggggcaaatacctccccgagcattatggttagagacagaactacgggtgctagccccggtggcattgcctagtagggttccgacctaatggtattggaaaccacccgtagtaaggtgagtgttggggaacctcaccagtgtctgttactgcctgatagggtcgcggctggccgaatcataatgcttaatgtcagttgaactagtc

SEQ ID NO: 480 - DNA, 438 bp, Rhinovirus C
  source 1..438: mol_type = genomic DNA
ttccccggacgtgtgaataggctccaccaggggctgaagctgtagcgttcgttacccgcactgctactacgcaagggttagtatctaactgaaaacattgtggagtttcgctcagcagaaccccactgtagatcggggtaatggggctacacaacccccaccggcgacggtggtgtagcccgcgtggtgccccgcctgaggcttgtgcctcaggacgccacaatgttgacagggtgagaaggcctacgtgtgctagcagtgagtcctccggcctctgaatgcggctaatcctaaccccatagccatcacacacaatccagtgtgcaggtggtcgtaacgggtaactatgggatggaaccgactactttgagtgtccgtgtttcctattttacctttacatgtcttatggtcacaatatagtgtatacatattgtgatc

SEQ ID NO: 481 - DNA, 439 bp, unidentified
  source 1..439: mol_type = unassigned DNA; note = unclassified Enterovirus sequence
gttaccccggagcggagtatagatggccaccgctgtcaaaagctcttaaccgttacccgccagttaactacgcaacggctagtagcatcctgttgccttcatggcgttcgatcaggtgagacttccctcctcactagtctggtcgatgaggctgagaactccccacgggcgaccgtgtctcagcctgcgtggcggccagcccagcttttgctgggacgccttgattgagacatggtgtgaagacccgcgtgtgcttaactgtgagtcctccggcccctgaatgcggctaacctaaaccctggagccttgaaacacaatccagtgttcgcaaggtcgtaatgagcaattccgggacgggaccgactactttgggtgtccgtgtttcctttttacctttcaattgttcttatggtcacaatataagtgttatattgtgatc

SEQ ID NO: 482 - DNA, 439 bp, unidentified
  source 1..439: mol_type = unassigned DNA; note = unclassified Enterovirus sequence
tccccggcatgagaggaatagactctttcagggttgaagccacgagtgtcgttacccgcactggtactacgcaaagcctagtaacatcttgaaactctttttggttggtcgttccactagttaccccctagtagacctggcagatgaggcaggacgctccccactggcgacagtggtcctgcctgcgtggctgcctgcacacccttcggggtgtgaagccaaaagaaagacaaggtgtgaagagccccgtgtgctaccagtgaatcctccggcccctgaatgcggctaatcttaccccacagctattgcacacaatccagtgtgtatgtagtcgtaatgagcaattgtgggacggaaccgactactttgggtgtccgtgtttccttttattcccatgtttctgcttatggtgacaatactgacgtatagtgttgttacc

SEQ ID NO: 483 - DNA, 439 bp, Enterovirus C
  source 1..439: mol_type = genomic DNA
tgtagatcaggctgatgagtcactgcactcctcacgggcgaccgtggcagtggctgcgttggcggcctgcctatggggcaacccataggacgctctaaagtggacatggtgcgaagagtctattgagctagttagtagtcctccggcccctgaatgcggctaatcccaaccacggagcaagtgctatcaaaccagagagtggcttgtcgtaatgcgcaagtctgtggcggaaccgactactttgggtgaccgtgtttccttttatttttatcgtggctgcttatggtgacaatctcagattgttatcataaagcaaattggattagccatccggtgaaagtcaaatcgattatttacttacttgttagtttttctccactaacaccacaaacacttaaaattattgaaatagtgctgctaattagataccactatcata

SEQ ID NO: 484 - DNA, 442 bp, unidentified
  source 1..442: mol_type = unassigned DNA; note = unclassified sequence
aagcgactcttccgacgacgaggagcagtgggacgccttcgagtcaactgaccgcccgaagaaggagaaacggcgggaacagaagactcgagagatcacccagccccgatctccaaggaaaaagtcaccgccgcgacactaaacgacctccacccctgcattgagtctgccaataaaccctcgaatactttctgtcgtcctcttttttcctttaacctttcgtgggagagcagcgccgcgcggtcctcctcctctttccgacaccgttccatcgcattcaggaacgggtccaacccctcaccgcaattacgcacttccgcaaggccacgcaaaaagtgaccattgcaccgtgccaaacccctccctcagttaatattaacagccgtcctcaatatccttctaccttccgtgacaggacacagtctccgaacaacccagagca

SEQ ID NO: 485 - DNA, 443 bp, Sapelovirus A
  source 1..443: mol_type = genomic DNA
acactcatttcccccctccacccttaaggtggttgtatcccctacaccctaccctcccttccacataggacgaataaacggacttgagattaaggcaagtacataaggtatggtttttggatacacttaaatggcagtagcgtggcgagctatggaaaaatcgcaattgtcgatagccatgttagcgacgcgcttcggcgtgctcctttggtgattcggcgactggttacaggagagtagacagtgagctatgggcaaacccctacagtattacttaggggaatgtgcaattgagacttgacgagcgtctctttgagatgtggcgcatgctcttggcattaccatagtgagcttccaggttgggaaacctggactgggtctatactgcctgatagggtcgcggctggccgcctgtaactagtatagtcagttgaaaacccccc

SEQ ID NO: 486 - DNA, 443 bp, Sapelovirus A
  source 1..443: mol_type = genomic DNA
acacccatttcccccctccacccttaaggtggttgtatcccctataccctatcctcccttccaaacaggatggacaaatggacttgacattatggcaagtacataaggtatggtctttggatacacctgaatggtagtagcgtggcgagctatggaaaaatcgcaattgtcgatagccatgtcagtgacgcgcttcggtgtgctcctttggtgattcggcgactggttacaggagagtaggcagtgagctatgggcaaacccctgcagtattactcaggggaatgtgcaattgaggcttgacgagcgtctcttagagatgtggcgcatgctcttggcattaccatagtgagcttccaggttgggagacctggactgggcctatactacctgatagggtcgcggctggccgcctgtaactagtatagtcagttgaaaacccccc

SEQ ID NO: 487 - DNA, 443 bp, Kappapapillomavirus 1
  source 1..443: mol_type = genomic DNA
ctacgtctgataagattgatctgaaatctgagaatagagatttatttagaattgtttcatattcgggaaccgtgcagtggagagcattgtgcggtccttgcagacggggggtggggacattgcctcaaatacctttgcttgaaaggcctttgccaacacagcctttgtgcaactgcagcttttgcagcccattgcttgcagaagcagcacctttagttactgtagattctggaggtggttccagatcagcgattcctactgggccttgcgactgcgaggagtgcagtggtaataggacacccgacggggaggaggaaccaggagcaagaaatacaagtagccctgacagttctgtttgtggttgtcctctttgcgagggagaaattattaacgtttaagcttcttgctcatatttggggcgtaggtataataaagcaaaaatt

SEQ ID NO: 488 - DNA, 445 bp, synthetic construct
  source 1..445: mol_type = other DNA
accacaaacactccagtttgttacactccgctaggaatgctcctggagcaccccccctagcagggcgtgggggatttcccctgcccgtctgcagaagggtggagccaaccaccttagtatgtaggcggcgggactcatgacgctcgcgtgatgacaagcgccaagcttgacttggatggccctgatgggcgttcatgggttcggtggtggtggcgctttaggcagcctccacgcccaccacctcccagatagagcggcggcactgtagggaagaccggggaccggtcactaccaaggacgcagacctctttttgagtatcacgcctccggaagtagttgggcaagcccacctatatgtgttgggatggttggggttagccatccataccgtactgcctgatagggtccttgcgaggggatctgggagtctcgtagaccgtagcac

SEQ ID NO: 489 - DNA, 445 bp, Enterovirus B
  source 1..445: mol_type = genomic DNA
gcacaacccaagtgtagatcaggctgatgagtcaccgcattccccacgggtaaccgtggcggtggctgcgttggcggcctgcccatgaggcaactcatgggacgcttcaatactgacatggtgcgaagagtctattgagctaattggtagtcctccggcccctgaatgcggctaatcctaactgcggagcagatacccacatgccagtgggcagtctgtcgtaacgggcaactctgcagcggaaccgactactttgggtgtccgtgtttccttttatttctattttggctgcttatggtgacaattgagagattgttaccatatagctattggattggccatccggtgacaagtagagcaattatctacctatttgttggctttgttccactgaattttagagttctaaaaaccttaacttcattttagcactcaatacggcaaa

SEQ ID NO: 490 - DNA, 446 bp, unidentified
  source 1..446: mol_type = unassigned DNA; note = unclassified Enterovirus sequence
gcacttctgtttccccggacgtgtgaataggcctcaccaaggctgaagctgtagcgttcgttatccgctcacctactgcgcaaagactagtaactaactagatacttagtggtgtttcgctcagcagtaccccactgtagatcggggcaatgaggctacgcatcccccactggcgacagtggcgtagcctgcgtggtgccctgcccaggcttcggtctgggacaccactatgttgacagggtgtgaagaccggcgtgcgctaggtgtgactcctccggcccctgaatgcggctaatcctaaccccgcagccaccgcatgcaacccagcatgtagatggtcgtaacgagtaattgtgggatggaaccgactactttgggtgtccgtgtttcctgtttttctttattgttgtcctatggttacaaatttgtgtatcagatttgtgacc

SEQ ID NO: 491 - DNA, 449 bp, Rhinovirus C
  source 1..449: mol_type = genomic DNA
agctctgcagatatctccccggacgtgtgaataggccctaccagggctgaagctgtagcgttcgttatccgcatgcctactgcgcaaaggttagtaactaactagatacttagtggtgtttcgctcagcagtaccccactgtagatcagggtaatgaggctacgcatcccccactggcgacagtggcgtagcctgcgtggtgccctgcccaggtttatacctgggacaccactatttggacagggtgtgaaggccagcgtgcgctaggcatgagtcctccggcccctgaatgcggctaatcctaaccctgcagccattgcatgcaaaccagcatgttggtggtcgtaatgagcaattgcgggatggaaccgactactttgggtgtccgtgtttcttgtttttccattaattgtcttatggttacaagtttgtgcaacaaatttgtgacc

SEQ ID NO: 492 - DNA, 450 bp, Pegivirus A
  source 1..450: mol_type = genomic DNA
tagagtggttgcgctggaatctggacgaaagccagcggatgggtggtgacagggttggcaggtcgtaaatcccggccatcctggtacctggtataagtctgaaggaacgcgcaagcaactagtgcgatttgttggcaaagtttgagtgcacggtccacaggtgacgcctataccggtgtgaataataggccgactcgagcggagtcgttaaactgaggacccccttggcgatcgcaacttggcctgcgtacgggaacgccgctaaagtcacagtgggttaataccggcgggttgacaatcccagcagggcgggggggagctactgttgcatcctgcgagttccgtcttgggggtaggcatggggtggcccagctccgcggcgcgctacagccggggtaggccaaaaatccgaaaggtgaggccgggccacatgtccgtttttatttaccc

SEQ ID NO: 493 - DNA, 452 bp, Pegivirus B
  source 1..452: mol_type = genomic DNA
taaatcccggtccaggtttattcagtatatgataggtggagtcgagccccccgaccggggctctgtgaccactgtccagccggacgaggtggtgaaagttgttcgggcacggtccacaggttgggttcaccggtgtgaatagagccccgtctcgagcggagacgttaaacttagatggtctgcaggatggcaacgcggcccgcgtacgggaacgtcgcaaaataccttcgggaacagtgcatgcagcgggttgtcaaacccagcggtggcgcgctccggagaggtggagccctcaatggaggccagttccctgcagaaccagcccttcggggcaggcatggccccccccagccggcgcggcgctacacgcggcaagaggaagagccttcgggtgacctcgggggggatttgtccctttcaacccaatgagagttcgtgcgttggtcgcagtc

SEQ ID NO: 494 - DNA, 455 bp, Sapelovirus A
  source 1..455: mol_type = genomic DNA
cgcatgtattccacactcatttcccccctccacccttaaggtggttgtatccacttaccctatcccccccctccaaagcggacggactcttggacctgaaactctggcaagttaaatgataagatatctggatacacttgaatggcagtagcgtggcgagctatggaaaaatcgcaattgtcgatagccatgttagtgacgcgcttcggcgtgctcctttggtgattcggcgactggttacaggagagtagacagtgagctatgggcaaactcctacagtattacttaggaggaatgtgcaattgagacttgacgagcgtctcttagagatgtggcgcatgctcttggcattaccatagtgagcttccaggttgggaaacctggactgggtctatactacctgatagggtcgcggctggccgcctgtaactagtatagtcagttgaaaccccccc

SEQ ID NO: 495 - DNA, 455 bp, Enterovirus C
  source 1..455: mol_type = genomic DNA
gcagtagagatgggagtgtagcttaggtcgatgagtctggacattcctcaccggcgacggtggtccaggctgcgttggcggcctacctgtggcccaaagccacaggacgctagttgtgaacaaggtgtgaagagcctattgagctacaaaagagtcctccggcccctgaatgcggctaatcccaaccacggagcaagtgctcacaaaccagtgagtggcttgtcgtaacgggtaactctgtggcggaaccgactactttgggtgtccgtgtttccatttatttttacaatggctgcttatggtgacaatcgttgattgttatcataaagcgatttggattggccatccggtgaaagtgaaatatattatttatctttttgttggattcgctccaatcaactcctttacttacaaactcatcacaacagtactactaattaggaacatataccact

SEQ ID NO: 496 - DNA, 455 bp, unidentified
  source 1..455: mol_type = unassigned DNA; note = unclassified Enterovirus sequence
tgcacttctgtttccccggtactagggtgttaaacttccccagaggttgaagcccgatgtatcgttacccgcatggttactaagcagagcctagtagcatcttgctttgcatatgagctggtcgttcagtcagtaaaccccctgatagacctggcagatgaggctggaaataccccactggtaacagtgttccagcctgcgtggctgcctgcccctcttttgaggggaagcccatatgtagacaaggtgtgaagagccgcgtttgctaactatgagtcctccggcccctgaatgcggctaatccaaccccacagctactgcgcagaaaccactgcgtaggtagtcgtaatgagcaattgtgggacggaaccgactactttgggtgtccgtgtttcctgttttactttacattgctcatggacacaacatatataaaatcgtatatgttgttcacc

SEQ ID NO: 497 - DNA, 457 bp, Avisivirus C
  source 1..457: mol_type = genomic DNA
gggtatggtggttaaccccgtccactgggcatctttgccctctcagaagtggatcaatccaccccaactccccccctggttacctgagccacagtggactccggtgacgaagctagggaccccaatacctcaagtgccaagagagtccccccctcgcgagaggtgctcttgggcccaaaaggctagttggcagagtgaagtgaaggaagctgctaacgtggtgaccttaagcgtaattcgaagctgacctttgaggttaaccctagtggaccactggaggaatctgtggaggtggtggttaggaaagttggccacttgtgagtagatgcccagaaggcataaggctgatctggggccagtgactataccgttccggtaaacctggtataaaaaccatgaaagcaagtgggtgaaattttctctttttatccttcattcagcagttgatattggcaaa

SEQ ID NO: 498 - DNA, 460 bp, unidentified
  source 1..460: mol_type = unassigned DNA; note = Picornaviridae sp. isolate ybb044pic01nc genomic sequence.1 sequence
aaaagactcgctaactcaaaactctctcactctcactctccactcccaaactattatccgactaagtgacccactaactaatccaaaattccaatcctacactatcttgcacctttcactctcctctatctaatctataaagctcttacaactaaacctctccataccccattacaaccgcaaaatctacgaattcaaataaactcccaattgcccgaaaattcacttccacctaattctctcaaaatttctgactcactctcagaacaaaccaattcagtgcaaactgaacatacactctcccctgaacaaacgcagcaactcctccaaaccactcttaagactgcgtctcaaatttttgctcaactccaagagaaacaaatctcttctccccagaaagttaatactccaacgctctctgattcctcctccgaccccactcttcaacaagcttcatatc

SEQ ID NO: 499 - DNA, 460 bp, unidentified
  source 1..460: mol_type = unassigned DNA; note = unclassified Picornaviridae sequence
ctccactctcctttctcccttccccctccctttaccttttccccctctgtaactaagttttgtccctgcagagcagtgatacgacataaccgagttggaacgcgtattgggtattggtgaatatctatctcatgtggttaagctaaggcttgaaatacctttggcattgggttatagtagggcattagtgttcccacatgagagaaccatctatccacttgacacagtgggtgtatagtacaaaggaccctatttggtatcctgacgcgtgggcgagtaagtcttgctggatttccgcgagcatcaaccacaccctgatagtctcaatggggtcactcccgagacggggcaagtcacctatacactacctatggttgggaagccatagctggactgtgacagcttgatagagtgtcggcgggcacagtggattggatgtaaagtccgttgaaatgccatt

SEQ ID NO: 500 - DNA, 464 bp, unidentified
  source 1..464: mol_type = unassigned DNA; note = unclassified Sapelovirus sequence
ttcggcacgcatgtattccacactcatttcccccctccgcccttaaggtggttgtatcccataacctttaccctcccccttcccagtcggacggaactatagttcatagacttagattctgtattaaggtgtgactaggatcaaccccatgtggcagtagcgtggcgagctatggaaaaatcgcaattgtcgatagccatgttagtgacgcgcttcggcgtgctcctttggtgattcggcgactggttacaggagagtaggcagtgagctatgggcaaacctctacagtgttacttagagggaatgtgcaattgaggcttgacgagcgtctccttgagatgtggcgcatgctcttggcattaccatagtgagcttccaggttgggaaacctggactgggcctatactacctgatagggtcgcggctggccgcctgtaactagtatagtcagttgaaaccccccc

SEQ ID NO: 501 - DNA, 465 bp, unidentified
  source 1..465: mol_type = unassigned DNA; note = unclassified Enterovirus sequence
cagcggtcaagcacttctgtctccccggcatagggatgttaggcttctcacgaggctgaagtcccgattgtcgttatccgcacaactactggacaaagcctagtaacaccctacgacgtagtatggttggtcgttccaccagtgaatccccccctggtagacctggcagatggggctagaaattcctcactggcgacagtgttctagcccgcgtggctgcctgctccctaacgggagaagccatcctactgacaaggtgtgaagagccccgtacgctagttgtgagtcctccggcccctgaatgcggctaatccaaccctgcagccattgcatggaagccaccatgtagatggtcgtaatgagtaattgcgggacggaaccgactactttgggtgtccgtgtttcttttatttcttgtatattgcttatggtgacaatatatatacagcatatatattgttcatc

SEQ ID NO: 502 - DNA, 466 bp, Cardiovirus B
  source 1..466: mol_type = genomic DNA
atggggaagggtatgacgtgccccttccttcttcggagaactcgctctagtggtctttccacttctggaaaagagtgagtgcacgtgatcaggaccgtcgaagacgacaaatacctggtgctctatctcatagacgtttcacagctgtagcgacccctcagtagcagcggaagccccctcctggtgacaggagcctctgcggccaaaagccacgtggataagatccactgctgagggcggtgcgaccctagcaccctgtgatgcatactagttgtagcgtgccggactattggtctgtcataagacacctgatagagagaccaagaatgtcctggaggtaccccgcgtgcgggatctgaccaggagaccattgcccaatgctttacaacgggtctatggtttaaaaactgtcgcagtctctccaaaccaagtggtcttggttttcaattactttgaatatttcact

SEQ ID NO: 503 - DNA, 468 bp, unidentified
  source 1..468: mol_type = unassigned DNA; note = unclassified Picornaviridae sequence
aaaaggagggatacaaatggtaccacggacaagcgtggaaaaccacctgtatccccccttttgggcttggcaacccattaatcaagatgccttctcttttgccggttttaagactccattttgcctgctgaatctgatgtgttctcactagacgtgtagcttagcacgatggccaggtcttgtttatactggcataagccgggagaacggtcttacagtgatcttggagtttggttagtatctgctagagtggcgtaactgcagacatgttgcccagggccgtaggctaggtaactagcaccctgggggccgcaagcctaggtggtcacaaccaccctcatgtaacccttgtcgggcattcttgtagtagaacccctaactccacttttgctgggaccaagtaccctgtgagagcaatgtaagtagatgccctgtaggtacccgtttaggatctgagcaggggccggg

SEQ ID NO: 504 - DNA, 475 bp, unidentified
  source 1..475: mol_type = unassigned DNA; note = unclassified Sapelovirus sequence
gtacatgcgtattacggtacgcatgtattccacactcatttcccccctccacccttaaggtggttgtatccactcaccctaccctcccttccaaagcggatggactttatgtgtttgaaactttggcaaccataaaaggaatggtatttggatacggatgaatggcagtagcgtggcgagctatggaaaaatcgcaattgtcgatagccatgttagtgacgcgcttcggcgtgctcctttggtgattcggcgactggttacaggagagtaggcagtgagctatgggcaaacctctacagtattacttagagggaatgtgcaattgagacttgacgagcgtctctttgagatgtggcgcatgctcttggcattaccatagtgagcttccaggttgggaaacctggactgggcctatactacctgatagggtcgcggctggccgcctgtaactagtatagtcagttgaaaccccccc

SEQ ID NO: 505 - DNA, 476 bp, unidentified
  source 1..476: mol_type = unassigned DNA; note = unclassified Enterovirus sequence
aacacatcgctcaacagcagttccacatccagtgggattatgagcaagcactcctgtttccccggaagggactaacggtacgctgtacccacggcggaagtatgtcctaccgttaaccggccatgtacttcgagaagcctagtaccattatgaaggttgattgatgttacgctccccggtatccccaaccggtagttctggtcgatgagtctcggcatcccccacgggcgaccgtggccgaggctgcgttggcggccagcctacacccaccagggtgtaggacgtcatgatactgacatggtgtgaagagcctattgagctacgtggtagtcctccggcccctgaatgcggctaatcctaactccggagcatccgctaacaatcccgttagaagggtgtcgtaacgcgaaagtctggagcggaaccgactactttgggtgtccgtgtttcctgttttacttactgtttggctgctt

SEQ ID NO: 506 - DNA, 478 bp, unidentified
  source 1..478: mol_type = unassigned DNA; note = unclassified Shanbavirus sequence
tgaaaagggggcgcagggtggtggtggttactaaatacccaccatcgccctgcacttcccttttcccctgtggctcagggtcacttagccccctctttgggttaccagtagttttctacccctgggcacagggttaactatgcaagacggaacaacaatctcttagtccccctcgccgatagtgggctcgacccccatgtgtaggagtggataagggacggagtgagccgatacggggaagagtgtgcggtcacaccttaattccatgagcgctgcgaagaaggaagctgtgaacaatggcgacctgaaccgtacacatggagctccacaggcatggtactcgttagactacgcagcctggttgggagtgggtataccctgggtgagccgccagtgaatgggagttcactggttaacacacactgcctgatagggtcagggcctcctgtccccgccgtaatgaggtagaccatatgcc

SEQ ID NO: 507 - DNA, 478 bp, unidentified
  source 1..478: mol_type = unassigned DNA; note = unclassified Enterovirus sequence
gtgcgccacatccagtggtgttttgtacaagcacttctgtttccccggagcgaggtataggctgtacccactgccaaaagcctttaaccgttatccgccaaccaactacgtaaaagctagtaacatcttgtttgtaatctggcgttcgatcaggtggatttcccctccactagtttggtcgatgaggctaggaatccctcacgggcgaccgtgtcctagcctgcgtggcggccaacccagcatatgctgggacgcccttttatagacatggtgtgaagactcgcatgtgcttggttgtgattcctccggcccctgaatgcggctaaccttaaccctggagccttgtattacaaaccagtgatattaaggtcgtaacgagcaattccgggacgggaccgactactttgggtgtccgtgtttctctttttactcattattgtcttatggtcacagcatatttgttaaatatactgtgatc

SEQ ID NO: 508 - DNA, 478 bp, unidentified
  source 1..478: mol_type = unassigned DNA; note = unclassified sequence
gtgacaatcagccagattgttaacggtcaagcacttctgtttccccggtacccttgtatacgcttcacccgaggcgaaaagtgaggttatcgttatccgcaaagtgcctacgagaagcctagtagcacttttgaagcctatggctggtcgctcaactgtttacccagcagtagacctggcagatgaggctagatgttccccaccagcgatggtgatctagcctgcgtggctgcctgcacactctattgagtgtgaagccagaaagtggacaaggtgtgaagagcctattgtgctcactttgagtcctccggcccctgaatgtggctaatcctaaccccgtagctgttgcatgtaatccaacatgtctgcagtcgtaatgggcaactatgggatggaaccaactactttgggtgtccgtgtttcttgtttttctttatgcttgcttatggtgacaactgtagttattacatttgttacc

SEQ ID NO: 509 - DNA, 480 bp, unidentified
  source 1..480: mol_type = unassigned DNA; note = unclassified Enterovirus sequence
gtggtaaatccataccactaatggtcaaacacttctgttcccccggcatgtgaggaataggctccaaaagggctaaagccactagtgtcgttatccgcattggtactacgcaaagcctagtatcactctggaagtctctcggttggtcgctccaccaggtaccccactggtagacctggcagatgaggcaggactcaccccactggcgacagtggtcctgcctgcgtggctgcctgcacacccctacggggtgtgaagcctagagatagacagggtgtgaagagccccgtgtgctaccaatgagtcctccggcccctgaatgcggctaatcttaccccacagctgttgcacgcaatccagcgtgtatgcagtcgtaatgagcaattgtgggatggaaccgactactttgggtgtccgtgtttccttttattcctattatttgcttatggtgacaatattgatagcatcagtgttgtcatc

SEQ ID NO: 510 - DNA, 480 bp, unidentified
  source 1..480: mol_type = unassigned DNA; note = unclassified Enterovirus sequence
gtgcttgaccgtcagtaacctggatggtcaccacctattggtcattgtgtacaagcttctatatgtttcaccagaggcgaaaaacgaggttatcgttatccgcaaagtgcctacgagaagcctagtagcactttcgaaacctatggctggtcgctcagctgcttgcccagcagtagacctggtagatgaggctagacattccccaccagcgatggtggtctagcctgcgtggctgcctgcacacccaatcgggtgtgaagccagaaagtggacaaggtgtgaagagcctattgtgctcactttgagtcctccggcccctgaatgtggctaatcctaaccccgtagctgttgcatgcaacccagcatgtatgcagtcgtaatgggcaactatgggatggaaccaactactttgggtgtccgtgtttcttgttttacttttcattgcttatggtaacaattgtagttgatacacttgttacc

SEQ ID NO: 511 - DNA, 487 bp, Rafivirus B
  source 1..487: mol_type = genomic DNA
gtgtccgggaagcgactcaagcttttgactgagtctctacaccttcatccgtaacatctttaagtttatgtgcctatggacctctagtgcactgccatcaccgggggtgtattggactggtttttccacaatccattcatcctgaggaattttggctttgttactaggatggtcccaccacacgcttatctgtgcctattgtgtcaaccatgttcttaagtagttgtgcccgtgggtgagtagataaccacaacaatccgataaagcatctcgcaaggatgtgagtaatggagtgtatgtgctacagagacccacaacctgaaccaagagagacacagtgaggattgtaaagggggaactctttgaaagggcatgtcccgcaattcctactgactgacaccgggggttggtgtcggtggattttagcaaatcctgttactgggtgatagccttgtgcacttcacttggttcttgtataagtgctgta

SEQ ID NO: 512 - DNA, 488 bp, Tremovirus A
  source 1..488: mol_type = genomic DNA
tttgaaagaggcctccggagactccggaggtattctttcgacccaacccatactggggggagtgtgggaccgtacttggagcgcacggtatatatgtgttcccgcatggcaagggcgtgttaccttgctccctgacgcatggtatgtgtcgatttgattttcaacttatcctaaggtctaggcgtttcgtgccgaaaacctctttgcgtttcacagaaccatcctaaccatgggtgcagtatgggaatcgtgtatgggggtgattaggatctctcatagagggataggtatgtcatcaaaccggggagtactccggctctggcattgggacatttgaattaaccggacctggttcagtatccgggttgtcctgtattgttacggtgtatccgtcttggcatactgaaagggtattcttgggtaatcctttcctactgcctgatagggtggcgtgcccggccatgagagattaagggtagcatttaacc

SEQ ID NO: 513 - DNA, 489 bp, unidentified
  source 1..489: mol_type = unassigned DNA; note = unclassified Sapelovirus sequence
ttgaaatgggtgtggggtacatgcgtattacggtacgcatatattccacactcatttccccccctccacccttaaggtggttgtatccccataccttaccctcccttctaaaacagatggacaaatggatttgaacttatggcaagtgaatatggtatgactttggatacactttaacggcagtagcgtggcgagctatggaaaaatcgcaattgtcgatagccatgttagtgacgcgcttcggcgtgctcctttggtgattcggcgactggttacaggagagtaggcagtgagctatgggcaaacctctacagtattacttagagggaatgtgcaattgagacttgacgagcgtctcttagagatgtggcgcatgctcttggcattaccatagtgagcttccaggttgggaaacctggactgggcctatactacctgatagggtcgcggctggccgcctgtaactagtatagtcagttgaaacccccc

SEQ ID NO: 514 - DNA, 489 bp, unidentified
  source 1..489: mol_type = unassigned DNA; note = unclassified Cardiovirus sequence
gttcgtctgctttctgagtactattcatgaaaagggtatgtgctaccccttccttcttggagaatctgcgtggcggtctttccgtctcttgaaaagcgcagatgtagcatgctggaaccggtgaagaaaacagttctctgtggagacttagagcagacatcgaaacagctgtagcgacctcacagtagcagcggaaccccctcctggtgacaggagcctctgcggccaaaagccacgtggataagatccactgctgtgagtggtgcaaccccagcaccctggttcgatggttgttctctgtggaatcagggaatggttattctcaagccctccagtagagaagccaagaatgtcctgaaggtaccccgcgtgcgggatctgatcaggagatcagttaccagtgctctacactggtactctgatttaaaaaatgtcacagcttctccaaaccaagtggtcttggttttccttttacctacaaagttcatg

SEQ ID NO: 515 - DNA, 489 bp, unidentified
  source 1..489: mol_type = unassigned DNA; note = unclassified Enterovirus sequence
gaagaccaataggcggtggttatccaaaccatcaacggtcaagcacttctgtttccccggttagattgatacgctccaacagggcgaaaacaactctaatcgttatccgcaagatgcctacgcaaagcttagtatcacctttgattctatttggttggtcgctcagctacaaacccagtagtagacctggcagatgaggctagaaacaccccactggtaacagtgttctagcctgcgtggctgcctgcacaccctatgggtgtgaagccgactagttgacaaggtgtgaagagccccgtgtgctcatcttgattcctccggcccctgaatgtggctaaccttaaacctgcagccaatgtacacgatccagtgtgctgttggtcgtaatgagtaattgcgggatgggaccaactactttgggtgtccgtgtttctctttttacctttattattgcttatggtgacagtatatggtatatatattgtcact

SEQ ID NO: 516 - DNA, 491 bp, unidentified
  source 1..491: mol_type = unassigned DNA; note = unclassified Sapelovirus sequence
ttgaaatgggtgtggggtacatgcgtattacggtacgcatgtattccacactcatttcccccctccacccttaaggtggttgtatccacataccctaccctcccttccacacaggacggacttttggacttggaccttcggcaagcacatatggtatgattactggatacaccttgaatggcagtagcgtggcgagctatggaaaaatcgcaattgtcgatagccatgttagtgacgcgcttcggcgtgctcctttggtgattcggcgactggttacaggagagtaggcagtgagctatgggcaaacctctgcagtattactcagagggaatgtgcaattgagacttgacgagcgtctctttgagatgtggcgcatgctcttggcattaccatagtgagcttccaggttgggaaacctggactgggcctatactacctgatagggtcgcggctggccgcctgtaactagtatagtcagttgaaaccccccc

SEQ ID NO: 517 - DNA, 491 bp, unidentified
  source 1..491: mol_type = unassigned DNA; note = unclassified Enterovirus sequence
aaagtgaccaataggcggcaatcacccagattgtcaaaggtcaagcacttctgtttccccggtcgaagctgatatgctccaacagggcaaaaacagctgagatcgttatccgcaaagtgcctacgcaaagcctagtaacattttcgaagttatatggttggtcgctcagccaaaccccatggtagacctggcagatgaggctagaaataccccactggtgacagtgttctagcctgcgtggctgcctgcacaccctctgggtgtgaagccatataatagacaaggtgtgaagagccccgtgtgctcactttgagtcctccggcccctgaatgtggctaaccttaaccctgcagctagtgcatgcaatccagcatgtatctagtcgtaatgagtaattgcgggatgggaccaactactttgggtgtccgtgtttcctttttatccttattgattgcttatggtgacaatatatagtactatatattgacacc

SEQ ID NO: 518 - DNA, 492 bp, Avisivirus B
  source 1..492: mol_type = genomic DNA
caccccctactgccctaacccccaaagttagttatagggtggctccctacccttactccacggggtaagccctaacccggttgaatctcaagatcagccttagcgaggactattagtaccgctcaaaccctttgcctgtagtgcccaggggtcacagaggggtgaccctctccctggggcccaaaaggctaggtggcaagacagggtccaagtgaggggctactctaagtagccccaagctgaacatcctgtctgaagccacccttgcagggccaggtttgattggggaaactagacaccagctttgtcctgggattggggggatatcgagttagtccaggaggtgcgagtagatgcccccgaaggtaccccaggcacatctgggatctgatcgggggcccgtgactatacaataggtaaaccgggttaaaaaacatgaaagcgcctctctctttcctacttcttttattgactggtgacaaaaatagcagt

SEQ ID NO: 519 - DNA, 493 bp, Tremovirus A
  source 1..493: mol_type = genomic DNA
tttgaaagaggcctccggggtatccggaggtcctttttcgacccaacccatactggggggtgtgtggggccgtatttggagtgcacggtatatatgcattcccgcatggcaagggcgtgccaccttgccccttgacgcatggtatgtgtcatcatttgccttggttaaaccccataaaacgaggcgccacgtgccgaaaatccctttgcgtttcacagaaccatcctaaccatgggtgtagtatgggaatcgtgtatgggggtgattaggatctctcgtagagggataggtgtgtcattcaaatccagggagtactctggctctgacattgggacatttgatgtaaccggacctggttcagtatccgggttgtcctgtattgttacggtgtatccgtcttgacacactgaaagggtattcttgggtaatcccttcctactgcctgatagggcggcgtgcccggccacgagagattaagggtagcaatttaaac

SEQ ID NO: 520 - DNA, 494 bp, unidentified
  source 1..494: mol_type = unassigned DNA; note = unclassified Picornaviridae sequence
tttgcatcagttcgcccctcccctcaccatacctttttcccctctttaggactgatacttggttatgatgagcagaggatttcgcaagttatgcttcttgataaaaagtaattcacgaatcatgggattatagcctggaagtgaacactcatgtggcaagtgggttagtagctctccatgttcccatgtgcagtggactgacaacagtgagttcggggttgtgtagtaaagggaaagtattacttacccgcacctgctatacgtggtgtacgtaggatacgagttagtagtgcttagcaactttaaactggtgctgaaatattgcaaggtcactgaagttgtgaacgcgaacgctccgccactgccatgtatagcgtgcaatgcataaatggtgcactacatgatacgagggaatgggaaaccctccatggccgaatgcagggtgacagcctgccggcggatgcctgttgttagtataatccgttgtttgccac

SEQ ID NO: 521 - DNA, 494 bp, Tremovirus A
  source 1..494: mol_type = genomic DNA
tttgaaagaggcctccggagtgtccggaggctctctttcgacccaacccatactggggggtgtgtgggaccgtacctggagtgcacggtatatatgcattcccgcatggcaagggcgtgctaccttgccccttgacgcatggtatgcgttatcatttgccttggttaagccccatagaaacgaggcgtcacgtgccgaaaatccctttgcgtttcacagaaccatcctaaccatgggtgtagtatgggaatcgtgtatggggatgattaggatctctcgtagagggataggtgtgccattcaaatccagggagtactctggctctaacattggcacatttgatgtaaccgaacctggttcagtatccgggttgtcctgtattgttacggtgtatctgtcttggcacactcacagggtatttttgggtaatcctttcctactatctgatagggtggcgtgcccggccacgagagattaagggtagcaatttaaac

SEQ ID NO: 522 - DNA, 494 bp, unidentified
  source 1..494: mol_type = unassigned DNA; note = unclassified Enterovirus sequence
atcgagaaacctagtaccaccatgaaggttgcgcagcgtttcgctccgcacaaccccagtgtagatcaggccgatgagtcaccgcgttccccacgggtgaccgtggcggtggctgcgttggcggcctgcccatggggcaacccatgggacgcttcaatactgacatggtgtgaagagtctattgagctaattggtagtcctccggcccctgaatgcggctaatcccaactgcggagcagatacccacacgccagtgggcagtctgtcgtaatgggcaactctgcagcggaaccgactactttgggtgtccgtgtttccttttattttttgtactggctgcttatggtgacaattgagagattgttaccatatagctattgggttggccatccggtgtcaaacagagcgatcatctatttgtttgttggattcatacccttaaaccttaaagccctaaacactcttaattttgtgttgcaactgaactcagcaaa

SEQ ID NO: 523 - DNA, 496 bp, unidentified
  source 1..496: mol_type = unassigned DNA; note = unclassified Picornaviridae sequence
taagcggaaagcattcttgtcccccggtcagtaacctataggctgttcccacggctgaaagggtgaacatccgttacccgcctcagtacttcgagaaacctagtacgcctgatgattccaaattggtatgatccggtcaaccccagaccagaaactgtggatgggggtcaccattcctagtatggcaacatacaggtgtccccgcgtgtgtcacaggcccttacgggtgccatttcggatgagtctggccgaagagtctattgagctactgttgatacctccggccccctgaatgcggctaatctcaaccccggagccactgggtggtgaaccaaccacttggtggtcgtaatgagcaattctgggacggaaccgactactttggggtgtccgtgtttcttttgttcatattaaactgttttatggtcacaacacaacttggtacgatttgtgattattcactgctcacttgtcacagtaaatatacacaatcatc

SEQ ID NO: 524 - DNA, 496 bp, Enterovirus B
  source 1..496: mol_type = genomic DNA
tacttcgagaaacccagtaccaccatgaaggttgcgcagtgtttcgctccgcacaaccccagtgtagatcaggtcgatgagccaccgcattccccacgggcgaccgtggcggtggctgcgttggcggcctgcccatggagcaatccatgggacgcttcaatactgacatggtgtgaagagtctattgagctaattggtagtcctccggcccctgaatgcggataatcctaactgcggagcagacgctagcaaaccagcgagtagtctgtcgtaacgggcaactctgcagcggaaccgactactttgggtgtccgtgtttccttttattctcatactggctgcttatggtgacaattgaagaattgttgccatatagctattggattggccatccagtgacaaatagagcaattgtctatttatttgtcggttttgtaccgttaaactacaaagttctaaacactctcaatcttgttttatcactcaatacatcaaa

SEQ ID NO: 525 - DNA, 498 bp, Pegivirus A
  source 1..498: mol_type = genomic DNA
gcttcggcgcctagccgaaaccgacaccctgttcgaaatctttccgaaacatagagcggttgtggggaaactggacgaaagccagcggatggggggtgacagggtaggcaggtcgtaaatcccggcctccctggtacctggtataagtctggtggaaccatagcttaactgtgtggactttggacgtaggcagagtgcacggtccacaggtgacgcctataccggtgtgaataataggccgactcgagcggagtcgttaaactgaggacccattctaggatcacaacttggctgccgtacggtgacgccgctaaagtcacagtgggttaagtccggcgggttgacaacaccaggcaggcggggggacgctactgttgcgccctgtgagttccctagttgggtaggcatggggggacccagctccgcggcgcgctacagccggggtaggccaaaaatccgaaaggtgaggccgggtcccatttttcctttttgagtctc

SEQ ID NO: 526 - DNA, 498 bp, unidentified
  source 1..498: mol_type = unassigned DNA; note = unclassified Pestivirus sequence
gtataagggttgggaaccttgtaccaagctacctctgccattcagtatttgggagtagaagtagatgtgtttacaaactcacacgtgtgggggcggggatagactgtgccagcggtcgtgtaccagcacctacgcatacgtgtggactgcgaaccaggagagcacctaggtctgacaagctgtgagaacacagtagtcgtcagtgagtcagctggtaaggatcacccacctggatactcacgtggacgagggagtttcccagtcagaaacctacaccagaggaggggtcctctggagacatggatggtctgagtaacagactatctactggggtgtgctgcctgacagggtctcggctgatagcctggctagcagtataaaaatcagttgaattggcatatgagttgtgaacatctagtaaacaatgaaagacaaaaacaaaaaatgagcataataaaaaaattgtacaatccactactcaggtgtggctgcagactt

SEQ ID NO: 527 - DNA, 500 bp, unidentified
  source 1..500: mol_type = unassigned DNA; note = unclassified sequence
tttcaaatcggactccggtagttataccggagcccggtttggacgcttgggccgcgttaacagccccccacccctttcccactgactgatttctcggattggactcatttgcattgctaactctgattctggatttccccgtttatgtcgtcgcggtcggaagtgcacgtacttcgacgttgatctgatggcgtttgtttccaggggggaggtggcggcagaaacgcccccgccgtaaacttcggcgggccacgcctgtcaagccactccctggggccgagcgcctgaggtgatacagagagataagcacactgggcgctgacaacgcccgggacctcagtgagaagagcagtagggccgtgtttatgggactccattggatatcccccgcttgtcggaactcacggctactccgggttgggaagcccgcgactggtactgtactgggtgatagcctggtgccttccctctcactgttgtatgaaggctgaaaaccccct

SEQ ID NO: 528 - DNA, 501 bp, Pegivirus C
  source 1..501: mol_type = genomic DNA
accgacgcctatcaaagtaggcaataaggcctcgcgccgaaccggcgaccggccaaaaggtggtggatgggtgatgccagggttggtaggtcgtaaatcccggtcatcttggtagccactataggtgggtcttaaggggaggctacagtccctctagtgcctgtggagagaaagcgcacggtccacaggtgttggtcctaccggtgtgaataaggacccgacgtcaggctcgtcgttaaaccgagcccgttaaccccctgggcaaacgacgcccacgtacggcccacgtcgcccttcaatgtctctcttgaccaataggcaaagccggcgagttggcaagggccagtgggggccgggggcagggagaaggactccctgtcctgcccttcccgggggtgcgggaaatgcatggggccacccagctccgcggcggcctgcagccggggtagcccaagagccttcgggtgagggcgggtggcatttttctttcctataccgatc

SEQ ID NO: 529 - DNA, 502 bp, unidentified
  source 1..502: mol_type = unassigned DNA; note = unclassified Enterovirus sequence
ctttgtgtttgagggccaataggtgagtggtaaaccataccactaaaaggtcaagcacttctgtttccccggtgtgcagggaataagctctacccgggctgaagccttaaacatcgttatccgcacaattactacgcaaagcttagtagtaccttgaaagctccttgactggtcgctccgctagattacccatctagtagacctggcagatgaggctggatactccccactggcgacagtgatccagcctgcgtggttgcctgcacacctggtaacaggtgtgaagccaatgagtagacagggtgtgaagagccccgtgtgctaattgtgagtcctccggcccctgaatgcggctaatctaaccccacagctaatgcatacaaaccagtatgtatttagtcgtaatgggcaactgtgggacggaaccgactactttgggtgtccgtgtttcctttattctcattattttgcttatggtgacaaatacgatatatttgtcatc

SEQ ID NO: 530 - DNA, 506 bp, Anativirus B
  source 1..506: mol_type = genomic DNA
gtgtgtcatttctcccctccccctcccaaaccttttccccctctaatcggattgattaacccggttaaagatgattaatggtttgtgagttgatatgatggcccggcattgaatccgggaattcttaagtaatggaattgcatccaatatgaaagtgagtgtggcaagctcacaagtagtacttggctctgcccattatttgaggaccaactcttcttgactacaatgtgtttaaagtaaactggaccacattgtgtatccagacaactccatttgataatgtacgctggaaacgttttcagtgcatagggtcctaaagtggtgctgaaatattgcaagctcaatgggatactgaacgctgaaaaccgccgctgttatcatatgggcccctagtgggtaaatgttggctttaggcatatactgcttgggaatgcagtactggttgtagacagggtgatagcctaccggctggcgtagttgagttggtatagccagttgattgccat

SEQ ID NO: 531 - DNA, 506 bp, Aquamavirus A
  source 1..506: mol_type = genomic DNA
ttcaaaggtggcgggagagttggcctcacgctgtttagcgtgagagctggctctcctgccccttcccctgagccggggatcttggctcattcccctcttttctatcctccctcattggactttacggatgacccggcataaacttgacaaccgatgttggatttcccttgtggctgtgatggaggacataccctcgggtgtagttgtgtgcgtgtcgctctgcgactcgagcttcaaagtggtgctgaaatattgcaagcgtcgttgctcgattaacggagtggtacaatcctatgaacccaagtgcattcatgcgaaagccccggaggggtgagtagcatggactcgaatcagaagagctggagctcgcttggtacggcacgtagcattgctttgcctaaagaccaagggggtatggctataggtgggggcctatagcttgtccagtgctggttgacagactcgtgctacgcgtctggttcgagtataagtagctgcaactcact

SEQ ID NO: 532 - DNA, 508 bp, unidentified
  source 1..508: mol_type = unassigned DNA; note = unclassified Crohivirus sequence
gtataagagacaggtgtttgccttgtcttcggactggcatcttgggaccaaccccccttttccccagccatgggttaaatggcaataaaggacgtaacaactttgtaaccattaagctttgtaattttgtaaccactaagctttgtgcacataatgtaaccatcaagcttgttagtcccagcaggaggtttgcatgcttgtagccgaaatggggctcgaccccccatagtaggatacttgattttgcattccattgtggacctgcaaactctacacatagaggctttgtcttgcatctaaacacctgagtacagtgtgtacctagaccctatagtacgggaggaccgtttgtttcctcaataaccctacataataggctaggtgggcatgcccaatttgcaagatcccagactgggggtcggtctgggcagggttagatccctgttagctactgcctgatagggtggtgctcaaccatgtgtagtttaaattgagctgttcatatacc

SEQ ID NO: 533 - DNA, 509 bp, Aquamavirus A
  source 1..509: mol_type = genomic DNA
gctcaggggaaggggtagggtggctggacgcccgccatacaggcgggctccaaccaccccaccccttcccctgagccggggttctttggctcatcccccttctttatctatctccctcatgtacggattaaactggcataaatttgatatcgatgttggattatcccttaaatggttttggtgggggacatagccccgggcgacctctagtcggacatgctggctttcctagattcaaagtggtgctgaaatattgcaagcgtcgtttctaggtaggttggtatgaatggctttagtgaacccaactgcaatcatttgaacgcccctgaggggttagtaaaatggactcacagctggagagctggagtgagtgcaccacggtacatagcattgctctacctatagggtgtacttgcatggctaagggtgggggcccttagcttgtccagtgctgggtgacagcctcgtgccacgcgctggcctgtgagtataagtggctgaatatcgct

SEQ ID NO: 534 - DNA, 510 bp, Pegivirus C
  source 1..510: mol_type = genomic DNA
aagccccagaaaccgacgccccacggaatagtgggactaaggcccaatcaaagccaggaattccggccgaaagggtgtggatggtggtgacagggttggcaggtcgtaaatcccggccattctggtagcacctataggtgggttgaactggcggcgagaagtccctaatacctcttgcacgtgttgcgcacggtccacaggattggtctttccggtgtgaatagagacccgacgccagtcacgtcgttaaacagagtgcctttccccatcgcaacgccggccctcgtacgggaacgtcgcccttttaataccactctggtcagtagcatgtgcggcgagttggcaatcccagggggcgggcggggcgtacacggtaggaccgtgccgcctgcgttgtcggggtctggtattaatgcatggggccacccagctccgcggcggactgcagccggggtagaccaagatccttcgggtgaggtcgggtggcatctttctttctttgacatcatg

SEQ ID NO: 535 - DNA, 512 bp, Bopivirus A
  source 1..512: mol_type = genomic DNA
ttttctcccctccccctccacttaccttttccccctcttgtaacgctagaagtttgtgcaaatcgcctgtagggtactgcaatccagcagtgcataggcaaagcttttcttgttaccccaccccacattatactgaggaggatggtgaaattgtgttagtatgggttagtagcggtgacccgggtaaccccaacccagaaactcacggatgagatgaacaggaccccacatggtaacgtgtgtgttcgtctgccccgcaaggtgaggccgtgagagctccgcacgcgaaaaccttgaaaacccaaaagtaccttgagctcttcgctattttgtgtttcctccaggaccctgaatgcggctaaacccaacccgcgatccgcacgtagcaacccagctagagtgtggtcgtaatgcgcaagttgcgggcggtaccgactactttggtgttcctgtgtttcctttattttattttaaatttttatggtgacaacagctggaaaataagagtgatc

SEQ ID NO: 536 - DNA, 512 bp, Bopivirus A
  source 1..512: mol_type = genomic DNA
ttttctcccctccccctccccttaccttttccccctctagtaacgttagaagctagcactaaccgcctgtagggtactgcaatccagcagtgcataggcaaagtctttcttgtcaccccaaccccacactatactgaggaggatgacgaaatttgactagtatgggttagtaacggtgatccgggtgaccctgacccagaaactcacggatgaggtgaacagaaccccgcacggtaacgtgtgtgttcgcctgccccgcaaggtgaggccgtgagagctttgcacgtaaaacccctgaaagtccgagagtagtttgagctcttcgctattttgtgtttcctccaggaccctgaatgcggctaaacctaacccgcgatccacacatggcaatccagctagggtgtggtcgtaatgcgcaagttgcggacggtaccgactactttggtgttcctgtgtttcttttattttattttaaatttttatggtgacagcaatccagaaaagagataaac

SEQ ID NO: 537 - DNA, 512 bp, unidentified
  source 1..512: mol_type = unassigned DNA; note = unclassified Picornaviridae sequence
gagtgcttgatttgtaatggaaaaagcaaagcttatccaaatacaaatcaagcacccgtttggggagttcaccgtccccttaattcataggtgattggactgattttgatactgatttaggatttcctttgacctggattgggataaagacttaaacatgttgaataaggatggattagctcgatccattaggtgggtctcatatataccaccacagagccggagaataaccttacaaaggatgttagtaattaaatacacttgttgggtggcgtaactgcagaccatgtggacatgggcctatgttgtggtaacacaatcccatgtggccaaaagcctagtggataacaatccacccatggtaatccaatttggacactcaacatttaagtgtttagtgaaagtatctgatggggtgacactctgtgagaacccagggagtagatgcccaggaggtacccttttaaaggatctgacttggggcctagacacttaatgctaggttaaaaact

SEQ ID NO: 538 - DNA, 513 bp, Pegivirus A
  source 1..513: mol_type = genomic DNA
cctccccctcccccgaccggagcggaactccggaaaaccgacacctagtgaacatttcggatcattggcgcggatctggtgttaatctggacgaaagcccgtggacgggcggtgacagggttggcaggtcgtaaatcccggccgccctggtagcgggtataagtctggaggaaaccagtgaaccctcagtgtgaagtcagactaacgaaagtgcacggtccacaggagacgccgattccggtgtgaataatcggccgactcgagcggagtcgttaaactgaggacctccttggggatggcaacttggcttgcgtacgggaacgccgcaaaagtcacagtgggttaagtccggcgggttgacaatcccagcaaggcgggggggcactattgttgtgccctgccagttcccccaagggggtaggcatggggggacccagctccgcggcgcgctacagccggggtagcccaaaatccttcgggtgagggcgggtcccatgtcccttttttgtatgc

SEQ ID NO: 539 - DNA, 513 bp, Pegivirus C
  source 1..513: mol_type = genomic DNA
cccccccccggcactgggtgcaagccccagaaaccgacgcctactgaagtagacgtaatggtccagcgccgaactggcgaccggccaaaaggtggtggatgggtgatgacagggttggtaggtcgtaaatcccggtcatcctggtagccactataggtgggtcttaaagggaggttatggtccctcttgcgcatatggagggaaagcgcacggtccacaggtgttggtcctaccggtgtaataaggacccggcgctaggcacgccgttaaaccgagcccgttactcccctgggcaaacgacgcccatgtacggtccacgtcgcccttcaatgtctctcttgaccaataggcttagccggcgagttgacaaggaccagtgggggccccccccgttgcccttcccggggaggcgggaaatgcatggggccacccagctccgcggcggcctacagccggggtagcccaagagccttcgggtgagggcgggtggcatttttctttcctgtaccgatc

SEQ ID NO: 540 - DNA, 513 bp, unidentified
  source 1..513: mol_type = unassigned DNA; note = unclassified Picornaviridae sequence
gttaggcatagacacctacgaggcccaggacatacgcaatttcaattgcgaaaatgccctgggccccgtaggtgtctatgcctaacttcaacgagtagtggccgtaagccactttctttctaaactctctaactctacattttcctccttgtttgcaggttttatggtcttaaacttggaacgcgaatgacgatgaaactggaacaactttctgattgggctacccgccttccaaccggcaatggtgtaaaggtaaaagggtagattgctaccacttatggcatgtgaactggattaccaatgtagcatggaccctctaggtggggaatggcaatcgactatcctagctagattggaccactcatgggctttgggcgcgaattacgcagaacctaccgacaacatgtctggaaaccccatgagtggaggggaattgggaaaacccctttgatccaaactgcctgatagggtcgcggctggccgagttaggattagtagtcagtagaatttaac

SEQ ID NO: 541 - DNA, 516 bp, Rosavirus A
  source 1..516: mol_type = genomic DNA
tatgcatcactggacggcctaacctcggtcgtggcttcttgccgatttcagcgctaccaggctttctggtctcgccaggcgttgattagtaggtgcactgtctaagtgaagacagcagtgctctctgtgaaaagttgatgacactcttcaggtttgtagcgatcactcaaggctagcggatttccccgtgtggtaacacacgcctctaggcccagaaggcacggtgttgacagcaccccttgagtggctggtcttccccaccagcacctgatttgtggattcttcctagtaacggacaagcatggctgctcttaagcattcagtgcgtccggggctgaaggatgcccagaaggtacccgcaggtaacgataagctcactgtggatctgatctggggctgcgggctgggtgtctttccacccagccaaaacccgtaaaacggtagtcgcagttaaaaaacgtctaggccccacccccccagggatggggggttcccttaaaccctcacaagttcaac

SEQ ID NO: 542 - DNA, 517 bp, unidentified
  source 1..517: mol_type = unassigned DNA; note = unclassified Crohivirus sequence
gttgaagtccatttcttgcttgcccccgatgaatcctgttaaggcctcacggccctaagggtgaaactcggttatcccctcctgtacttcgagaagattagtacaacactatgaaatctacatcttgtgatccgggataaccccaatcccagaaacctgtgatgggcgtcaccacccctcttatggtaacataagggtgtcgccgcgttggcacaggaccctttgggctggatgtttttagtaatggtgtcgaaggtcctattgagctacaggagtttcctccgccctggtgaatgcggctaatcttatccctgagcctaaggttgcgatccagcaacttgatggtcgtaatgcgtaagttgggggcggaaccgactactttccagaaggcgtgtttctttgttttgtctgttactatggtgcatgatatagatattgaatatttgatctttttgagctgtttcttatcttattgctacatcctttcaggtgttggatttacattttggttaataag

SEQ ID NO: 543 - DNA, 518 bp, Foot-and-mouth disease virus
  source 1..518: mol_type = genomic DNA
gacgtcagcgcacgaaacgcgccgccacttcggaacactcgtacaaacacgatcacacgcgggtttcccaactggcatcctcgtgcaacctggagtttcgcctggtctttccaggtctggagagatgacacgttgtactggaaccaactccacgatcggtctactggcgggtgctagtaacgacattgttgcttcgtagcggagcatgcaagccgtgggaactcccccctggcaacagggacccacggggccaaaagccacgttctccgaaccttgcatgtgtgcaaccccagcacggtaacactgttgtgaaacacgctttaaggtaacactgagactggtacttggtttctggggacaggctaaggatgccctccaggtaccctgaggtaacaagcgacactcgggatctgaggaggggactgggacttctataaaagtgcccagtttaaaaagcttctatgcctgaataggtgaccggaggccggcaccttttccttttacacacaaaccactac

SEQ ID NO: 544 - DNA, 518 bp, Cardiovirus A
  source 1..518: mol_type = genomic DNA
ccggtgtgcgtttgtatacatgttacttccaccacgttgtcgtcttttgacaacgtgagggcccggaacctggccctgtcttcttggcgagtattcctaggagtctttctcctctcgacaaaggaatacaaggtctgttgaatgtcgtgaaggaagcagttcctctggaagcttcttgaagacaagcaacgtctgtagcgaccctttgcaggcagcggaatcccccacctggtaacaggtgcctctgcggccgaaagccacgtgtataagatacacctgcaaaggcggcacaaccccagtgccacgttgtgagttggatagttgtggaaagagtcaaatggctctcctcaagcgtattcaacaaggggctgaaggatgcccagaaggtactccactggctggaatctgatctggggcctcggtgcacgtgctatacacgtgttgagtcgaggttaaaaaacgtctaggccccccgaaccacggggacgtggttttcctttgaaaaccacgaagataat

SEQ ID NO: 545 - DNA, 520 bp, Foot-and-mouth disease virus
  source 1..520: mol_type = genomic DNA
gggacgtcagcgcacgaaacgcgctgttgctctttgcattcttgtacaaacacgatctcacgcaggaatcttagaccaacccaacccgtgcaactgcaagtttcacccggtctttccgggcctagagagacgaacagctgtactgagactgactccacgatcggtctactagcgggtgctagtaacactcactttgcttcgtagcggagcacatgagcggtgggaacccccccatggtaacatggacccaccgggccaaaagccacgcctcacggcctcatgtgtgtgcaaccccagcacggcaacttgtttgtgaaacacatcttaaggtaacactgagactggtactcggtttctggagacaggctaaggatgcccttcaggtaccccgaggtaacaagagacactcgggatctgagaaggggaccaggagttctttaaaactgcttggtttaaaaagcttctatgcctgaataggtgaccggaggccggcaccttttcctttatccacaacaacttt

SEQ ID NO: 546 - DNA, 520 bp, Enterovirus C
  source 1..520: mol_type = genomic DNA
ccagtgtggtttcgagcaagcacttctgtttccccggccgcgccctatatgctgtgcaaacggcagaaaggggcaacgtcgttacccgcttgcatactacgggaaacccagtaccaccattgattgtattgagagttgcgttcagcgcctctcccccctggcgtagctcgggccgatgaggctcagaagcccccacaggtgactgtgtctgagcctgcgttggcggcctgcccgcacctcttggtgtgggacgcttaatacatgacatggtgcgaagagtctactgtgctatgtaagattcctccggcccctgaatgtggataatcctaaccactgatcccatgtgcgcaaaccagcgtgcggtgggtcgtaacgcgcaagtcggtggcggaaccaactactttgggtgtccgtgtttcctttattacctattgaatgtttatggtgacaattgcttgattcagttgttgccatttattacattcgttgacctagactgaaaaccaactgaaccattaca

SEQ ID NO: 547 - DNA, 522 bp, unidentified
  source 1..522: mol_type = unassigned DNA; note = unclassified sequence
ccgggtataacccggagttttggggcaggtccaagccccacataggaacatacgatccacggatcgtgtgttcttttatgctttctaaccttaccctttgtaaccattacgctttacgccgcatggtgtttggcggcaccatgacgtggacaagaggttacgccattacgatatgtaccctccccttttggggagagaccgaccaattatggtacagtatccaactgtattgtggtcaagtacttctgtttccccggtgatgcgggataggctgtacccacggccaaaacctgctgatccgttacccgactcacatctacgaggaggctagtaaaaggcatgaagttcaagagtatgatccaaccagatccccactggtaaactagtgatgagggttcccgttccgaacatggcaacatgtgggttccctgcgttggcactaggccccttccgaggggtgctctgaagatggattgttgatgaagaccaatttgtgcatgtgtttatcctccggccctctga

SEQ ID NO: 548 - DNA, 523 bp, Pegivirus A
  source 1..523: mol_type = genomic DNA
ggggaatctcacccccccccgtccggttccggaagaatcggaaaccgacaccctgaccaatcattcttgatcatagagtggatgttagtgaaagccagacgaaagccggcggatgggtggtgacagggttggtaggtcgtaaatcccggccaccctggtacccggtataagttgggcggaagctgactgaagctccgtgctcttttctgtgcgttcttggtgcacggtccacaggtgacgcctataccggtgtgaataataggccgactcgagcggagtcgttaaactgagaacctccatacggatggcaacttggcttgcgtacggggacgccgctaaagtcacagtgggttaagtccggcgggttgacaaccccagcaaggcgagggggtcctattgttggactctgccagttcccggtggaggtaggcatggggtggcccagctccgcggcgcgctacagccggggtagcccaaaatccgaaaggtgagggcgggccacatgtccgaaatttagtcaagc

SEQ ID NO: 549 - DNA, 523 bp, Enterovirus B
  source 1..523: mol_type = genomic DNA
ggaaaaaacgtccgttatccggccaattacttcaagaaacccagtaccaccatgaaggttgcgcagcgtttcgctccgcacaaccccagtgtagatcaggtcgatgagtcaccgcattcctcacgggcgaccgtggcggtggctgcgctggcggcctgcccatggggcaacccatgggacgcttcaatactgacatggtgcgaagagtcaattgagctaattggtagtcctccggcccctgaatgcggctaatcctaactgtggagcagattcccgcatgccagcgggtggtctgtcgtaacgggcaactctgcagcggaaccgactactttgggtgaccgtgtttccttttattcctatattggctgcttatggtgacagttgagagattgttaccatatagctattggattggccatccggtgacaaacagagcaattatctaccaatttatcggttttgtaccattgaatttcaacgcattcaaaaccctcaactttattttgactcttaatacagcaaa

SEQ ID NO: 550 - DNA, 524 bp, Pegivirus C
  source 1..524: mol_type = genomic DNA
cactgggtgcaagccccagaaaccgacgcctatctaagtagacgcaatgactcggcgccgacccggcgaccggccaaaaggtggtggatgggtgatgccagggttggtaagtcgtaaatcccggtcatcttggtagccactataggtgggtcttaagggaaggttaagattcctcttgtgcctgtggcgagacagcgcacggtccacaggtgttggccctaccggtgtgaataagggcccgacgtcaggctcgtcgttaaaccgagaccgacacccacctgggcaaacgacgcccacgtacggtccacgtcgcccttcaatgtctctcttgaccaataggctttgccggcgagttgacaaggaccagtgggggccggggacgggggggagggacccccccgccccgcccttcccggtgggacgggaaatgcatggggccacccagctccgcggcggcctgcagccggggtagcccaagagccttcgggtgagggcgggtggcatttttcctttctgtactaatc

SEQ ID NO: 551 - DNA, 524 bp, Limnipivirus B
  source 1..524: mol_type = genomic DNA
agctacaggaaagagagagataatcacagcacataaatacaactacagaagagagcctttccctgagcactatttacagcaaaccacgctgggaaaagtggtagcatgacccacttacgggttacttagtataggattttaatatcttcgattctttattttcttttcttaactaagttcgcccggactttatccgtgttttattttagtttaagcaaaattgagtaactaagtttttaacctgccaaatggtgagaagtaactctgtgaaaataccatttgtgcatgaaattgtcttgaaaactcttaggcttttggggggtcccactgctgtttggaggactattgacagactctattgtagttgagtagtgactaatgataacgatttgcgtattacgcaatgggctgtacccgttagatttagtatgccggggggaggggtcccactggattgcactatgtaacctgacagggcgtctgccgacgcactacaatgaggataagatcggctgtttttattt

SEQ ID NO: 552 - DNA, 527 bp, unidentified
  source 1..527: mol_type = unassigned DNA; note = Human pegivirus isolate GBV-C-ZJ-180501, complete genome.1 sequence
cccggcactgggtgcaagccccagaaaccgacgcctatttaaacagacgttatgaaccggcgccgacccggcgaccggccaaaaggtggtggatgggtgatgccagggttggtaggtcgtaaatcccggtcatcttggtagccactataggtgggtcttaagggttggtcaaggtccctctggcgcttgtggcgagaaagcgcacggtccacaggtgttggccctaccggtgtgaataagggcccgacgtcaggctcgtcgttaaaccgagcccattacccacctgggcaaacaacgcccacgtacggtccacgtcgccctacaatgtctctcttgaccaataggctttgccggcgagttgacaaggaccagtgggggctgggcgacgggggtcgtataggaagaaaaatgccacccgccctcacccgaaggttcttgggctaccccggctgcaggccgccgcggagctggggtagcccaagaaccttcgggtgagggcgggtggcatttttcttcctataccgatc

SEQ ID NO: 553 - DNA, 527 bp, Hepatovirus C
  source 1..527: mol_type = genomic DNA
ttcaaaagccccagcggggtttcattaccccgctgtggcttttggacttccctaggatggggaagtaaattaccatcctcgcgtttgccgtgcgttaacggctacttttcttctagctgtagaagtaaaattcagcatgttttatgtttgtttgtcttgtttgttatatacatttttacactcctacaaatgcacatgaagaacagtttgtagagattaacaaacgcttagctgaacctaggtggtgaatctagtagtaagataagtagaggaagctataccttaagttggttgggccctcgtgtttgctctataaacaaaaccaagtgagtagagtggatgaacagtactaaatccctgagtacagggaacctcacaggtgtgatacacttatgtctatgtgacctggttggaggttgggcgtgccctatgatactggagtgggagatcttttggggaacccacgttttcacactgcctgatagggtcttgccgagagactcacttgtttcggctgtacttgtaac

SEQ ID NO: 554 - DNA, 527 bp, unidentified
  source 1..527: mol_type = unassigned DNA; note = unclassified Picornaviridae sequence
gggctacacatgtgataccatgttctagcatggaaaatcacacatgcagcccgatttcgggcttgggaacccgttcatcaagatcccataacctttcttttcttttgtctatcccttgagtagctaggctcgcggcagggtcttgtatatacctgcactagctgccacgaagtgctacagaaaccattagtatatatttagaaaccacctgttgacgtaactgtgattgattgcctggggctgagggcatggtaacatgcaccccaggggccaaaagcctagtgggtaacaacccaccattcatgatgcccttcttggcacaacaagtggatctctctatctatagaacatgggagtatggtatggagtggtgtaaggagcacgctagtagatgccccataggtacccttctggatctgagtgggggccatgaggaggtctttccctctgaattggttaaaaaccatgaacgtttgctccgcccatctttcttctaattttatcaacttacttgaattctgatcaca

SEQ ID NO: 555 - DNA, 528 bp, unidentified
  source 1..528: mol_type = unassigned DNA; note = unclassified Hepatovirus sequence
cttttcacgctttctgtcatcttatttcctgggctctccccttgcccaaggctctggccgttgcgcccggcggggtcaactccatggttagcatggagctgtaggagtctaaattggggacgcagatgctgggaacgtcaccctgcagtgttaacttggctttcatgaagctctttgatcttctacaagaggtaggctacgggtgaaacctcttagattaatactcctatggagagatatcttgaatagggtaacagcggtggatattggtgagttcctttgggacaagaaccattcaacaccggaggactggctctcattcagtagttgcattgagtgaattgtctgtcagggctgtctctgggtttaattcctggcctctctgtgcttagggcaaaccatttcctggccttaaatggagttctgtgagaggggactcctcctttatatgctggacatattttggggccttagggttctggtttgcctctgaggtactcaggggcatttaggtttttcctcacttat

SEQ ID NO: 556 - DNA, 529 bp, Pegivirus C
  source 1..529: mol_type = genomic DNA
ccccccggcactgggtgcgagccccagaaaccgacgcctatcaaagtagacgtaatggccctgcgccgaaccggcgaccggccaaaaggtggtggatgggtgatgacagggttggtaggtcgtaaatcccggtcaccttggtagccactataggtgggtcttaaggctaggtaatggtccctcttgcgcttatggcgagaaagcgcacggtccacaggtgttggtcctaccggtgtaataaggacccggcgctaggcacgccgttaaaccgagcccgttatccccctgggcaaacgacgcccacgtacggcccacgtcgcccttcaatgtctctcttgaccaataggcttagccggcgagttgacaaaggccagtgggggccgggcgtagagggaaggaccctctgcgctgcccttcccgggggagcggtaaatgcatggggccacccagctccgcggcggcctacagccggggtagcccaagagccttcgggtgagggcgggtggcatttttctctcctataccaatc

SEQ ID NO: 557 - DNA, 529 bp, Sapelovirus B
  source 1..529: mol_type = genomic DNA
ctgacctgtttatgaacatgagcagcggcactgctccacgggctatccgtgtaagaaatattgattattcttatggatcatgatttcagggttggccgcccagtctaaaaggcaattgtggtaagctatgtaagtagttggctgttgaaaggagccaagtacatcctaggtctacgctgtgcgggccgaagtaagacttggaacaactctgagtaggcagtttttctctttagcccaacacgaccgcatactgaagagctagaggcactttggggcaaaggtaaaagcattgcttagaccgaatgttcaatgagaccttgacgagtgctgtcacagtgtcccctgatggcagtatggcgcatgctcttggcattacccatatgtgtatctatagggggggggccccctatacttagtctagtgctacctgacagggccgcggctggtcgtcggtgtgtggtataaccagtagtaatcccccatggattgctttaactccccctcctccctcaacaaaactttctctaag

SEQ ID NO: 558 - DNA, 529 bp, Cardiovirus A
  source 1..529: mol_type = genomic DNA
ttggaataagaccggtgtgcgtttgtctatatgttgcttctactacactgttgcctgtgacagtgtaagggcccagaacctggccctgtcttctcgacgagtgttcctaggggtctttcccctcttgacaaaggaatacaaggtctgttgaatgtcgtgaaggaagcagttcctctggaagcttcttgaagacaaacaacgtctgtagcgaccctttgcaggcagcggaatcccccacctggtaacaggtgcctctgcggccaaaagccacgtgtataagatacacctgcaaaggcggcacaaccccagtgccacgttgtgcgttggatagtttcggaaagagttaaacggctctccccaagcgtattcaacaaggggctgaaggatgcccagaaggtaccccactggttgggatctgatctggggccccggtgcacgtgctttacacgtgttgagccggggttaaaaaacgtctaagcccccctaaccacggggacgtggttttccttttgaaaaccacgataacaat

SEQ ID NO: 559 - DNA, 529 bp, unidentified
  source 1..529: mol_type = unassigned DNA; note = unclassified Enterovirus sequence
ccccccacctaacatatccaagtaacttagaagatttgaacactgcacaatagggactattgcaaccagcaatagtcagtgcaagcacttctgtctccccggagcggagtatagacggccaccgctgtcaaaagctcttaaccgttatccgccagttaactacgcaacagctagtaacatcttgttgttcttagggtgttcgatcaggtgagtttaccccctcactagtctggtcgatgaggctgagaaatccccacgggtgaccgtgtctcagcctgcgtggcggccagcccagcatatgctgggacgccttaagtatgacatggtgtgaagactcgcgtgtgcttagctgtgagtcctccggcccctgaatgcggctaacctaaaccccggagccttgaggcacaatccagtgcccgcaaggtcgtaatgagtaattctgggacgggaccgactactttgggtgtccgtgtttccttttatctttttgatgttcttatggttacaatatatagagtatattgtaatc

SEQ ID NO: 560 - DNA, 529 bp, unidentified
  source 1..529: mol_type = unassigned DNA; note = unclassified Enterovirus sequence
cccccctccttaatgtaacttagaagcttgaacaatcgcccaataggatatgaccactccatggttatgaagggcaagcacttctgtttccccgggtgtgtgaataggctctaacagggctgaagctgtagcactcgttatccgcgcatctactacgcagaggttagtagggccatgtcaatcctttaggcgtttcgctcagcgtgtacccccacgtagatcagggcaatggggctacacattccccatcggcgacgatggtgtagcccgcgtggtgccccgcctaggcctatttggcctaggacgccaaaggaaagacagggtgtgaagacccgagtgtgctaggtgtgagtcctccggcccctgaatgtggctaatcctaaccccgtagccatggtgtacaagccagtacaaacatggtcgtaatgggcaactatgggatggaaccaactactttgggtgtccgtgtttctctttttaccctttactgcatttatggttacaagcttgtgaatacagacttgtaatc

SEQ ID NO: 561 - DNA, 530 bp, Pegivirus A
  source 1..530: mol_type = genomic DNA
cccccggcactgggtgcaagccccagaaaccgacgcctactaaagtagacgtgatggccccgcgccgaaccggcgaccggccaaaaggtggtggatgggtgatgccagggttggtaggtcgtaaatcccggtcatcttggtagccactataggtgggtcttaaggggaggtaaaggtccctctcgcgcttacggagggaaagcgcacggtccacaggtgttggtcctaccggtgtaataaggacccggcgataggcacgccgttaaaccgagcccgtaagccccctgggctaacgacgcccacgtacggtccacgtcgcccttcaatgtctctcttgaccaataggcttagccggcgagttgacaaggaccagtgggggccgggcgagggggggaaggaccccccctcgctgcccttcccgggggttgcgggaaatgcatggggccacccagctccgcggcggcctacagccggggtagcccaagagccttcgggtgagggcgggtggcattttttttcttgtaccgatc

SEQ ID NO: 562 - DNA, 530 bp, unidentified
  source 1..530: mol_type = unassigned DNA; note = unclassified Rosavirus sequence
ggagtgtcttaagtgatcccctccagtctctttagtgcctatgcttcagagagcggtgaactgacaccgttgcttcttgcacagcccttcgtgccggtctttccggttctcgacagcgttgggcatcatggctagttaggctaagatggcaaatgatctggtgaaaagttttggattgtttggagctttgtagcgatgctagtagtgtgtgtggatctccccacgtggtaacacgtgccccacaggccaaaagccaaggtgttaaaagcacccctactagtcccagatacccccatctgggagctcctctcatgaaaaatcttagtaccctttgatttggctgttcatcaacctctctagtcaagggctgaaggatgcccggaaggtacccgcaggtaacgataagctcactgtggatctgatccggggccctggtgcgaccgtctgtccggcgtagctagggttaaaaaacgtctaggcccttccaccccaagggattggggtttccccaatcattttagaagttcact

SEQ ID NO: 563 - DNA, 530 bp, unidentified
  source 1..530: mol_type = unassigned DNA; note = unclassified Enterovirus sequence
cttccgatctcctaaagtaacttagaagttgagcacaatgaccaataggcgacatttctccagaatgtcaaaggtcaagcacttctgtttccccggtcaaggttgatatgctccaacagggcaaaaacagctgcgatcgttatccgcaaagcaactacacaaagcctagtatcacttttgagaatgtatggttggtcgctccactataaacccaatagtagacctggcagatgaggctagaagttccccactggtaacagtgttctagcctgcgtggctgcctgcgtgctccttgtgggcacgaagccatatatttgacaaggtgtgaagagccccgtgtgcttgttttgattcctccggcccctgaatgtggctaaccttaaccctgcagctagcgtgtgcaatccagcacaaagctagtcgtaatgagcaattgcgggatgggaccaactactttgggtgtccgtgtttcttgtttttcttttatacttgcttatggtgacaatatatataatatatatattggcatc

SEQ ID NO: 564 - DNA, 531 bp, Pegivirus A
  source 1..531: mol_type = genomic DNA
ccccccggcactgggtgcgagccccagaaaccgacgcctatcaaagtagacgttatggccccgcgccaaactggcgaccggccaaaaggtggtggatgggtgatgacagggttggtaggtcgtaaatcccggtcatcctggtagccactataggtgggtcttaaagggaggctacggtccctctagcgcttatggagagaaagcgcacggtccacaggtgttggtcctaccggtgtaataaggacccggcgctaggcacgccgttaaaccgagaccgttatccccctgggcaaacgacgcccatgtacggcctacgtcgcccttcaatgtctctcttgaccaataggcagttctgccggcgagttgacaagggccagtgggggccgggcggcgggggaaggacccccgtcgctgcccttcccgggggagcggtaaatgcatggggccacccagctccgcggcggcctacagccggggtagcccaagaaccttcgggtgagggcgggtggcattttctttcctataccgatc

SEQ ID NO: 565 - DNA, 531 bp, unidentified
  source 1..531: mol_type = unassigned DNA; note = unclassified Enterovirus sequence
accgcctattggtctttgtgtaaacttctaagttacgcaaaagggaaggggtggcaaatccataccactaacggtcaaacacttctgtttccccggcatgcgaggaataggctccaaaagggctgaagccactagtgtcgttatccgcattggtactacacaaagcctagtattaccttgaaaatttcttggctggtcgttccaccagataccccgctggcagacctggcagatgaggcaggacttaccccactggcgacagtggtcctgcctgcgtggctgcctgcacaccccttacggggtgtgaagcccagaaacagacagggtgtgaagagccccgtgtgctaccaatgagtcctccggcccctgaatgcggctaatcttaccccatagctgttgcacgcaaaccagcgtgtatgcagtcgtaatgagcaattgtgggatggaaccgactactttgggtgtccgtgtttctttttattcctattatttgcttatggtgacaatattgatattatcagtgttgtcatc

SEQ ID NO: 566 - DNA, 532 bp, Kunsagivirus C
  source 1..532: mol_type = genomic DNA
ttttgaacgccacctcggagcgatatccggggaccccctcccctttttccttcctaccttcttcccaaatttccctcttcccttgttattttggtttggatttcctggacatgactcggacggatctatctcatttgctttgtgtctgctccaccagtggcatggtcgaaagatcatcaacactggacgtgtactgtaatggccaaacgtgcccacaggggaaaccatgccggtcgctgtagcggcgggtggacgtggtggacccctctccctgctcataaactttgggtaggtgaagggttcaagcgacgcttgccgtgagggcgcatccggatggtgggaaccaacaaactaggctgtaatggccgacctcaggtggatgagctagggctgctgcaccaaaagggactcgattcgatatcccggcctggtagcctagtgcagtggactcgtagttgggaatctacgactggcctagtacagggtgatagccccgtttcccacgcccacctgttgtagggacacccccccc

SEQ ID NO: 567 - DNA, 532 bp, unidentified
  source 1..532: mol_type = unassigned DNA; note = unclassified Enterovirus sequence
cccctaccccttttatgtaacttagaagttttgtacacaccgaccaataggtggtatttaaccaaaataccaaaggtcaagcacttctgttaccccggtcaagattgatatgctctaccagggcaaaaacaatcgcgatcgttacccgcaaagcaactacgcaaagcctagtatcatttttgatggtgtatggttggtcgttccgctatgaacctgatagtagacctggcagatgaggctagaaaatccccactggtaacagtgttctagcctgcgtggctgcctgcgtaccccttgtgggtacgaagccgtacatttgacaaggtgtgaagagccccgtgtgcttgctttgagtcctccggcccctgaatgtggctaaccttaaccctgcagctagtgtgcacaagccagtgcatagctagtcgtaatgagcaattgcgggatgggaccaactactttgggtgtccgtgtttcttgtttttcttttatatttgcttatggtgacaatatattcaatacatatattgacacc

SEQ ID NO: 568 - DNA, 533 bp, Pegivirus C
  source 1..533: mol_type = genomic DNA
cccccccccggcactgggtgcaagccccagaaaccgacgcctactgaagtagacgtaatggtccagcgccgaactggcgaccggccaaaaggtggtggatgggtgatgacagggttggtaggtcgtaaatcccggtcatcctggtagccactataggtgggtctaaaagggaggttatggtccctcttgcgcatatggagggaaagcgcacggtccacaggtgttggtcctaccggtgtaataaggacccggcgctaggcacgccgttaaaccgagcccgttactcccctgggcaaacgacgcccacgtacggtccacgtcgcccttcaatgtctctcttgaccaataggcttagccggcgagttgacaaggaccagtgggggccgggcgggagggggaaggacccccaccgctgcccttcccggggaggcgggaaatgcatggggccacccagctccgcggcggcctacagccggggtagcccaagagccttcgggtgagggcgggtggcatttttctttcctgtaccgatc

SEQ ID NO: 569 - DNA, 533 bp, Pegivirus C
  source 1..533: mol_type = genomic DNA
cccccccacggcactgggtgcaagccccagaaaccgacgcctatctaagcaggcaataaggcctcgcgccaaaccggcgaccggccaaaaggtggtggatgggtgatgccagggttggtaggtcgtaaatcccggtcatcttggtagccactataggtgggtcttaaggggaggctacagtccctctgtcgcccgtggcgagaacgcgcacggtccacaggtgttgaccctaccggtgtgaataagggtccgacgtcaggctcgtcgttaaaccgagcccattatccccctgggcaaacgacgcccacgtacggtctacgtcgcccttcaatgtctctcttgaccaataggcaatgccggcgagttgacaaagaccagtgggggccgggggtgagggagaaggactccccaccctgcccttcccgggggagtgggaaatgcatggggccacccagctccgcggcggcctgcagccggggtagcccaagagccttcgggtgagggcgggtggcattttctttcttataccgatc

SEQ ID NO: 570 - DNA, 533 bp, unidentified
  source 1..533: mol_type = unassigned DNA; note = unclassified Picornaviridae sequence
ccttttaacgtaccgtagcacgttagctacaaacttagcatttattttattttaattctaaatttattttaatttacataatttcggctctagtaacaaaaaccttattatcgtatttatacgaacagcatttattatttaatacatatccttatttttaaattacaaatacataccccccttttaacttactataattgctaatcaccaacaaccttcaaatttgatctagtacacattttaaaattccgtttctaaattttattaacttgcatctttgattataactctgggagtctattcagacttggcaaacccttgagcagccctcaaaatttgtagaacacctcaggcgatcttttaatacatgacccctgttgtaataacgtattactgaaaacacaaacacaactgaattaacagaagacattaatacaacccaagaacaacaatttactttcgataaccaacgcacagttaagacagaaaactcttatctgttgcctccaataaattcaatttcggctcagaaa

SEQ ID NO: 571 - DNA, 534 bp, Pegivirus C
  source 1..534: mol_type = genomic DNA
cccccccccggcactgggtgcaagccccagaaaccgacgcctactaaagcaggcattaaggcctcgcgccgaaccggcgaccggccaaaaggtggtggatgggtgatgccagggttggtaggtcgtaaatcccggtcatcttggtagccactataggtgggtcttaaggggaggctacagtccctctattgcccgtggcgggaacgcgcacggtccacaggtgttggccctaccggtgtgaataagggcccgacgtcaggctcgtcgtaaaaccgagcccgttgtctccctgggcaaacgacgcccacgtacggctcacgtcgcccttcaatgtctctcttgaccaataggcttagccggcgagttgacaagagccagtgggggccgggggtgagggggatggaccccccaccctgcccttcccgggagagcgggaaatgcatggggccacccagctccgcggcggcctgcagccggggtagcccaagaaccttcgggtgagggcgggtggcattttcttttcctgtaccaatc

SEQ ID NO: 572 - DNA, 534 bp, Rhinovirus A
  source 1..534: mol_type = genomic DNA
ccaaagtagttggtcccgtcccgcatgcaacttagaagctttgcacaaagaccaatagccagtaatcatccagattacttaaggtcaagcacttctgtttccccggtcaaagttgatatgctccaccagggcaaaaacaactgcgatcgttatccgcaaggcgcctacacaaagcttagtagcattctgaaagttgtctggttggtcgttccaccattccccctggtagacctggcagatgaggctagaaactccccactggcgacagtgttctagcctgcgtggctgcctgcacaccctctgggtgtgaagccatacgatggacagggtgtgaagagccccgtgtgctcgctttgagtcctccggcccctgaatgtggctaaccttaaccctgcagctagagcacacaatccagtgtgtttctagtcgtaatgagcaattgcgggacgggaccaactactttgggtgtccgtgtttccttgttctctttgaatatctgcttatggtgacaatatatacgtatatattgacacc

SEQ ID NO: 573 - DNA, 534 bp, Enterovirus D
  source 1..534: mol_type = genomic DNA
tttcaaatcaaagctcaataggtggggcacagacgtgcgcattaagtctcaagcacctctgtttccccggtgtggttgtataaactgttcccacggttgaaaacaacctatccgttatccgctatagtacttcgagaaacctagtatcacctttgaattgttgacgcgttgcgctcagcacactaacccgtgtgtagcttgggtcgatgagtctggacgtaccccactggtgacagtggtccaggctgcgtcggcggcctactcatggtgaaaaccatgagacgctagacatgaacaaggtgtgaagagtctattgagctactatagagtcctccggcccctgaatgcggctaatcctaaccatggagcaagtgttcacaggccagtgagttgcttgtcgtaatgcgcaagtctgtggcggaaccgactactttgggtgtccgtgtttcactttttacttttatgactgcttatggtgacaatttgatattgttaccatttagcttgtcaaattaattgcaaaagatcctaagt

SEQ ID NO: 574 - DNA, 535 bp, unidentified
  source 1..535: mol_type = unassigned DNA; note = unclassified Enterovirus sequence
ccccgtttccatttacacccaaccctatgtaacttagaagcagtacactggaccaataggtggtaacaatccatgttgccaaaggtcaagcacttctgtctccccggcatgcgtggaataaacagtgcaaacggttgaaaccacaaatgtcgttatccgcgcatgaactacgcagagcctagtatctccctgaaaatctgttggttggtcgttcagctaatccccatagtagacctggcagatgaggcaagacgcaccccactggcgacagtggtcttgcctgcgtggctgcctgcacacccccccccggggtgtgaagccaattgatagacagggtgtgaagagccgagtgtgcttcatgtgagtcctccggcccctgaatgcggctaatctaaccccgcagctgtggcacacaagccagtgtgtatgcagtcgtaacgggcaactgcgggacggaaccgactactttgggtgtccgtgtttccttttattcttttatcaggtacttatggtgacaatagtgaatattgttacc

SEQ ID NO: 575 - DNA, 537 bp, Grusopivirus B
  source 1..537: mol_type = genomic DNA
gccatccgtaggttctggtaaggttccatcaactgttggggcgctagttgctatgaccgcattcacggacggatgatttatagtatcacccaatccgggcacaacttctttagccacttcttccacattactaagggctctcttgccgagtttcaacgtctagtccacgacacggaccttcctacttttctatcttcttattttctctactaaattggtatctggtactgaagatatgcggattgtgattttgtgcctgtctaaactaaccctattctagggttaggtgggtaccatatactaatggtgaacaggattacctatgtatccattagtccctatggatctggcgacccacaaactcatgttcatagagaggctaagctgagtgctcgccgaataagcattgcttcaggtgccgactattgtctggaaaccactcagtgatagctataggggggggccccgtagcatctgccttactgcctgatagggtggcggctggtccatgaacatgcagtaaccagttgacttgac

SEQ ID NO: 576 - DNA, 538 bp, unidentified
  source 1..538: mol_type = unassigned DNA; note = unclassified Rosavirus sequence
cagggagatctccatgaataatcttttccaccctctttagcgtctatgctattgaggacgggttggagccccgttgacccagcgtcagagtgtgtcggtagcaggctttctgctctcgccccatgccggccacacctcccattagtgatgtgaaggttgtaagttacatgtgaaaaggtttctaataattgagctgaatgtagcgattacctaaggtgagcggattcccccacgtggtaacacgtgcctctcaggccaaaagccaaggtgttaaaagcaccccttaggtaggccactaccccgtggcctcagttctcttagaagattcacttagtagtgtgtgcactggcaactcttaagcagagctagtgagtgggctaaggatgccctgaaggtacccgcaggtaacgttaagacactgtggatctgatcaggggctcgagtgctgaagctttacagaggtagctcgagttaaaaaacgtctatgcccctcccccacgggagtgggggttcccccacaccaattttagattgcact

SEQ ID NO: 577 - DNA, 539 bp, Bovine rhinitis A virus
  source 1..539: mol_type = genomic DNA
tttgttttgcggctttgccgttgttcgggttttacctgttttcacacagcaaaacaggccttctagtttcgtgcttaaacgagatcatgctcgaactagaactacatagctggtcactggactcataccacaccttgtggagctttatgggaaaggtggctagtgggctgtggaagtgactctgaccacatgcctctcaagtgtgggaaatcacggatcggtgtagcgacgacaacaggccttgggacaccctctccagtaatggagacccaaggggccaaaagccacgcctcgtgccctgttgttcacaaccccagtgcgacccgtgttagtacctatttgcgagaactgtgtctggacagctaaacacaaccctagtgggagactaaggatgcccaggaggtacccggaggtaacaagtgacactctggatctgacctggggagagagggcttgctttacaggcgcctctctttaaaaagcttctatgtctcatcaggcaccggaggccgggccttttccttttaaaattacactta

SEQ ID NO: 578 - DNA, 539 bp, unidentified
  source 1..539: mol_type = unassigned DNA; note = unclassified Aphthovirus sequence
tttgtttcgcggctctgccgctgttcgggttttacctgttttcacagagcaaaacaggacatctagtttcgtgcttaaacgatatcatgctcgaactagaactacaatgctggttaccgaacccgcaccacaccttgtggaactttgcggggaaagtgactagtgggctgtagaagtgactctgaccacatgccccatcagcgtgggaaaccacaaatcggtgtagcgacgacaacaggccttgggacaccctctccagtgatggagacccgaggggccaaaagccacgccttgtgccctgttgttcacaaccccagtgcgatttgtgttagtacctactcatgggaattgtgtttggacagctgaacacaaccctagtgggagactaaggatgcccaggaggtacccggaggtaacaagtgacactctggatctgacctggggagagggggcctgctgtacaggcgcccctctttaaaaaacttctatgtctcatcaggcaccggaggccgggccttttccttttaaaacaacatttt

SEQ ID NO: 579 - DNA, 540 bp, unidentified
  source 1..540: mol_type = unassigned DNA; note = unclassified Enterovirus sequence
taactttgtgtttgactcccctaacatgtaacttagaagtttgaacgataagaccaataggtgataatcatccagattatcaaaggtcaagcacttctgtttccccggtcgatgaggatatgctttacccgaggcaaaaaccttagagatcgttatccacacactgcctacacagagcctagtaccacttttgacgtaactaggttggtcgctccctgcaaacccagcagtagacctggcagatgaggctggacgttccccactggcgacagtggtccagcctgcgtggctgcctgctcaccctattgggtgagaagcctatttattgacaaggtgcgaagagccgcgtgtgctcagtgtgcttcctccggcccctgaatgtggctaaccttaaccctgcagccgctgcccataatccaatgggtttacggtcgtaacgcgtaagtgcgggatgggaccaactactttgggtgtccgtgtttcttgtttttcctttatttgcattttatggtgacaatttatggtatatagattgtcatc

SEQ ID NO: 580 - DNA, 541 bp, unidentified
  source 1..541: mol_type = unassigned DNA; note = unclassified Picornaviridae sequence
aaaatggggtgcatatagcatggttcccatgctgtatgctaccccattttcttccctccccctccaactaccttttccccctctattgtaacttagaagctaatacacatagcccaataggggcaccacacccagtggtgtatagggcaagcacttctgtttccccggctttgccgttaacccccacagtactacgcgactgttagtaggtaacgtaactagtgaaggttgatccggaggtaaaccccaacctccagaaacgtgagatgagggttcagtaaccccctatggtaacatagactgatccctgcgctggctcacgggcttcgtgcactgaatctaggtaaagttactgaagccacgagtgtgctactgtggtttcctccagcgccttgaatgcggctaaccctaaccccggagcacatgcatataatccaatatgtagtgtgtcgtaatgagtaattctgggacgggaccgactactttaggttgctgtgtttcctttatttttatatatcaatttatggtgacaagttacaag

SEQ ID NO: 581 - DNA, 541 bp, unidentified
  source 1..541: mol_type = unassigned DNA; note = unclassified Enterovirus sequence
ccagttttatctcccccccccttttatgtaacttagaagttctgcacaccgaccaatagtgaacaatcagccagattgttttaggtcaagcactcctgtttccccggtcaacgttgatatgctccaacagggcaaaaacaacagcgatcgttatccgcaaggtgcctacacagagcctagtatcatcttagaagaattgtggttggtcgctcagttgcaaacccagcaatagacctggcagatgaggctggacattccccactggtgacagtggtccagcctgcgtggctgcctgcacacctctatgaggtgtgaagccagaatttcgacaaggtgtgaagagccgcgtgtgctcaccttgagtcctccggcccctgaatgcggctaaccttaaacccgcagccatggtccacaaaccagtggatgtgtggtcgtaatgagtaattgtgggatgggaccgactactttgggtgtccgtgtttcctgtttttctttttatactgcttatggtgacaatatatataggatatatattgacacc

SEQ ID NO: 582 - DNA, 542 bp, unidentified
  source 1..542: mol_type = unassigned DNA; note = unclassified Aphthovirus sequence
acgatctttgcggctctgccgccgttcgggttttacctgttttcacagagcaaaacaggacctctagtttcgtgcttaaacgagatcatgctcgaactagaactataacgctggtcactggacccgtgccgcgccttgcggatctttgcgggaatggtggctagtgggctgtggaagtgactctaaccacacgcccctcaagtgtgggaaaacacgaactggtgtagcgacgacgataggccttgggacaccctctccagtgatggagacccaaggggccaaaagccacgccttgtgccctgtcgttcacaaccccagtgcagttcgtgccagtacctgcttttgggaagtgtgctttggacagctgaaaacagtcctagtgggagactaaggatgcccaggaggtacccggaggtaacaagtgacactctggatctgacttggggagagcgggtctgctttacagacgccactctttaaaaaacttctatgtctcgtcaggcaccggaggccgggccttttcctttaaaacaatacacttt

SEQ ID NO: 583 - DNA, 542 bp, unidentified
  source 1..542: mol_type = unassigned DNA; note = unclassified Enterovirus sequence
cccccccctccccaacccttttatgtaacttagaagtttctaaacacaagaccaatagcaggcaactctccaggttgtctaaggtcaagcactcctgtctccccggttgacgttgatatgctccaacagggcaaaaacaactgatatcgttatccgcaaagtgcctacacagagcttagtagtgctctgaaagatttttggttggtcgctcagctgcatacccagcagtagaccttgcagatgaggctggacattccccactggtaacagtggtccagcctgcgtggctgcctgcacacctctcacgaggtgtgaagccaaagattggacagggtgcgaagagccgcgtgtgctcactttgagtcctccggcccctgaatgcggctaaccttaaacccgcagccatggttcacaaaccagtgaacttatggtcgtaatgagcaattgtgggatgggaccgactactttgggtgtccgtgtttcactttttcctttattgattgcttatggtgacaatatatatatagatatatattggcatc

SEQ ID NO: 584 - DNA, 544 bp, Cardiovirus A
  source 1..544: mol_type = genomic DNA
atgtggtcgaagccacttggaataagaccggcgtgcgcttgtctatatgttacttccaccacattgccgtcttttggcaatgtgagggcccggaacctggccctgtcttcttgacgaacattcctaggggactttcccctctcgccaaaggaatgtaaggtctgttgaatgtcgtgaaggaagcagttcctctggaagcttcttgaagacaaacagcgtctgtagcgaccctttgcaggcagcggaaccccccacctggtaacaggtgcctctgcggccgaaagccacgtgtataagatacacctgcaaaggcggcacaaccccagtgccacgttgtgcgttggatagttgtggaaagagtcaaatggctttccccaagcgtattcaacaaggggctgaaggatgcccagaaggtaccccactggttgggatctgatctggggcctcggtgcaggtgctttacacctgttgagtcgaggttaaaaaacgtctaggccccccgaaccacggggacgtggttttcctagaaaaccactatgacaat

SEQ ID NO: 585 - DNA, 546 bp, Pegivirus A
  source 1..546: mol_type = genomic DNA
ggggggttgatccccccccctcggcactgggtgcaagccccagaaaccgacgcctatctaagtagacgcaatgactcggcgccgactcggcgaccggccaaaaggtggtggatgggtgatgacagggttggtaggtcgtaaatcccggtcaccttggtagccactataggtgggtcttaagagaaggttaagattcctcttgtgcctgcggcgagaccgcgcacggtccacaggtgttggccctaccggtgtgaataagggcccgacgtcaggctcgtcgttaaaccgagcccgttccccacctgggcaaacgacgcccacgtacggtccacgtcgcccttcaatgtctctcttgaccaataggcgtagccggcgagttgacaaggaccagtgggggccgggggcctggagagggactccaggtcctgcccttcccggtgggccgggaaatgcatggggccacccagctccgcggcggcctgcagccggggtagcccaagaacccttcgggtgagggcgggtggcatttctcttttctataccatc

SEQ ID NO: 586 - DNA, 548 bp, unidentified
  source 1..548: mol_type = unassigned DNA; note = unclassified Sapelovirus sequence
ggtaaactggtgttgcggcaccagtttatcctcatctcatttcccccctccccctccaaataccttttccccctcaatcggacggattctcaggcttaaacggtggaggataccccttcaaggtccgcaggtgccaagtctaaaacctgaattggaagccctttgctatcagctcatttggccgataacccctgaccgggtgtgtaggacaattgagacgctctgggtgtacgactgcctatggtagaggtagagtgtacaagtaaaggctcctttttggataccgctaggcgaatgttgagatttctcctaccctagcacttgtgcatatgactaaggggggggccccttagtttgtctactgctgcctgacagggtcgcggctggccgaccataggtagtatagtcagttgatttaacacatggattgcttcaagttccttacaacctacaaacaaaccttcaaagctcaccagtgccaccagtattggttcactgtgtgtgaacaaaaacaagtaactgtagcaaagaagagccccggccccaaa

SEQ ID NO: 587 - DNA, 548 bp, Avisivirus A
  source 1..548: mol_type = genomic DNA
ttcactcgctttccccccctctctataggggcggtcttttaattcttattaatttcctactttactatcaaatttcttctaagtagggactgaggtcacttagccctccctctcctgggctttccagggttatagaggttctaaagctaagccatgtgtcttgagctacacttagtacaaaggtttagtaatgattgtacatgccagtaaccttctagtgcccatggattaaagagtggtaacactctccatggggcccgaaaggctagtgggcatagttggcatcaaggaaggggtccccaccccaacctgaattgctggctagaagctcaccttagaagaagtgctgggtgacaacgtgtccaatcgtgaacgactgatggaaacgtgtggagatggatatgtgggggttcactgagtagatgccctgaaggagaaatctgatcaggggcccgtgactatacgctaggtaaaccgggtataaaaaccatgaaaggtggcccaaaatctcttccttttattttatttctatgttggtgacagtcaag

SEQ ID NO: 588 - DNA, 548 bp, Parechovirus A
  source 1..548: mol_type = genomic DNA
gatacactattcgaaggcatctagcaataagaagagtggatttagggcgcttaaagcatagtgcaaataatcatttctagcctgtgttttacacagggtggcagatggcgtgccataactctactagtgagataccacgcttgtggaccttatgctcacacagccatcctctagtaagtttgtaaagcgtctgatgacgtgtgggaacttattggaaacaatagtttgctgcaaagcatcctactgccagcggaataacacctggtaacaggtgcctctggggccaaaagccaaggtttaacagaccctttaggattggttcaaacctgaactattgtggaagatatttagtacctgctgatttggtagttgtgcaaacactagttgtaaggcccacgaaggatgcccagaaggtacccgtaggtaacaagtgacactatggatctgatctggggccaactatctctatcttgatgagttggttaaaaaacgtctagtgggccaaacctgggggggaccccagtttccttttattttataatgccact

SEQ ID NO: 589 - DNA, 548 bp, unidentified
  source 1..548: mol_type = unassigned DNA; note = unclassified Enterovirus sequence
catgtacgccagttttatatcccctctccccttttgtaacttagaagataagcacaaagaccaataggtggtggctatcccagtcactaaaggtcaagcacttctgtttccccggtcgatgttgatatgctccaccagggcaaaaacaacagagatcgttatccgcaaagtgcctacacaaagcctagtaacactttgaatggtatgtggttggtcgctccgctattccccatagtagacctggcagatgaggctagaaatcccccactggcgacagtgttctagcctgcgtggctgcctgcgtgtcctaacgggcacgaagccatatacttgacaaggtgtgaagagccccgtgtgctcactttgagtcctccggcccctgaatgtggctaaccctaaccctgcagctgaggcacacaacccagtgtgaactcagtcgtaatgagcaattgcgggatgggaccaactactttgggtgtccgtgtttcacttttttttcttttataatgcttatggtgacaatatataacaatttatatattggcacc

SEQ ID NO: 590 - DNA, 548 bp, unidentified
  source 1..548: mol_type = unassigned DNA; note = unclassified Enterovirus sequence
cgtgaagccagttttgccacccttccctaatatgtaacttagaagtttgagcaacaagaccaataggtgataatcatccagattatcaaaggtcaagcacttctgtttccccggtcgatgaggatatgctttacccaaggcaaaaaccttaaagatcgttatccacacactgcctacacagagcctagtaccacttttgatgtaattaggttggtcgctccctgcaaacccagcagtagacctggcagatgaggctggacattccccactggcgacagtggtccagcctgcgtggctgcctgctcaccctattgggtgagaagcctacttattgacaaggtgtgaagagccgcgtgtgctcagtgtgcttcctccggcccctgaatgtggctaaccttaaccctgcagccgctgcccataatccaatgggtctacggtcgtaacgcgtaagtgcgggatgggaccaactactttgggtgtccgtgtttcttatttttcctatatatttgcttatggtgacaatatataattacttgtatattggcacc

SEQ ID NO: 591 - DNA, 550 bp, Parechovirus A
  source 1..550: mol_type = genomic DNA
ggaccccattattcgagggcatctagcaataagaactggagattaaggacgctcaaagcatagtgtaagtattcttttctaacctgtgttttacacagggtggcagatggcgtgccataaccctattagtgagataccacacttgtggaccttatgctcacacagccatcctctagtaagtttgtaaggcgtctgatgacgtgtgggaacttgttggaaataatggtttgctgtaaagcatcctactgccagtgggtaaacacctggtaacaggtgcctctggggccgaaagccaaggtttaacagaccctttaggattggttcaaacctgaactattatggaagacacttagtacctgctgatttggtagttgtgcaaacactagttgtaaggcccacgaaggatgcccagaaggtacccttaggtaacaagtgacactatggatctgatctggggccaaccacctctatctcggtgggttggttaaaaaacgtctagtgggccaaacccaggggggaccctggtttccttttatttatcataaacaat

SEQ ID NO: 592 - DNA, 550 bp, Enterovirus A
  source 1..550: mol_type = genomic DNA
tatcagtagactgcttacgcggttgaaggagaaaacgttcgttacccggctaactacttcgggaaacctagtaacaccattgaagctgcagagtgtttcgctcagcacttcccccgtgtagatcaggtcgatgagtcactgcaaacctcacgggcgaccgtggcagtggctgcgttggcggcctgcctatggggtaacccataggacgctctaatgtggacatggtgtgaagagtctactgagctggttagtagtcctccggcccctgaatgcggctaatcctaactgtggagcgcatacttccaaaccagggagcagtgcgtcgtaatgggcaactccgcagcggaaccgactactttgggtgtccgtgtttccctttattcttatattggctgcttatggtgacaattgaagagttgttaccatatagctattggattggccatccggtgtgcaacagagcaattatatacctatttgttggatatattccactgacatttaagtcactcaatactctacagtacatcttgaatttaaacaccagaaa

SEQ ID NO: 593 - DNA, 550 bp, unidentified
  source 1..550: mol_type = unassigned DNA; note = unclassified Enterovirus sequence
ggctcttccgatctgccgcaactttctttcactctttgtttctggtaatttagaagttgacacagagtccaatagggtgcagctaatccaagactgctacggacaagcacttctgtctccccgggtgtgtgaatagactctaacagggttgaagctgtagcactcgttatccgcacaactactacgcgaatgttagtaacaccctctaagtatagtgggatttcgctccgcagataccccatctgtagattggggtaatgaggctacacataccccactggcgacagtggtgtagcctgcgtggtgccctacctggggttctttaccccaggattccactttactgacagggtgtgaaggcgctagtgtgctagttgtgagtcctccggtccctgaatgtggctaatcctaaccccgtggccattacatgtaacccaacatgcagatggtcgtaacgagtaatcacgggatggaaccaactactttgggtaaccgtgtttcctgttttactttaatgtgtgtatcttatggttacaactatagagtaacc

SEQ ID NO: 594 - DNA, 551 bp, Cardiovirus A
  source 1..551: mol_type = genomic DNA
aaatactggtcgaaaccgcttgggataagaccggggtttgttaatgtctcaatgttattctccacccaattgacgtcttttgtcaattggagggcagtgaaaccttgcccttgcttcttgcagaggattcccagtggtctttccgctctcgacaagggaattcatgatccaccaaaagttgtgaagagagcaggtcccatggaagctttctgacgactgatgatgactgtagcgaccctttgcaggcagcggacccccccacctggtgacaggtgcctctgcggccaaaagccacgtgtttaacagacacctgcaaaggcggcacaaccccagtgcctcatcaaaagtctgatgactgtggaaatagtcaaccggcttttcttaagcaaatttggtgtcggggctgaaggatgcccggaaggtaccacactggttgtgatctgatccggggccacagtacatgtgctttacacatgtagctgcggttaaaaaacgtctaggccccccgaaccacggggacgtggttttcctttgaaaaccacgattacaat

SEQ ID NO: 595 - DNA, 552 bp, Enterovirus C
  source 1..552: mol_type = genomic DNA
agactgtacccacggttgaaaacgactgatccgttatccgctttagtacttcgagaagcctattaacaccttggaatcttcgatgcgttgcgctcagcactcaaccccagagtgtagcttaggtcgatgagtctggacatacctcaccggcgacggtggtccaggctgcgttggcggcctacctgtggtccaaagccacaggacgctagttgtgaacaaggtgcgaagagcctattgagctactaaggagtcctccggcccctgaatgcggctaatcccaaccacggatcaggtgctcacgagccagtgagcggcctgtcgtaacgcgcaagtctgtggcggaaccgactactttgggtgtccgtgtttcctttttaactttatcatggctgcttatggtgacaatcgaagattgttatcataaagcgaattggattggccatccggtgaaaattaaatatatagtttacctgtttgttggatttattccactaacacaacatacttggaaattactcaactttgtgttgttaatcagacactgttaccaca

SEQ ID NO: 596 - DNA, 552 bp, unidentified
  source 1..552: mol_type = unassigned DNA; note = unclassified Enterovirus sequence
ttccggtaactttgtatgccagttttatcacccttcccccacgtaacttagaagatgtacacttggaccaataggcgataatcctccagattatctaaggtcaagcacttctgtttccccggtctaaactgatatgctccaacagggcaaaaacagtgcagatcgttatccgcaggatgcctacgcaaagcctagtaattcctttgaagatatttggttggtcgttccactattccccatagtagacctggcagatgaggctagaaactccccactggcgacagtgttctagcctgcgtggctgcctgcacaccctcttgggtgtgaagccaaatattggacaaggtgtgaagagccccgtgtgctcatcctgagtcctccggcccctgaatgtggctaaccttaaccctgcagctagtgcatgcaatccagcatgtagctagtcgtaatgagtaattgcgggatgggaccaactactttgggtgtccgtgtttcactttttaccttatatttgcttatggtgacaatatatatagtatatatattggcatc

SEQ ID NO: 597 - DNA, 553 bp, Bopivirus A
  source 1..553: mol_type = genomic DNA
ttgaaagacctcggcatatatcgttgtcacaacggtatatgtcgagatctttctccccaccccctccaattcccttttccccctcttgcaacttagaagtttgtacacacagggcaataggatacgtgatccagccaggacacgtgagctcaagcacttctgtttccccgtccccttcacgtactacgggaatgttagtaatttgtgtgcactttagtaaggttgatccgggattaaccccaaatcccagaaactggtgatgagcgttaccacccccgccgggcgaccggaaggtttcgctgcgttggcaccagggcttcggcaccagaaaaaggtaaagcaaatgaaggcgctactgtgctacgagaagtttcctccaggcccctgaatgcggctaatcctaaccagtgatccaccggtgcaaaaccatgtactaggtggtcgtaacgcgcaagtcgctggcggaaccgactactttgggtgtcctgtgtttccatattttattttattcaattttatggtgacaagagtaaagagatacagatttgcagcc

SEQ ID NO: 598 - DNA, 554 bp, unidentified
  source 1..554: mol_type = unassigned DNA; note = unclassified Enterovirus sequence
taggtaactttgtgtttgatgccagttttatcctcccctcccccatgcaacttagaagttttgcacagagaccaataggcagtaatcatccagattacttacggtcaagcacttctgtttccccggtcaaagttgatatgctccaccagggcaaaaacagctgcgatcgttatccgcaaagcgcctacgcaaagcttagtagcattctggaagttgtctggctggtcgctccaccatttcccctggtagacctggcagatgaggctagaaattccccactggcgacagtgttctagcctgcgtggctgcctgcacaccctctgggtgtgaagccatacaatggacagggtgtgaagagccccgtgtgctcgctttgagtcctccggcccctgaatgtggctaaccttaaccctgcagctagagcacacaatccagtgtgtttctagtcgtaacgagcaattgcgggatgggaccaactactttgggtgtccgtgtttccttgttttctttaaatatttgcttatggtgacaatatatacgcatatattgacacc

SEQ ID NO: 599 - DNA, 554 bp, Enterovirus C
  source 1..554: mol_type = genomic DNA
gtataggctgtactcacggctgaaaacaaacgatccgttatccgcttaggtacttcgagaagcctagtaccatcttggaatcttcgacgcgttgcgctcagcactctaccccgagtgtagcttaggctgatgagtctgggcgttccccaccggtgacggtggcccaggctgcgttggcggcctacccatggctcacgccatgggacgctagttgtgaacaaggtgtgaagagcctattgagctacctaagagtcctccggcccctgaatgcggctaatcctaaccacggagcaagtgccttcagcccagaaggtagcttgtcgtaacgcgcaagtctgtggcggaaccgactactttgggtgtcccgtgtttccccttattttcattgtggctgcttgcgggactataattgattgccatcataaagcgatttggattggccatccggagaaagttaaacacgttgtttatttattcgttggattcacctcattaacccaaattacacccagcttgatatatatagtgttgccgactagacaaaatcaccacca

SEQ ID NO: 600 - DNA, 557 bp, unidentified
  source 1..557: mol_type = unassigned DNA; note = unclassified Picornaviridae sequence
atcttattaacaatacgtattttaaaagctcttactctagtaagggtatgtggttaacataggatgtaatacccatttatggatattgcatcttgtggagttagtcctcacacatacttgtctagcacctgcattccaaggagtatttgcgaaaatcttattcttaaaaccaattcttaattttaagtacaaacctcgcagaacttacaaatcgtgctcacgccttttgttctatttagttaatttgtatttgaagaatttagacgaataatataacgtgcttattattcacgagaccctctaacgtttttaacgcattgatctcgtaaaatctaaagactgatcttacattgatattgaattaaactaaagaaacgcaccacgacagtagtgtggccttactgttaaaacaactaggcctaacgagtatttctaactgtgacgttcgatgaattattccgaactatgtactaactgatctaaatcgttgttctacaaggaacgtttcaccgcctcaatagatcctaactatagaggaaaagaaacaacaaacaaac

SEQ ID NO: 601 - DNA, 557 bp, Limnipivirus C
  source 1..557: mol_type = genomic DNA
ttgaaagagagtccatacggggaactgcggttctcctattggattctgctttcacagtttctgagcactggtaagagcttagacaaacgtttttaaaatttattttctctgcaacttttgtttgtgtttatttttatttgttaattttgtgcctaaacatttgttgcgaagtatttgattcattagcaatattcattattgtttatttagatggcattcaaagtggtgggagtatcgaacccaagcgtcgtatgttatctccttgaataattttggattttttcgacatgatcattgaaaaggataagtgtttaagaactcaaggagtgttaacaatggtgggtgacaggtgtccccatataatttgttaacatgatttggactggttatctagtaagaagaaccatcgaacgcacgagcgagcattgcttgcggggcagttaccctgcgtcgatgtaagtgtgtaccggggggtgcacatgttgattctttatggcctgatagggtgcgtcattcgcgcctagataattagtataatgcgaatggaataaatttac

SEQ ID NO: 602 - DNA, 557 bp, Foot-and-mouth disease virus
  source 1..557: mol_type = genomic DNA
acaagttcagcagttttgcccgttttcaggagaaacgggacgtcagcgcacgaaacgcgccgccactttcggaacacttgtacaaacacgatctgacgcaggtatccctaactggcattctcgtgcaacttggagtctcgcctggtctttccaggtctagggaggcaacactttgtactgaaaccaactccacaactggtctactggcgggtgctagtaacgactttgttgcttcgtagcggagcatgcgagccgcgggaactcccccctggtaacagggacccgcggggccgaaagccacgtccctcggacctcgcatgtgtgcaaccccagcacggcaacactgtagtgaaacacactttaaggtaacactgagactggtacttggtttctggggacaggctaaggatgccctccaggtaccccgaggtaacaagcgacactcgggatctgaggaggggactggggcttctataaaagcgcccagtttaaaaagcttctatgcctgaataggtgaccggaggccggcaccttttcttttgtacacgaatcacttt

SEQ ID NO: 603 - DNA, 557 bp, Enterovirus A
  source 1..557: mol_type = genomic DNA
ggataaagaggctactcacgtggttgaaggagaaaacgtccgttacccgactaactacttcgagaaacctagtagcaccattgaacctgcggagcgtttcgctcagcacttcccccgtgtagatcaggctgatgagtcactgcactcctcacgggcgaccgtggcagtggctgcgttggcggcctgcctatggggcaacccataggacgctctaaagtggacatggtgcgaagagtctattgagctagttagtagtcctccggcccctgaatgcggctaatcctaactgcggagcgcataccctcaatccagggggtggtgtgtcgtaacgggcaactctgcagcggaaccgactactttgggtgtccgtgtttccttttattcttacactggctgcttatggtgacaattaaagaattgttaccatatagctattggattggccatccggtgtgcaacagagcgatcatttactcctttgttgcttttattcccttgaacttcacttctttgagcacactaaattatatactccatctcaactccaagaagcgagt

SEQ ID NO: 604 - DNA, 558 bp, unidentified
  source 1..558: mol_type = unassigned DNA; note = unclassified Picornaviridae sequence
tttgtggggtgggctcccactttattcatagcccatctgctctgactctacctattgacccgtaactggtactcgtttgagattgactggtttaaagattttggtgtggttctttaggaaggattagctcgatcctttaggtgggacttatttttaccactacagagcacctatgattagttatagacagtggaggaaccattagtaactctttggaatgcgtaactgctaatcctgtgcccttggccaagacatagtaatatgttccaaggggcccaaaaggctagtgggtaaaaacccacctgggatggtcacttctgtgaattctgattagtgaagtttggattccgaatcctgtctagctaaaagtggggttagatggcactgagtagatgccctggaggtaccaattgatctgaccaggggcctagatacttaatgctaggttaaaaactatgaaaggtaagccatcgaaaattattttcctatttttactttgtttaactgattagtgaaatttactaatatttagctaggccttgctttattttattaagg

SEQ ID NO: 605 - DNA, 560 bp, unidentified
  source 1..560: mol_type = unassigned DNA; note = unclassified Megrivirus sequence
gggggttttccccctgggagtcttttccgttgggtctgtggcttggttgaaccatggatctggcgttagccggcatagtggtctgcggaaaagggccctcacgcggctgcggcttcgtgagctgttcttttccactagtgggccatctatgttggtataagctcaaccacccaaattttgtaacggccaattaagcttaggtcccgcacagattcgttctggcgtgctttataggaataggcggtctgactcggttttgtcttgacaactctcttgtttttccctttggctttgttttctttttaggctaacggttcagccttgttcagaacggccctatggcaagtgggcctagtaggttcttggtgttttccgttagtcgacccatccatagtgctagactaggtgggcgtgaggtaaaacgggacgcgtttttcgctatcccaatgaccggacctctgttgaatgcgctggatctccgcgtagccagaggaaaccacccgaaccctgatggcaactgacggtagtagggctcgtagtcagcctcatgttacccgtgg

SEQ ID NO: 606 - DNA, 560 bp, Hepatovirus H
  source 1..560: mol_type = genomic DNA
gtcatgtttctctttaagaacactcaattttggccataagtgagactcttgtcgaacctttcatgtcaggaccatgttagggccattatccttttccctggggcattcttcttgcccctgtttcatctttctatcatctttcttccgggctctcacaatgccaatggagcgaccgatgcgcacgtcggggttaacccatggattagccatgggctgtagctgctaaaagttgtgactcctgaagcatactatcaatggtagtagatgtaactgaaacactgaagcttctctgatcttgaaagaagggtaggctacgggtgaaacccttcaggttaatactcatattgagagatacctttggtaggttaacgttggcggataatgttgagtttaacgacaataaacattcaacgcctgtgggcgaacctcaccaatttcatgctttgaagtgaatgtgcgtagggtctctatcggagatgctatgtggatggtgccctccctggaaacaggttgtaggggtactcaggtgcacttaggtttccacattttaaagatttttc

SEQ ID NO: 607 - DNA, 560 bp, unidentified
  source 1..560: mol_type = unassigned DNA; note = unclassified Picornaviridae sequence
tgcgaatttattcgcacagtctcttttcccccatcttgtgtgtgtgatggggtaagccgcagagtaatacctactctgctgcaaacacactcactcttttctatctactttatatcatgtaataataagtagggaacatattcaattcatattgttcatctcactgaacccgcatgaaggactgcattgcatatcctggacgaagtgacgtggaatatttggacatttatggattggacaccattacgctttgtgcctctacggagatgtaaccataatcttaagtagtagtaccccagcacaagaggataaagtggcatacacgacaacgggtgttgctcgcaccttagtaatgtggatgttcacccttggagcgtgctgaaactctgtgggtaaagacacacattagtacaaatgtgggggaactcactgaaagggcatgtcccgtgtactggtgtgccggaaagtgggggtcgctttctggagaacttagtagttcttgttattgggtgatagccttgcggcggatcaactcacagttttaatccgttgttttgcat

SEQ ID NO: 608 - DNA, 560 bp, Enterovirus A
  source 1..560: mol_type = genomic DNA
tccccggactgagtatcaataggctgcttgcgcggctgaaggagaaaacgttcgttacccggccaactacttcgaaaagcctagtaccaccatcaatgaggcagagcgtttcgctcggcactaccccagtgtagatcaggctgatgagtcactgcaatccccatgggcgaccatggcagtggctgcgctggcggcctgcccatggaggaatccataggacgctctaatttggacatggtgcgaagagcctattgagctagttggtagtcctccggcccctgaatgcggctaatcctaactgcggagcgcacacccacaaaccagtgggcagtgcgtcgtaacgggcaactctgcagcggaaccgactactttgggtgtccgtgtttccttttattcctatattggctgcttatggtgacaaacgaagagttgttaccatatagctattggattggccatccggtgtgtaacagagcaattgtctatcagttcgttggttttgtaccattacattaaagtccttaacacattacatttatcttgaccctaaatacaaaagc

SEQ ID NO: 609 - DNA, 560 bp, Rhinovirus C
  source 1..560: mol_type = genomic DNA
cggtacacttgcacgccagtttgcctccctttccctttcccttgccaaacccccttggaacttagaagcaatacattagaccaataggaggtaacgatccatgttacctaaggtcaagcacttctgtctccccggtatgcgtggaataaacagtgcaaacggttgaagccacaattatcgttatccgcgcacaaactacgcagagcctagtactaccctgaaagtctgtaggttggtcgatcagctaatccccatagtagacctggcagatgaggcaagacactccccactggcgacagtggtcttgcctgcgtggctgcctgcacaccctctggggtgtgaagcctactgacggacagggtgcgaagagccgagtgtgctttgtgtgagtcctccggcccctgaatgcggctaatccaaccccacagctgtggcatacaagccagtatgtacgcagtcgtaacgggtaactgtgggacggaaccgactactttgggtgtccgtgtttcctgtttttctttatatatatgcttatggtgacaatagtgaatattgttacc

SEQ ID NO: 610 - DNA, 561 bp, unidentified
  source 1..561: mol_type = unassigned DNA; note = unclassified Avisivirus sequence
cattcccctttccccagccatgggttaaatggcccctcaccaggttcggtgctgtctaggcttccagtaaagaagtcaaccgagcattgaacaaaacctcagtgggtatggtagttaaccccgtccactggacaactttgtcctcttaaaagtggatcaatccaccccaactccccccctagccacctgagccatggtggatagcagtgacgaaactagggaccccaatacctctagtgccaagagaattcccccctcgcgagaggtgctcttgggcccgaaaggctagttggcagggtgaagtgaaggaagctgctagcgtggcaaccttaagcgtagcccgaagctgaccttagaggttaaccctagtggaccactggatgaagctgtggaggtggtggataggaaagttggccacttgtgagtagatgcccagaaggcataaggctgatctggggccagtgactataccgttccggtaaacctggtataaaaaccatgaaagcaagtgggtttaaaatttcttctaattccttcatttcagtagtgataactggcaga

SEQ ID NO: 611 - DNA, 564 bp, Enterovirus C
  source 1..564: mol_type = genomic DNA
tgacgttgcatagactgctcacgcggttgaaagcgattgatccgttatccgcttgtgtacttcgagaagcctagtatcgccttgggatcttcgacgcgttgcgctcagcacccgaccccggggtgtagcttaggctgatgagtctggacattcctcaccggtgacggtggtccaggctgcgttggcggcctacctatggctaacgccataggacgctagatgtgaacaaggtgtgaagagcctattgagctacacaagagtcctccggcccctgaatgcggctaatcctaaccacggagcaggcggtcgcaaaccagcgattggcctgtcgtaatgcgcaagtctgtggcggaaccgactactttgggtgtccgtgtttcctgttatttttatcatggctgcttatggtgacaatcagagattgttatcataaagcgaattggattggccatccggtgagaattgtgtcaagcgtacaactgtttgttggaatcactgtgttagctttaattctcatttaaccgattaatcaaaactacacgagaacaaaacactagcatcact

SEQ ID NO: 612 - DNA, 565 bp, Enterovirus B
  source 1..565: mol_type = genomic DNA
ttaccccggactgagtatcaatatgctgctcacgcggctgaaggagaaaacgttcgttacccggccaattacttcgagaaacctagtaccaccatgaaggttgcgcagtgtttcgctccgcacaaccccagtgtagatcaggccgatgagtcaccgcaatcctcacgggcgaccgtggcggtggctgcgttggcggcctgcccatggggcaacccatgggacgcttcaataccgacatggtgagaagagtctattgagctaattggtagtcctccggcccctgaatgcggctaatcctaactgcggagcagatgcctgcatgccagcgggtagtctgtcgtaacgggcaactctgcagcggaaccgactactttgggtgtccgtgtttccttttattcttgtgttggctgcttatggtgacagttgagaagttgttaccatatagctattggattggccatccgttaacaaatagagcaattatcttctcttttgttggattcgttccactgaattacaaggcactaaacacacttaatttcattttaatacttaacacatcaaa

SEQ ID NO: 613 - DNA, 565 bp, Enterovirus C
  source 1..565: mol_type = genomic DNA
tgacgttgcatagactgctcacgtggttgaaagcgatcgatccgttatccgctcgcgtacttcgagaagcctagtatcgccttggaatcttcgatgcgttgcgctcagcgcccgaccccggggcgtagcttaggctgatgagtctggacgttcctcaccggtgacggtggtccaggctgcgttggcggcctacctatggctaacgccataggacgctagatgtgaacaatgtgtgaagagcctattgagctacacgagagtcctccggcccctgaatgcggctaatcccaaccacggagcaagcggtcacaaaccagtggctggcttgtcgtaacgcgcaagtctgtggcggaaccgactactttgggtgtccgtgtttcctgttatttttatcatggctgcttatggtgacaatctgtgattgttatcataaagcgatttggattggccatccggtgagtgttatatcgaatacttgactgtttgtcagacccactgtattagaatcacttcatatttaagtagtcaatcaaaaacagcacgaagataagacaatagtaccaca

SEQ ID NO: 614 - DNA, 565 bp, Enterovirus C
  source 1..565: mol_type = genomic DNA
tgacgttgcatagactgctcacgcggttgaaagcgatcgatccgttatccgctcgcgtacttcgagaagcctagtatcaccttggaatcttcgatgcgttgcgctcagcgctcgaccccggggcgtagcttaggctgatgagtctggacgttcctcaccggtgacggtggtccaggctgcgttggcggcctacctgtggctaatgccataggacgctagatgtgaacaaggtgtgaagagcctattgagctacacgagagtcctccggcccctgaatgcggctaatcctaaccacggagcaagcggtcacaaaccagtgactggcttgtcgtaatgcgcaagtctgtggcggaaccgactactttgggtgtccgtgtttcctgttatttttatcatggctgcttatggtgacaatctgtgattgttatcataaagcaatttggattggccatccggtgagtgttgtatcgaatacttgactatttgccaggactactatattaaattcattttatatttgagaaatcagttaaaaacagtaggaagataaaacaataataccaca

SEQ ID NO: 615 - DNA, 566 bp, unidentified
  source 1..566: mol_type = unassigned DNA; note = unclassified Rosavirus sequence
tgtcttctccggatgctgttacagcatgtggacccaggagtgttttaagtgatcttctacagtctctttagtgtctatactttagagagcggtgaactgacaccgttgcttcttgcacagcccttcgtgctggtctttccggttctcgacagcgttgggcatcatggctagtcaggctaagatagcagatgatttagtgaaaagttttggattgtttggagctttgtagcgatgctagtagtgtgtgcggacttccccacgtggtaacacgtgcctcacaggccaaaagccaaggtgttaaaagcacccctactagtcccaggctttcccacctgggagctcctctcatgaaaattcctagtaattaatgattgggctattcatcaacctttctagtcaatggcttaaggatgcccggaaggtacccgcaggtaacgatgagctcactgtggatatgatccggggctctggtgcgaccgtctgtccggcgtagtcagagttaaaaaacgtgtaagcccttccaccccaagggattggggtttccccaatcatttaacaggttcatt

SEQ ID NO: 616 - DNA, 567 bp, unidentified
  source 1..567: mol_type = unassigned DNA; note = unclassified Enterovirus sequence
aaaccagtaccaccacgaacaagcacttctgtttccccggtgaagctgtatagactgttcccacggttgaaaatggcagatccgttatccgcttaagtacttcgagaagcctagtatcactttggaatcttcgatgcgttgcgctcagcactctaccccgagtgtagcttaggctgatgagtctgggcataccccaccggcgacggtggcccaggctgcgttggcggcctacccatggctaacgccatgggacgctagttgtgaacaaggtgtgaagagcctattgagctacttaagaatcctccggcccctgaatgcggctaatcccaaccacggagcaagtgcttacaaaccagtgagtagcttgtcgtaacgcgtaagtctgtggcggaaccgactactttgggtgtccgtgtttcctttttatttccattgtggctgcttatggtgacaatctaagattgttatcatatagctattggattggccatccggtgatttactgagatcaaacacttgcccatttccttgttgcacccacccatttgttatatttatacaattaca

SEQ ID NO: 617 - DNA, 568 bp, Rhinovirus A
  source 1..568: mol_type = genomic DNA
gagttgtactctgttattccggtaactttgtatgccagttttatttccctccccaattgtaacttagaagatgtacataaagaccaataggtggtgatcacccagatcactaaaggtcaagcacttctgtttccccggtcaaagttgatatgctccaacagggcaaaaacaacttggatcgttatccgcaaagtgcctacgcaaagcttagtaccatctttgagagcctatggttggtcgctccactgaaccccacagtagacctggcagatgaggctagaagacccccactggcgacagtgttctagcctgcgtggctgcctgcacacccctacgggtgtgaagccatacgtttgacaaggtgcgaagagccccgtgtgctcactttgagtcctccggcccctgaatgtggctaaccttaaccctgcagctagtgcatacaaaccagtatgttgctagtcgtaacgagcaattgcgggatgggaccaactactttgggtgtccgtgtttcactttttacctttattttgcttatggtgacaatatatatagcatatatattgacacc

SEQ ID NO: 618 - DNA, 569 bp, Aichivirus C
  source 1..569: mol_type = genomic DNA
aagggggtgggggggcttcggccctctcaccctcttttccggtggccacccgcccgggccaccgttactccactccactccttcgggactggtttggaggaacacaacagggcttcccacccctgtttaccccgatttcatctacccttctcccgaactgaccctatccacaccccactgactaactcctttggattagacctcggaatgcctacttgacctcccacttgcctctccctttctggattgccggtggtgcctggcggaaaaagcacaagtgtgttgcaggctaccaaactcctacccgacaaaggtgcgtgtccgcgtgctgagtaatgggataggagatgcctacaacaggctcgcccatgagtagagcatggactgcggtgcatgcgacttcggtcgccacgggcatagcattgctcacccgtgaatcaagtcatcgagatttctctgacctctgaagtgcactgtggttgcgtggctgggaatccacgcttgaccatgtactgcttgatagagtcgcggctggccgactcatgggttaaagtcagttgacaagacac

SEQ ID NO: 619 - DNA, 571 bp, unidentified
  source 1..571: mol_type = unassigned DNA; note = unclassified Picornaviridae sequence
ttcgtgttgggagaaccgtccaaaagaccctccggggttaaaccccggaagggcttttggacggttctcccaacacgaaagattgggacacttctcgtggtgagtgcttcactgcgacccgatggtgttatggagggcttccatcccgccgtttgcctaggctataggctgttttatttcttctttatttttctctatttccaggttgtctccataccgagagctgctaccgctgcgcccggcggggttaactccagggctagcctggagctgtggccgccaaaagtggagagagtgtgactaactgggatggtccgtcctgagtggctgtttccttgcacatactaaacattgatctgggtgctcaggtaggctacgggtgaaacctgaggtgtaataatgttcttctgttgaagaaactgcacgtcaaacgctaaccttatcagatatagctgagatttaagtgtcaaaaagctatcaatgattgcgggggggtgtaaggccaccttgcgatgtttggttgtgtgaggttaagaggccctcttgatggggtttccctaggcactcccct

SEQ ID NO: 620 - DNA, 571 bp, unidentified
  source 1..571: mol_type = unassigned DNA; note = unclassified Enterovirus sequence
tttccccggtgatgttgtatagactgtacccacggttgaaaatgactgatccgttatccgcttttgtacttcgagaagcccagtatcatcttggaatctccgatgcgttgcgctcagcactcgaccccagagtgtagcttaggtcgatgagtctggacgttcctcaccggtgacggtggtccaggctgcgttggcggcctacctgtggcccaaagccacaggacgctaggtgtgaacaaggtgtgaagagcctattgagctacagaagagtcctccggcccctgaatgcggctaatcccaaccacggagcaagggtgcacgaaccagtgtatgccttgtcgtaatgcgcaagtctgtggcggaaccgactactttgggtgtccgtgtttccttttatttttatattggctgcttatggtgacaatcatagattgttatcataaagcgaattggattggccatccggtgaaagcaaaacacattatttacttatttgttggatttactccactcaataattttacctataaactcattacatcagtcttgctgattagaaataagtatcata

SEQ ID NO: 621 - DNA, 572 bp, Enterovirus B
  source 1..572: mol_type = genomic DNA
acttctgtttccccggaccgagtatcaataaactgctcacgcggtcgaaggagaaaacgtccgttacccggccaactacttcgagaaacctagtaacaccatggaaattgcaaagtgtttcgctcagcacacccccagtgtagatcaggccgacgagtcaccgcgttccccacaggcgactgtggcggtggctgcgttggcggcctgcccgtgggacaacccatgggacgctttaatatggacatggtgtgaagagtctattgagctagttggtagtcctccggcccctgaatgcggctaatcctaactgcggagcatgcgcccccattccagagggtagcgtgtcgtaacgggcaactctgcagcggaaccgactactttgggtgtccgtgtttccttttatcttctcattggctgcttatggtgacaattgcgagattgttaccatatagctattggattggccatccggtgtctaacagagctataatataccaatttgtgggattcgttccattaagtttgaaagtcttacaaaccctcaacttgatactgcaactcaatagtgtaaa

SEQ ID NO: 622 - DNA, 573 bp, Cardiovirus A
  source 1..573: mol_type = genomic DNA
cccccccctccccctcccccttattttcctggtcgaaaccgctcggaataagaccggggtcttgtaatgtctaaatgttacttctacccaaccattgtctatgatggttggagggctgtagaacctagcccttgcttcttgcagagaaatccaagtggtctttccactctcgacaatgggtttcatggctcgccaaaagttgtgaagaaagcaagtcctatggaagctttctgacgaccgatgatgtctgtagcgaccctttgcaggcagcggaatcccccacctggtaacaggtgcctctgcggccaaaagccacgtgtttaacagacacctgcaaaggcggcacaaccccagtgccacatcaagagtctgatgactgtggaaatagtcaactggcttttcttaagcaaatttggtgtcggggctgaaggatgcccggaaggtaccacactggttgtgatctgatccggggcccatgtgcatgtgctatacacatgtagcctgggttaaaaaacgtctaggccccccgaaccacggggacgtggttttccttttgaaaaccacaatgataat

SEQ ID NO: 623 - DNA, 574 bp, unidentified
  source 1..574: mol_type = unassigned DNA; note = unclassified Pegivirus sequence
cgcaccggtacttggtgcacacagtcaggttagtccgctgtgtgcaagtggtggtcccacaaaccgactgccgccctctaacgtggttttagaatgcggacgccaagtctgcaactggacgaagcgctaccggcagcgctctcctggtcgcttgagggactggagggttgcactgttagtgaataagtccggggggataagctaagggggccgtacccacggcccgcctcacgcctctgccctgctcacctaagctgatgcggacgactccatgctatggtagcagcacggtctcacaggttgtgcaaccggtggaaaaatgctccgtcaggcgcagctgacgttaaactcagtgcccccgcgctcttgcgtggtttccgggctggaagtacgccgccttcctaaagtcgttactcggccaatacattctcgggcgggttgacaaacggaaagcgcggacccatagctccgggcgggggggtatagtccatgggggggcccaggcggcacgcctgcgacacgtggcaaggggaaaaatccttcgggtgaccccgggccccatcttcttttcttt

SEQ ID NO: 624 - DNA, 574 bp, unidentified
  source 1..574: mol_type = unassigned DNA; note = unclassified Enterovirus sequence
ttgagtgctctgttattccggtaactttgcacgccaattttataacccctcttccccatgtaacttagaagttttacaaatagaccaatagcaagcagcgaaccagctgtacaaggtcaagcacttctgtttccccggtcaatgttgatatgcttcaacaaggcaaaaacaacagcgatcgttatccgcaagatgcctacacaaagcttagtacctccttcgatggtatttgtctggtcgctcaggtgtttccccaacactagacctggcagatgaggctagaaactccccactggcgacagtgttctagcctgcgtggctgcctgcacaccctttcgggtgtgaagccaaatactggacaaggtgtgaagagccccgtgtgctcatcttgagtcctccggcccctgaatgcggctaaccttaaacccgcagccattgctcacaatccagtgagcagatggtcgtaatgagcaattgtgggatgggaccgactactttgggtgtccgtgtttcactttttcctttatcaattgcttatggtgacaatatatatataaatatatatattggcatc

SEQ ID NO: 625 - DNA, 575 bp, unidentified
  source 1..575: mol_type = unassigned DNA; note = unclassified Picornaviridae sequence
cccgttggtagggggtgctaatacctaccacccgtttgccgtgggaaacggctatggagggtcgggacgcctcgttaatcacgttctagtaattgagtgtgttactttaaatcttacacttatctatttagagtagttaatgtttctactattctttactatatatatcatagctgtcgtcttgctaagagctccgaccactgcgcccggtggggttaaccaatggactagccattggctgtaggcgccagaagagacgacctcctgactatgattgagatttgtcttgcttcagggctgtggaccatggatgtgatcgatcgaaccagggaaggtaggctacgggtgaaaccttccatgtaatgatgatgtcatattgacataccgcatccatacgctaatgcagcggatattgctgagatgataagtcaataagcattcaacgttggtgcccaggtgtcatggctggggcgcggttgcgtgcgtggttcacagtataacttgaagtgtcccttaagataaatctcactctaagggaggaccctgctagtaatagtacagggctaatcaggggc

SEQ ID NO: 626 - DNA, 576 bp, Aichivirus C
  source 1..576: mol_type = genomic DNA
tttggaaaaaggtggggggggcttcggccctctcaccctcttttccggtggccacccgcccgggccaccgttactccactccactccctcgggactggtttggaggaacacaacagggcttctcatccctgtttacccttattccacttacccttctccccgaactacccaacccactccccactgattgactcccttggattaagacctcggaatgtcttcctgaccttcttcttggttttcccttttcggattgccggtggtgcctggtggaaaaagcacaagtgtgttgttggctaccaaactcctacccgacaaaggtgcgtgtccgcgtgctgagtaatgggataggagatgccaataacaggctcgcccatgagtagagcatggactgcggtgcatgtgacttcggtcaccaggggcatagcattgctcacccctgaatcaagtcatcgagatttctctgacctctgaagtgcactgtggttgcgtggctgggaatccacgcttgaccatgtactgcttgatagagtcgcggctggccgactcatgggttaaagtcagttgacaagacac

SEQ ID NO: 627 - DNA, 576 bp, Cardiovirus A
  source 1..576: mol_type = genomic DNA
tccccccctttctcttccccttccttaatttaactggccgaaaccacttgggataaggccggtgtgtgtttgtctatatgtcacttctaccacaccactgtcttttggtggtgtgggggcccagaacctggccctgtcttcttgacgagcactcctaggggtctttcccctcttgccaaaggagtgtaaggtctgttggatgtcgcgaaggaagcaatctctctgtaagcttctggaagacaagcaacgtctgtagcgaccctttgcaggcagcggatttccccacctggtaacaggtgcctctgcggccaaaagccacgtgtataacatacacctgcaaaggcggcacaaccccagtgccacgttgtgagttggatagtcgtggaaagagtttgatggctttcctcaaacgtatccagcaaaagggctgaaggatgcccagaaggtaccccattttatgggatctgatctggggccacggtgcacgtgctttacacgtgtcgagccggggttaaaaaacgtctaagcccttaagtcacggggacgtggctttccctgttaaattaacactgaaac

SEQ ID NO: 628 - DNA, 576 bp, Enterovirus B
  source 1..576: mol_type = genomic DNA
gcctattggtactcggtccggggtaacagaagtgcttggccaaggtggctgaaggggaaaacgttcgttaaccgactaataacttcgagaaacctagtaccaccatgaaagttgcgcagtgtttcgctccacacaaccccagtgtagatcaggtcgatgagtcaccgcgttccccacgggtgaccgtggcggtggctgcgttggcggcctgcccatggggcaacccatgggacgcttcaatactgacatggtgcgaagagtctattgagcttattggtagtcctccggcccctgaatgcggctaatcctaactgcggagcaggtacccacaagccagtgggtggcctgtcgtaacgggcaactctgcagcggaaccgactactttgggtgtccgtgtttccttttattcttaaattggctgcttatggtgacaattgaaaggttgttgccatatagctattggattggccatccggtgtctaatagagcaattatctacctttttgttggattcattccactcaactataaaacactcaaaacactcatatacattgtaggtctcaacacagcaaa

SEQ ID NO: 629 - DNA, 576 bp, unidentified
  source 1..576: mol_type = unassigned DNA; note = unclassified Enterovirus sequence
acccaagtggtgtagtactcttgtatttcggtacacttgtacgccagtttgccaccccttccccaagcgaacgtagaagcttacaatcccggtcaataggaggtggtgaaccacaccacttaagaccaagcacttctgtttccccggctcaagaggaatatgctttgcaaagggctgaagccccgagagtcgttatccgcatacatactacgcaaagcctagtactgtcctggaagtctgttggttggtcgctccgtcaattccccattgatagacctggcagatgaggcaggaaatcccccactggcgacagtgttcctgcctgcgtggctgcctgcacaccctcacgggtgtgaagccaactgatggacagggtgagaagagccccgtgtgctatgtatgagtcctccggcccctgaatgcggctaatccaaccccacagctgccgcacacaaaccagtgtgttgacagtcgtaatgggtaactgtgggacggaaccgactactttgggtgtccgtgtttcctttattctttcaattgatgcttatggtgacaacatcaagtgatattgttacc

SEQ ID NO: 630 - DNA, 578 bp, Aichivirus C
  source 1..578: mol_type = genomic DNA
tttgaaaagggggtgggggggcttcggccctctcaccctcttttccggtggccacccgcccgggccaccgttacttcactccactccttcgggactggtttggaggaacataacagggcttcccaatcccctgttatcctttatcccaaacaccttttcccttaaccaaccctatccacaccccactgactgattcctttggattttgacctcagaatgcctacctgacctcccactcgcctctcccttctcggattgccggtggtgcctggcggaaaaagcacaagtgtgttgcaggctaccaaactcctacccgacaaaggtgcgtgtccgcgtgctgagtaatgggataggagatgcctacaacaggctcgcccatgagtagagcatggactgcggtgcatgtgacttcggtcaccacgggcatagcattgctcacccgtgaatcaagtcatcgagatttctctgacctctgaagtgcactgtggttgcgtggctgggaatccacgcttgaccatgtactgcttgatagagtcgcggctggccgactcatgggttaaagtcagttgacaagacac

SEQ ID NO: 631 - DNA, 578 bp, Enterovirus C
  source 1..578: mol_type = genomic DNA
gcacttctgtttccccggtacgacgacatagattgtgcccacggtcgaaagtcgtcaatccgttatccgctttggtacttcgaaaagcctagtatcaccttggaattctcgatgcgttgcgctcagcacccaaccccagagtgtagcttaggctgatgagtctgggcactccccaccggcgacggtggcccaggctgcgttggcggcctacccatggctaacgccatgggacgctagagttgaacaaggtgtgaagagcctattgagctaccaaagagtcctccggcccctgaatgcggctaatcccaaccatggatcaagtgcgtgcaatccagcatgtagcttgtcgtaatgcgcaagtccgtggcggaaccgactactttgggtgtccgtgtttccttttatttttattatggctgcttatggtgacaatctcggattgttatcatatagcaattggattggccatccggtgagagtgagagatattatctatttgtttgtggcatttactccactagatactaacacaccaattctaattagagcagttatactaattagatcaatacatcaca

SEQ ID NO: 632 - DNA, 579 bp, Aichivirus C
  source 1..579: mol_type = genomic DNA
tttgaaaagggggtgggggggcctcggccccctcaccctcttttccggtggccactcgcccgggccaccgttactccactccactccctcgggactggtttggaggaacataacagggcttcccatccctgtttttacccttatttccatctaccctttcccttaaccaaccctatccacaccccactgactgactcctttggattttgacctcagaatgcctacttgacctcccacttgcctctcccttatcggattgccggtggtgcctggtggaaaaagcacaagtgtgttgttggctaccaaactcctacccgacaaaggtgcgtgtccgcgtgctgagtaatgggataggagatgccaatgacaggctcgcccatgagtagagcatggactgcggtgcatgtgacttcggtcaccaggggcatagcattgctcacccctgaatcaagtcatcgagatttctctgacctctgaagtgcactgtggttgcgtggctgggaatccacgcttgaccatgtactgcttgatagagtcgcggctggccgactcatgggttaaagtcagttgacaagacac

SEQ ID NO: 633 - DNA, 579 bp, Enterovirus C
  source 1..579: mol_type = genomic DNA
gcacttctgtttccccggtgcgatgacatagactgtacccacggttgaaagtcgttaatccgttatccgctttggtacttcgagaagcctagtacctccttggaattttcgatgcgttgcgctcaacactcaaccccagagtgtagcttaggctgatgagtctgggcattcctcaccggcgacggtggcccaggctgcgttggcggcctacccatggctaacgccatgggacgctagatttgaacaaggtgtgaagagcctattgagctaccaaagaatcctccggcccctgaatgcggctaatcccaaccatggatcaagtgcatgcaaaccagcatgtggcttgtcgtaacgcgtaagtccgtggcggaaccgactactttgggtgtccgtgtttcctttttatttttataatggctgcttatggtgacaatctcagattgttatcatatagcgattggattggccatccggtgagaataagagatattatctatttgtttgtggcattcactccacttaactcatacacaccaagtttaatcaaagcagttttactaattagatcagcataccaca

SEQ ID NO: 634 - DNA, 581 bp, unidentified
  source 1..581: mol_type = unassigned DNA; note = unclassified Picornaviridae sequence
aatgcaaataacaatcaaggacccgtttgtggggtgggctcccactttattcatagcccataacattggtatcctgttaaactgactactggctgttctactaggtatttcaactggtttaaagattttaattttgttgaaacaggaaggattagctcgatcctttaggtgggacttatttttaccaccacagagcgcccatgaacaattaaaggtagtggaggaactattagtaaccatgtgaaatgcgtaactgctatccctgtgcccttggccttggcatagtaatatgctccaaggggcccgaaaggctagtgggtagaaactcacctagggtggtcactctgtgaatttcacatggcgaagtttagattctgaatcctactttgttgtgagtggggtcaggtgacactgagtagatgccctggaggtaccaattgatctgaccaggggcctggatacttaatgccaggttaaaaattatgaaaagtaagtcaccgaactgaaatgtttttcctttttatttcatctcatactgctgtgttgtttggtgtaatagtttgaagacacaattttccagg

SEQ ID NO: 635 - DNA, 584 bp, Cadicivirus A
  source 1..584: mol_type = genomic DNA
gtccgtataccaacggatcgatttccctgttacagcctctttgcttccccaccccactcctctccgtggagagcctagtaggattcttgaaagcaaatgtctgttgaccccaccttcaatcccggaaggaagaaaccgagaatgagactcgtctattcccccatggtgacatggagacttgtctgcgtgtgtctcgggctcccttatgagtattgtgggagaaccgctaccctgactccgaggagtctgatgggatatgttagtacctatgaaagtaaggtgacagactttgttagtatggatacgaagagccgactgccgttggagtgtatcctccggacccgtgaatgcggctaaccctaaccccggatcaagtgcccacaaaccagtgggtggcttgtcgtaatgcgtaagtctgggatgggaccgactactttcggtgttccgtgtttcctatttattttatcaataaagtatatggtgacaatattactagtgtgatatatagcctctattgtatttttattgatcaattttaataggttatttggtggtgatttaaatagagatagttactattagag

SEQ ID NO: 636 - DNA, 584 bp, Rhinovirus B
  source 1..584: mol_type = genomic DNA
tactctggtattatgtacctttgtacgcctgtttcttccctacaaccccttcctaaaactcccacccatgaaacgttagaagcttgacatttaagtacaataggtggcaccacatccagtggtgtctacgtacaagcacttctgtttccccggagcgaggtataggctgtacccactgccaaaagcctttaaccgttatccgccaaccaactacgtaacagctagtatcatcttgttcttcactggacgttcgatcaggtggattccccctccactagtttggtcgatgaggctaggagctccccacgggtgaccgtgtcctagcctgcgtggcggccaacccagctcatgctgggacgcccttttaaggacatggtgtgaagactcgcatgtgcttggttgtgagtcctccggcccctgaatgcggctaaccttaaccctggagccttatgccacgaaccagtggttgtaaggtcgtaacgagcaattccgggatgggaccgactactttgggtgtccgtgtttcctatttttctttatattgtcttatggtcacagcatatatataagtatatactgtgatc

SEQ ID NO: 637 - DNA, 587 bp, Rhinovirus C
  source 1..587: mol_type = genomic DNA
catggttacccacgaggtgcagtggtcttgtattacggtacatttccataccagttttataaaccctaccctgaaacttatagaagcttgtacacaccgaccgacaggtggcaatcatccagattgtcgaaggtcaagcacttctgtttccccggtatccttgtatacgcttcacccgaggcgaaaaccgaggttatcgttacccgcaaagtgcctacgagaagcctagtatcactttggaaacctatggttggtcgctcagctgttttcccaacagtagacctggcagatgaggctggacgctccccaccagcgatggtggtccagcctgcgtggctgcctgcacaccctgtggggtgtgaagccagaaagtggacaaggtgtgaagagcctattgtgctcactttgagtcctccggcccctgaatgtggctaatcctaaccccgtagctgttgcatgtaatccaacatgtatgcagtcgtaatgggcaactatgggatggaaccaactactttgggtgtccgtgtttcttgtttttctttatatactgcttatggtgacaatagtaattcattactcttgttacc

SEQ ID NO: 638 - DNA, 588 bp, Cadicivirus A
  source 1..588: mol_type = genomic DNA
gttcgtatgccaacggattgatttccctgttacagcctctttgcttccccaccccactcctctctgtggagagcctagtaggattcttgaaagcaaatatctgttgaccccaccttcaatcccggaaggaagaaaccgagaatgagactcgtctattcccccatggtgacatggagacttgtctgcgtgtgtctcgggctcccttatgagtattgtgggagaaccgctaccctgactccgaggagtctgatgggatatgttagtacctatgaaaataaggtgacaggttttgttagtatggatacgaagagccgactgccgttggagtgtatcctccggacccgtgaatgcggctaaccctaaccctggatcaagtgctcacaaaccagtgagtggcttgtcgtaacgcgcaagtctgggatgggaccgactactttcggtgttccgtgtttctatttattttatcaataaagttttatggtgacaatcttgtgatattaagatataaagcttttatccttttgtttattgattatcttaaatagattgcttggtggtgatttaaaatagagatagttattattagag

SEQ ID NO: 639 - DNA, 588 bp, unidentified
  source 1..588: mol_type = unassigned DNA; note = unclassified Enterovirus sequence
ggctcttccgatctgggggttgtactctattattccggtaattttgtacgccagttttatctccccttcccccgactgtaacttagaagtttatcattacggccaataggtggtagttatccaaactaccaaaggtcaagcacttctgtctccccggtcaaagttgatatgctccaacagggcaaaaacaactaagatcgttatccgcaaagtgcctacgcaaagcctagtaatgtctttgaaaatttatggttggtcgctccgctattccccatagtagacctggcagatgaggctagaaattccccactggtgacagtgttctagcctgcgtggctgcctgcgcaccctttgggtgcgaagccatacattggacaaggtgtgaagagccccgtgtgctcactttgagtcctccggcccctgaatgtggctaaccttaaccctgcagctagtgcatgtaatccaacatgttgctagtcgtaatgagcaattgcgggacgggaccaactactttgggtgtccgtgtttcactttttccttttattattgcttatggtgacaatatatatagatatatatattgacacc

SEQ ID NO: 640 - DNA, 589 bp, Rhinovirus A
  source 1..589: mol_type = genomic DNA
ccatgtggagttgtactctattattccggtaattttgtacgccagttttatctcccctcccccttttacataacttagaagtttgtacacatcgaccgataggtggcatttatccaaaatgttgaaggtcaagcacttctgttaccccggttaaaattgatatgctccaacagggcaaaaacagttttaatcgttatccgcaaagcaactacgcaaagcctagtatcatttttgataatatacggttggtcgctccactgtgaacccgacagtagacctggcagatgaggctggaaaccccccactggtgacagtgttccagcctgcgtggctgcctgcgtacccctttgtgggtacgaagccatatgtttgacaaggtgtgaagagccccgtgtgcttgttttgagtcctccggcccctgaatgtggctaaccttaaccctgcagctagtgtgtacaatccagtacatagctagtcgtaatgagtaattgcgggatgggaccaactactttgggtgtccgtgtttcctgtttttcttttatatttgcttatggtgacaatatatatacatcacatatatattggcacc

SEQ ID NO: 641 - DNA, 591 bp, Shanbavirus A
  source 1..591: mol_type = genomic DNA
ccccccctccctccttttcatcggctgtccgttgccgtggagcttcactatccgtagtgttgttccggaaaacggacacagcaacaccttcctccgggttggtgcttgcaatccctttccccttttgttgacttcccggactcattcgttttggctttcacattggccctagaggctatcttgttggattcctgtaccctggcaatctgaactccttcgcatgccctcccacatggtcgaggacagtaaggcgcgggaccaagagagccgggcaccagacccatttctgaattggactgccaccgccaagaattgcggagcggctctgttgtgtgagatcctcctttcccacagatagcgcatcccagtgcgtgtgtatgggggttagggtgcatacagcatccgcgactgtggtcagatgagcggaagcatctgctaggataaaggggacgcgattcgctatccccgaagcatccctcattgaggtaaagccctagtaggtgacggtggactggaatgccaccctggttccgtgcagcttgacagagtgccggccggtgctctggccacagaaatcggctgttttgggac

SEQ ID NO: 642 - DNA, 591 bp, unidentified
  source 1..591: mol_type = unassigned DNA; note = unclassified Enterovirus sequence
cccgtaggcagtatgggtgtagtactcttgtattctggtacatttgtacgccagtttttcttcccacccccaagtaacctttagaagcaattgcatccagacgagcaggcgaccaacactccacgttggttcacgtcaagcacttctgtttccccggtattagagtgttaggcttctcaagaggctgaagctcgaggtatcgttatccgcacagttactaagcagagcctagtatcactctgaccttctcactggctggtcgttcaatgagagacccactcatagacctggcagatggggctggaagtaccccactggcgacagtgttccagcccgcgtggctgcctgtccccctttctgggggaaagccgatgttaagacagggtgtgaagagccgcgtttgctaactgtgagtcctccggcccctgaatgcggctaatcttaccccacagctattgcatggaaaccaccatgtggatagtcgtaatgggcaactgtgggacggaaccgactactttgggtgtccgtgtttccttttattccatttattatctcatggtgacaacgtataagagttatatgttgtttacc

SEQ ID NO: 643 - DNA, 591 bp, unidentified
  source 1..591: mol_type = unassigned DNA; note = unclassified Enterovirus sequence
ccgtctacggacgtagtactcttgtatttcggtacacttgtacgccagttttcctccctccaccccttatgcaacttatagaagcttgaacttacaggcgaataggaggccagcaatccatgctggtaaacgccaagcacttctgtatccccggtattagagtgttaggcttctcacgaggctgaagcttgatatatcgttatccgcacagttactaagcagagcctagtatcatcttactctttatgctggttggtcgctcagtcagtttcccctgatagacctggcagatggggctggaaatccctcactggtaacagtgttccagcccgcgtggctgcctgtccccctccttagggggaaagccaatataaagacaaggtgtgaagagccgcgtttgctaattgtgagtcctccggcccctgaatgcggctaatccaaccccacagctatcgcatggaatccaccatgtaggtagtcgtaatgggcaactgtgggacggaaccgactactttgggtgtccgtgtttccttttataccttatctgatctcatggtgacaacatatattgacaagtgtatgttgttcacc

SEQ ID NO: 644 - DNA, 596 bp, unidentified
  source 1..596: mol_type = unassigned DNA; note = unclassified Enterovirus sequence
gtaccaccacgaacaagcacttctgtttccccggtgaagttgcatagactgtgcccacggttgaaagcgactgatccgttatccgctcttgtacttcgagaagcctagtaccatcttggaatcttcgacgcgttgcgctcagcactcaaccccagagtgtagcttaggctgatgagtctggacattccccatcggtgacgatggtccaggctgcgttggcggcctacctgtggcccaaagccacaggacgctagttgtgaacaaggtgtgaagagcctattgagctacatgagagtcctccggcccctgaatgcggctaatcccaaccacggagcaggtggtcataatccaatgactggcctgtcgtaacgcgcaagtctgtggcggaaccgactactttgggtgtccgtgtttccttttatttttacaatggctgcttatggtgacaatcatagattgttatcataaagcgaattggattggccatccggtgagaatcaaatcgcttgtatatttgtttgttggatttgctccattaacattaaacaccttaacacttattaaagtagttctattgataagacattgctattaca

SEQ ID NO: 645 - DNA, 596 bp, Rhinovirus B
  source 1..596: mol_type = genomic DNA
gacccactgggtgtagtgctctggtattttgtacccttgcacgcctgtttcccatttgtacccttccttgatttcctccccatgtaacgttagaagtttcggaattttaaagtacaataggaagcgccacatccagtggtgttgtgtacaagcacttctgtttacccggggcgaggtataggctgtgcccacggccaaaaacctttaaccgttatccgccaaccaactacgtaacggctagtatcatcttgtttctgacttggcgttcgatcaggtggtaacccccactagtctggtcgatgaggctaggaattccccacgggcgaccgtgtcctagcctgcgtggcggccagcccagcttttgctgggacgccttttcaaagacatggtgtgaagacccgcatgtgcttggttgtgagtcctccggcccctgaatgcggctaaccttaaccctggagcccagtgacataatccaatgttatttgggtcgtaatgagtaattccgggatgggaccgactactttgggtgtccgtgtttccttttattctttataatgtcttatggtcacagcatatatattgtatatactgtgatc

SEQ ID NO: 646 - DNA, 596 bp, Rhinovirus C
  source 1..596: mol_type = genomic DNA
atcccaccatgattgttcactgaacgttgtactcttgtattacggtacacttgtacgccagttttataatcccctccccttgtaacttagaagcaagtacacacaggccaatagcaagtagcaagccatgctacttatggtcaagcacttctgtttccccggtctgacgggatatgcttcacccgaggcagaaactcagatgatcgttatccgcaaagtgcctacgggaagcctagtagcaccctggaaactgttaggttggtcgctcaattgctgaccccgagcaatagacttggcagatgaggctagacataccccaccagcgatggtggtctagcctgcgtggctgcctacccaccctaatagggtgggaagcctatcaatggacagggtgtgaagagcctactgtgctcactttgactcctccggcccctgaatgtggctaatcctaaccccgtatctatcgcatgcgcaccagcatgtaggtagtcgtaatgggcaactacgggatggaaccaactactttgggtgtccgtgtttcctgttttctttattatttgcttatggtgacaattgtatgaaatacgattgacacc

SEQ ID NO: 647 - DNA, 597 bp, Rhinovirus A
  source 1..597: mol_type = genomic DNA
gttgttcccacctggacttcctatgtggagttgtacactgttatcccggtaaccttgtacgccagttttatacacccttccctgtaacttagaagttataagcacgaggaccaataggtagtgactttccaggtcactaaaggtcaagcacttctgtctccccggtcaaagttgatatgctctccccagggcaaaaacaattgagatcgttatccgcaatgtgcctacgcaaagcctagtaatatcttagatgatatatggttggtcgctccgccatttcccatggtagacctggcagatgaggctagaaactccccactggcgacagtgttctagcctgcgtggctgcctgcgcactctctgagtgcgaagccatatatttgacaaggtgtgaagagccccgtgtgctcacattgaatcctccggcccctgaatgtggctaaccttaaacctgcagctagtgcacacaaaccagtgtgtagctagtcgtaacgagcaattgcgggatgggaccaactactttgggtgtccgtgtttcacttttttccttttatatttgcttatggtgacaatatatataatacatatattgacacc

SEQ ID NO: 648 - DNA, 598 bp, unidentified
  source 1..598: mol_type = unassigned DNA; note = unclassified Enterovirus sequence
cccagtaacgttagaagaaagtacaaatgacacttagcaaatccaccaacccaggtgggttttcgtcaagcacttctgtttccccggacctagtaccaataggctgtacccacggctgaaggggaaaacgttcgttacccggctacctacttcgaaaagcctagtatcatcatagaatgtctcaagtgttacgctcagcacaaccccagtgtagttcaggtcgatgagtcaccgaattccccacgggcgaccgtgtcggtggctgcgttggcggcctgcctgcgagtttcactcgcaggacgcttgattcatgacatggtgtgaagagcctattgagctaggtagtagtcctccggcccctgaatgcggctaatcctaaccacggagccatgcgtcacaatccagtgatgtcgtggtcgtaacgagcaattctgtggcggaaccgactactttgggtgtccgtgtttcctgttttatttaccttggctgcttatggtgacaattgtatagttgtcatcatatagctattggattggccatccggatatatacaagcaactagtgttcacactacctcttttgctataacacaagtatc

SEQ ID NO: 649 - DNA, 598 bp, Rhinovirus C
  source 1..598: mol_type = genomic DNA
ccaccgggcacactgtgcgtagtactctgtgattacggtcactttgtacgcctgtttgcatccccaacccacatttcctatcatcttttatatccgtaacttagaagcataacacacagtccaataggaagcagctaaaccaagactgctaaggacaaatacttctgtttccccgggcgtgtgaatagactccaacagggttgaagctgtagcgctcgttatccgcacaactactacgcgactgttagtagcactttggatagcatgtggggttccgctccacagaaaccccatctgtaggtcagggcaatggggctacacataccccactggcgacagtggtgtagcccgcgtggtgccctgcctgggactgtgtcccaggactccacttgtttgacagggtgtgaaggcactagtgtgctagttgtgagtcctccggcccctgaatgcggctaatcctaaccctgcagccattgcaaacattccagtttgtgggtggtcgtaacgagtaattgcgggatggaaccgactactttgggtgtccgtgtttctctttttaacttgatgagtgtcttatggttacaattatacagtaacc

SEQ ID NO: 650 - DNA, 600 bp, unidentified
  source 1..600: mol_type = unassigned DNA; note = unclassified Hunnivirus sequence
agctttcttacccttcatttgtgaacccactagtctaagccgcttggaatacgatgagtggaaacgttcattctaaatggagtgaaacatgctcaattttctagctcgtgctggtctttccagtgcggggcggccctgtctggccgtaactctacagagtgtcacgccgtgcttgcggatctcacgtggcacatgacaaggctctcgctggaactgtgagtctgatgcatgtggagtaacagtgaaaagtgcatgatcacacatttgtgtgggctatgagcctgcggaacaacaactggtaacagttgcctcaggggccgaaagccacggtgttaacagcaccctcatagtttgatctatcccaggatagtgatgttgtgtacctagtaattgccaatcctcatgtcttggtatcacggcataccggagagttcgcgggtgaaggatgcccagaaggtacccgtaggtaaccttaagagactatggatctgatctggggccctgtctggagtgctttacacacagctcagggttaaaaaacgtctagcccgccaggacccgagggattcgggttttcccttaaaaacccgattagagcat

SEQ ID NO: 651 - DNA, 600 bp, unidentified
  source 1..600: mol_type = unassigned DNA; note = unclassified Enterovirus sequence
cggtaagccacccgagttctggccaagcacttctgtttccccggactgagtatcaataagttgctcgcgcggctgaaggagaaaacgttcgttacccgaccaactacttcaagaaacccagtatcaccatggaagttgcgcagtgtttcgctccgcacaaccccagtgtagatcaggtcgatgagtcaccgcaacccccacgggtgaccgtggcggtggctgcgctggcggcctgcccatggggcaacccatgggacgcttcaatactgacatggtgtgaagagtctattgagctagttggtagtcctccggcccctgaatgcggctaatcctaactgcggagcagacgctcgcatgccagcgggtagtctgtcgtaacgggtaactctgcagcggaaccgactactttgggtgtccgtgtttccttttattcttatactggctgcttatggtgacaattgaaaggttgttaccatatagctattggattggccatccggtgacaaacagagcgattatatactcttttgttgggttcatcccattgaattacaaggtattaaacaccctcagttttatcctgatactaaatacaacaaa

SEQ ID NO: 652 - DNA, 601 bp, Rhinovirus C
  source 1..601: mol_type = genomic DNA
acccacaccgtctacggacgtagtactcttgtatttcggtacatttgtacgccagttttccctccctcccccctttcacgtaacttatagaagcttgaacatacaggcgaataggaagccaacaaaccatgttggtaaacgccaagcacttctgtttccccggtattagagtgttaggcttctcacgaggctgaagcttgatatatcgttacccgcacagttactaagcagagcctagtaacactttgatctctatactggctggtcgctccgtcagaaaccccctgatagacctggcagatggggctggaaattccccactggtgacagtgttccagcccgcgtggctgcctgtccccctttcttgggggaaagccaatatatagacaaggtgccaagagccgcgtttgctaattgtgagtcctccggcccctgaatgcggctaatccaaccccacagctatcgcatggattccaccatgtaggtagtcgtaatgggcaactgtgggacggaaccgactactttgggtgtccgtgtttccttttataccttattttatctcatggtgacaacatatattgacaagtatatgttgactacc

SEQ ID NO: 653 - DNA, 602 bp, unidentified
  source 1..602: mol_type = unassigned DNA; note = unclassified Enterovirus sequence
ttaaaacagctgtgtggttgcacccaccaccaggcacaatgtgcgttgtacactgggattccggtcactttgtacgcctgtttgaccacccccccccatgcaacttagaaaatatacacatagcccaataggatgcggccaaaccaggttcgtcacgggcaagcacttctgtttccccgggtgtgtgaatagaccctaccagggttgaagctgtagcactcgttatccgcatggctactacgcaaatgttagtaacaccctctattgtacttgggatttcgttccgcagataccccatctgtagattagggcgatgaggctacacactccccactggcgacagtggtgtagcctgcgtggcgccctacctgggtctcctgacccaggattccacttacaagacagggtgtgaaggcacaagtgtgctagtcatgagtcctccggcccctgaatgcggctaatcttaaccccgtagccattgcaggcaaaccagtctgtggatggtcgtaatgggtaactacgggatggaaccgactactttgggtgaccgtgtttctcttttttctttatgtaggcactttatggttacaacataagtaacc

SEQ ID NO: 654 - DNA, 603 bp, Rhinovirus A
  source 1..603: mol_type = genomic DNA
ttgtacccacccacactgtctacggacgtagtgctctcatattacggtatgcttgcacgccagtttttaccccccttttcccaatttgtaacattagaagtttgtactattaatttggtcaataggaggtagcaagccatgctatctaagaccaagcacttctgttaccccggtatacggagaatagactccaaaagggttgaagctccaaatatcgttatccgcacaattactacgcaaagcctagtaacatcttgataagctctttggttggtcgctcagctgttacccccagtagacttggcagatgaggctgggtattccccactggcgacagtgacccagcctgcgtggctgcctacacacctggcgacaggtgtgaagccaaaagtggacaaggtgtgaagagccccgtgtgctaattgtgattcctccggcccctgaatgcggctaatccaaccccacagccaatgcatgtaaaccaacatgtatttggtcgtaacgggcaactgtgggacggaaccgactactttgggtgtccgtgtttccttttattttaaatgacttgcttatggtgacaaatattggtgtatatttgtcatc

SEQ ID NO: 655 - DNA, 603 bp, unidentified
  source 1..603: mol_type = unassigned DNA; note = Human rhinovirus A strain HRV-A80_p1187_sR2954_2009 polyprotein1 sequence
ggcttgacctttgacaactttgtgtttgaggagcagtactctactattccggtagttttgtacaccagttttatctcccttcccctatgtaacttagaagacaagcactcaagaccaataggatgataactaaccaagttgtcaaaggtcaagcacttctgtttccccggtcaaaattgatatgctccaccagggcaaaaacagttttggtcgttatccgcaaagtgcctacgcaaagcttagtaacactttgaagaatgtatggttggtcgttccgctattccccatagtagacctggcagatgaggctagaaaatccccactggcgacagtgttctagcctgcgtggctgcctgcgcacctctttgaggtgcgaagccattcctttgacaaggtgcgaagagccccgtgtgctcactttgagtcctccggcccctgaatgtggctaaccttaaccctgcagctagtgcatgcaatccagcatgtctctagtcgtaatgagcaattgcgggatgggaccaactactttgggtgtccgtgtttctctttttacttttaaattgcttatggtgacaatatatataacacatatatattgacacc

SEQ ID NO: 656 - DNA, 604 bp, Aalivirus A
  source 1..604: mol_type = genomic DNA
ttgaaagggggtgctcagggtagctccctgagctcttccctccaccctctttcaacgtctggcccacgatacgggccacctttcaatcttaactaactatccctttaatctatttggattttctggtttagaataatttggaacacataattggattatcttttaggattgtggataggatttgttcgggatatcactcccttcctgtgctaacacatattctaattccctcctttgtctattatctcttggaggtggtgctgaaatattgcaagccacttgagtgtatagatgaagtaggctcaagatgaatgttgtgttactcaaggcaagtgtagctatcactaagatattggtaacgtgaaacggattaccggtagtagcgtgatcttccgtcttagtgctctagtgactagaggacaacgacatggcatcacatatcttaaccctccagttttggcatccgggacagaatgggctggatatccgctttctttctggggtatgtgatgggtggtattggggtaaccaccttgaccatgacgctcgataagagtgaccgcctgatcattgaaacctctagtataaaattcaggctgaaatc

SEQ ID NO: 657 - DNA, 605 bp, Enterovirus C
  source 1..605: mol_type = genomic DNA
aactttagaagcaattcaaagagttcaatacagggggtacaaaccagtaccaccacgaacaagcacttctgtttccccggtgaggctgtatagactgtgcccacggtctaaaacggcagatccgttacccgctcaagtacttcgagaagcctagtatcaccttggaatcttcgatgcgttgcgctcagcaccctacccccgggtgtagcttaggtcgatgagtctgggcatgccccaccggcgacggtggcccaggctgcgttggcggcctacccatggctaacgccatgggacgctagttgtgaacaaggtgtgaagagcctattgagctacttgagagtcctccggcccctgaatgcggctaatcccaaccacggagcaagtgcctgcatgccagcaggtagcttgtcgtaacgcgcaagtctgtggcggaaccgactactttgggtgtccgtgtttccttttattcttataatggctgcttatggtgacaatctaagattgttatcatatagcttttggattggccatccggtgattatttgacttttgagcacttgtttaccttatctcatcacatattcatttaattgcttgattgcata

SEQ ID NO: 658 - DNA, 606 bp, Rhinovirus A
  source 1..606: mol_type = genomic DNA
taataatagtgtactactccacgtgggaagtacgggtggagtagtacactattattacggtaatcttgtacgccagttttataaccccttcccctatgtaacttagaagtttgaactcaagaccaacaggtggtaatcaaccagattactaaaggtcaagcacttctgtttccccggtcaatattgatatgctccaccagggcaaaaacaattgcgatcgttatccgcaaagtgcctacgcaaagcttagtaacattttgaataatatatggttggtcgttccgctattccccatagtagacctggcagatgaggctggaaactccccactggcgacagtgttccagcctgcgtggctgcctgcgcactctcacgagtgcgaagccatatatttgacaaggtgtgaagagccccgtgtgctcactttgagtcctccggcccctgaatgtggctaaccttaaccctgcagctagtgcatacaagccagtatgtagctagtcgtaatgagcaattgcgggatgggaccaactactttgggtgtccgtgtttcacttttatctttattatttgcttatggtgacagtatatagtgtatatattgttacc

SEQ ID NO: 659 - DNA, 607 bp, Rhinovirus C
  source 1..607: mol_type = genomic DNA
ttaaaacagctgtgtggttgttcccaccaccaggcacactgtgcgttgtacactgggattccggtcactttgtacgcctgtttgctatcccccccaacttatgtaatttagaagatgtacacaacgcccattaggatgcggccaaaccaggtccgcttagggcaagcacttctgtttccccgggtgtgtgaatagactctaacagggttgaagctgtagcactcgttatccgcgcaactactacgcgaatgttagtagcatcctgtgttgcatttgggatttcgctccgcagaaaaccccatctgtagattagggcaatgaggctacacataccccactggcgacagtggtgtagcctgcgtggtgccctacccaggccttcttggcctgggattccacttacaagacagggtgtgaaggcactagtgtgctagttgtgagtcctccggcccctgaatgcggctaatcttaaccccgtagcccccgcaagtaaaccaacttgtaggtggtcgtaatgagtaattacgggatggaaccgactactttgggtgtccgtgtttccttttattctttatatttgcatcctatggttacaacataagtaatc

SEQ ID NO: 660 - DNA, 608 bp, unidentified
  source 1..608: mol_type = unassigned DNA; note = unclassified Enterovirus sequence
ttaaaactgggtataggttgttcccacctgtaccacccacgtggtgtagtgctcctgtattccggtacacttgcacgccagtttgccctcccttcctgtaacgtagaagtaatataaacagaccaataggggatggcgaaccacgccgttcaaggtcaagcacttctgtttccccggcatgcgaggaatagaccttttcaagggttgaagccacaagtgtcgttacccgcattggtactacacagagcttagtaccgctctggaaacttattggttggtcgttcagccattttcccctggtagacccggcagatgaggcaagaagctccccactggtaacagtgttcttgcctgcgtggctgcctgcacaccctaatgggtgtgaagccaataagtagacagggtgtgaagagccgcgtgtgctaccaatgagtcctccggcccctgaatgcggctaatccaaccccacagctatggcatgcaatccagcatgtgcgtagtcgtaatgagtaattgtgggacggaaccgactactttgggtgtccgtgtttcccttattctcttatgtcttgcctatggtgacaatattaagtattaatattgctacc

SEQ ID NO: 661 - DNA, 608 bp, Rhinovirus C
  source 1..608: mol_type = genomic DNA
ggcatgggttgtacccacccatgccacccaagtggtgtagtgctcctgtatcccggtacacttgcacgccagtttgccctcccttttccccaagtaacttagaagcttacacacaggccactaggaggtggtaatccataccactgatggtcaagcacttctgtctccccggcacgcatggaatagaccttgaaaagggttgaagccataaatgtcgttatccgcattggtactacacaaagcctagtaatgccttgaaacttctacggttggtcgttccgctagatgcacccctctagtagacctggcagatgaggcagggcaaaccccactggcgacagtggccctgcctgcgtggctgcctgcgcgcccacttgggtgcgaagccgatgaacagacaaggtgtgaagagccccgtgtgctaccaatgagtcctccggcccctgaatgcggctaatccaaccccacagctattgcacacaaaccagtgtgtatgtagtcgtaatgagtaattgtgggacggaaccgactactttgggtgtccgtgtttccttttattctttaaatttgcacatggtgacaatattggtagtatcagtattgtcatc

SEQ ID NO: 662 - DNA, 608 bp, Rhinovirus C
  source 1..608: mol_type = genomic DNA
ttaaaactgggttatagttgctcccactataaccacccacgcggtgttgtggacttgtatttcggtacacttccatgccagttttatcttcccccctgcaacacttagaagaaatgtacttatggaccaataggcggcggccacccaggtcgttgacggtcaagcacttctgtctccccggtgatactggatacgctttacccaaggcgaaaaccgggctcatcgttatccgcaaagtgcctacgagaagtctagtagcactctgaaaacctatgactggtcgctccactgcaatcccagcagtagacctggcagatggggctagacataccccaccagcgatggtggtctagcccgcgtggctgcctgcacaccctatgggtgtgaagccagaaagtggacagggtgtgaagaacctattgtgctcactttgagtcctccggcccctgaatgtggctaatcctaaccctgcaaccgttgcgcacaacccagtgcgtatgcggtcgtaatgagcaattgcgggatggaaccaactactttgggtgtccgtgtttcttgttattcttttatttgcttatggtgacactgtatagctatacattgtcatc

SEQ ID NO: 663 - DNA, 609 bp, unidentified
  source 1..609: mol_type = unassigned DNA; note = unclassified Enterovirus sequence
taaaactgggtacaggttgttcccacctgtaccacccacgtggtgtggtgctcttgtattccggtacatttgcacgccagtttgctacccctcaccctttgtaacctagaagctattaactcgaccaataggcggtggtaaaccataccacttacggtcaagcacttctgtttccccggtatgcgaggaatagactctcacagggttgaagcctcaagtatcgttatccgcattggtactacgcaaagcctagtagcgcctcggaaatcccttggttggtcgttccgctagtttcccctagtagacctggcagatgaggcaggacattccccactggtgacagtggtcctgcctgcgtggctgcctgcgcacccttcggggtgcgaagccaagtgatggacaaggtgtgaagagccccgtgtgctactaatgagtcctccggcccctgaatgcggctaatccaaccccacagctattgcacacaaaccagtgtgtatatagtcgtaatgagcaattgtgggacggaaccgactactttgggtgtccgtgtttccttttattctcattatcttgcttatggtgacaatactgtgatatagtgttgttacc

SEQ ID NO: 664 - DNA, 609 bp, unidentified
  source 1..609: mol_type = unassigned DNA; note = unclassified Enterovirus sequence
aactgggcttgggttgtgcccacccaagctgcccacgtggcgttgtgctcttgtattccggtacacttgcacgccagtttgcctcccctaccctgcaacgaatttagaagaatggacacaaatagaccaataggtggtgacaatccatgtcactaatggtcaagcacttctgtttccccggtgtgatgtggaataaactcccccagggttgaagccataagcatcgttacccgctacgtgcctacgcaaaacctagtagcattctggagtctacttggttggccgttcagccactaacccgtggtaggcctggcagatgaggctgggcgtaccccactggtaacagtggcccagcctgcgtggctgcctgcccctctttgaggggaagccaattaggtgacagggtgtgaagagtcccgtgtgctcacgtagagtcctccggcccctgaatgtggctaatcctaaccccgcagctattgcacacaatccagtgtgttagtagtcgtaatgggcaactgtgggatggaaccaactactttgggtgtccgtgtttcttgtttttcttttatacttgcttatggtgacaaatagtgcatactgtttgacacc

SEQ ID NO: 665 - DNA, 610 bp, unidentified
  source 1..610: mol_type = unassigned DNA; note = unclassified Kobuvirus sequence
gtaacttcaagtgtgtgtgctcgtaatcttgactcctgccggaatgccgcccggttcagtgaacaaacagctaggcaagtccctcccttcccctgtggtcggttctcaccggccaccatccctcccccagcctgacgtgttacaggctgtgcaaagcccccgcgaaagctgctcacgtggcaattgtgggtcccccctttgtcaagacaccgagtctttctcccttaaggctagcccggtcccacgaacgtggaactggcaactagtggtgtcactacacgcctccgacctcggacgcggagtgctgttccccaagctgtaaccctgacccaagactgtgctgcctggcaagcaccgtctgggaagatgttccgctgtggctgccaaacctggtaacaggtgccccagtgtgtgtagtcttcctccagtctccggactggcagtcttgtgtaaagatgcagtgtaaggttcaagtgccaaatccctggaaggagtgaccctctactgccctaggaatgctgtgcaggtacccccaacttcggttggggatctgagcacaggctaattgtctacgggtagtttcatttcccatcctctcttttttggcatc

SEQ ID NO: 666 - DNA, 610 bp, unidentified
  source 1..610: mol_type = unassigned DNA; note = unclassified Enterovirus sequence
ttaaaactgggtacaggttgttcccacctgtatcacccacgtggtgtggtgctcttgtattccggtacacttgcacgccagtttgccacccctcacccgtcgtaacttagaagctaacaactcgaccaacaggcggtggtaaaccataccacttacggtcaagcactcctgtttccccggtatgcgaggaatagactcctacagggttgaagcctcaagtatcgttatccgcattggtactacgcaaagcttagtagtgccttgaaagtcccttggttggtcgctccgctagtttcccctagtagacctggcagatgaggcaggacactccccactggcgacagtggtcctgcctgcgtggctgcctgcgcacccttaggggtgcgaagccaagtgacagacaaggtgtgaagagccccgtgtgctaccaatgagtcctccggcccctgaatgcggctaatccaaccccacagctattgcacacaagccagtgtgtatgtagtcgtaatgagcaattgtgggacggaaccgactactttgggtgtccgtgtttccttttattcttatcattctgcttatggtgacaatactgtgaaatagtgttgttacc

SEQ ID NO: 667 - DNA, 610 bp, Rhinovirus A
  source 1..610: mol_type = genomic DNA
ttaaaactggatctaggttgttcccacctagatctcctacatggagttgtactctattattccggtaattttgtacgccagttttatatccctacccccatgtaacttagaagttaagcacaacgaccaataggaggcaattgaccaaattgctaaaggtcaagcacttctgtttccccggtcaagattgatacgctccaccagggcgaaaacaattgagatcgttatccgcaaagtgcctacgcgaagcctagtaacactttgaagagtttatggttggtcgctccgctattccccatagcagacctggcagatgaggctagaagctccccactggtgacagtgttctagcctgcgtggctgcctgcacacccttatgggtgtgaagccatatacttgacagggtgtgaagagcctagtgtgctcactttgagtcctccggcccctgaatgtggctaaccttaaacccgtagctagtgcacacaatccagtgtgtggctagtcgtaatgagcaattacgggatgggaccaactactttgggtgtccgtgtttcactttttccttttgtatttgcttatggtgacaatatatagattatatattgacacc

SEQ ID NO: 668 - DNA, 610 bp, Rhinovirus A
  source 1..610: mol_type = genomic DNA
ttaaaactgggtctaggttgttcccacctaggcctcctacatggagttgtactctattattccggtaattttgtacgccagttttatatcccttcccccatgtaacttagaagtttgacacactgaccaataggtggcaattaaccaaattgctaaaggtcaagcacttctgtttccccggtcaagattgatacgctctaccagggcgaaaacaattgagatcgttatccgcaaagtgcctacgcgaagcctagtaatatcttgaagaatttatggttggtcgctccgccattacccatggtagacctggcagatgaggctagaaattccccactggtgacagtgttctagcctgcgtggctgcctgcacaccctcacgggtgtgaagccatacgtttgacaaggtgtgaagagcctagtgtgctcactttgagtcctccggcccctgaatgtggctaaccttaaacccgtagctggtgcacacaaaccagtgtgtagctagtcgtaatgagcaattacgggatgggaccaactactttgggtgtccgtgtttcactttttccttttatatttgcttatggtgacaatatatagattatatattggcacc

SEQ ID NO: 669 - DNA, 610 bp, Rhinovirus A
  source 1..610: mol_type = genomic DNA
ttaaaactgggtttgggttgatcccacccaaacctcccaagcggagtggtactctgttatttcggtaactttgtacgccagttttatattccctcccccctttaaactgtaaagctaagcacacagaccaatagctgacaatcatccagattgttaatggtcaagcacttctgtttccccggtcaacgttgatatgctccaacagggcaaaaacaactgcgatcgttatccgcaaagtgcctacgcaaagcctagtagcacctttgaagtcatttggttggtcgctccgctgttccccacagtagacctggcagatgaggctagaaataccccactggtgacagtgttctagcctgcgtggctgcctgcacaccctttgggtgtgaagccaaatcatggacaaggtgtgaagagccccgtgtgctcactttgagtcctccggcccctgaatgtggctaaccttaaccctgcagctagagtgcacaatccagtgcatttctagtcgtaatgagcaattgcgggatgggaccaactactttgggtgtccgtgtttcactttttacctattatttgcttatggtgacaatatatataattatatattggcacc

SEQ ID NO: 670 - DNA, 610 bp, Rhinovirus A
  source 1..610: mol_type = genomic DNA
ttaaaactgggtccaggttgttcccacctggatctcctaatgggagttgtactctgttattccggtaactttgtatgccagttttatctccctacccccaatgtaacttagaagatgtacacaacgaccaataggtgatgatcaaccagattatcaaaggtcaagcacttctgttttcccggttagagttgatatgctccaacagggcaaaaacaactttaatcgttatccgcaaagcgcctacgcaaagcctagtaacagcttcgaagatttatggttggtcgttccgctgttccccacagtagacctggcagatgaggctagagattccccactggtaacagtgttctagcctgcgtggctgcctgcgcacccttcgggtgcgaagccatatttcggacaaggtgcgaagagccccgtgtgctcgctttgagtcctccggcccctgaatgtggctaaccttaaccctgcagctagtgcatacaaaccagtatgtggctagtcgtaatgagcaattgcgggatgggaccaactactttgggtgtccgtgtttctctttttccttttattattgcttatggtgacaatatatagtttatatattggcacc

SEQ ID NO: 671 - DNA, 610 bp, Rhinovirus C
  source 1..610: mol_type = genomic DNA
ttaaaactgaaccatagttgttcccactgtggttgcccaaggggcgtggtggtcttgtattacggtacatttccatgccagttttatcaccccttcccgaaacatagaagaaatgcacacaccgaccaataggaggtggtcaaccagaccactaaaggtcaagcacttctgtttccccggttggcttggatatgcttcacccgaggcaaaaaccgagccaatcgttatccgcaaagtgcctacgagaagcctagtagcacccttgaagccaatggttggtcgctccgttgcaaccccagcagcagacctggcagatgaggctgagcattccccaccagcgatggtggctcagcctgcgtggctgcctgcgcatccttcgggatgcgaagccagaaagtggacaaggtgtgaagagcctattgtgctcactttgagtcctccggcccctgaatgtggctaatcctaaccccgcagctactacacataagccaatgtgcaggtagtcgtaacgggcaactgtgggatggaaccaactactttgggtgtccgtgtttccttgttatctttttgaatgcctatggtgacaattgtacagtatacatttgttacc

SEQ ID NO: 672 - DNA, 611 bp, Rhinovirus A
  source 1..611: mol_type = genomic DNA
ttaaaactgaatccagattgttcccatctggatttcctacatggagttgtactctattattccggtaattttgtacgccagttttatcaccccttcccccgtaacttagaagtttgaaacaaaagaccaataggaggtaactatccaagttactataggtcaagcacttctgtttccccggtcaaagttgatatgctccaccagggcaaaaacaattgagatcgttatccgcaaagtgcctacgcaaagcctagtagtatcttgaaaagcatgtggttggttgctccgctgtaccccacagtaaacctggcagatgaggctagaagttccccactggtgacagtgttctagcctgcgtggctgcctgcgcactctttgagtgcgaagccatatgtttgacaaggtgtgaagagccccgtgtgctcactttgagtcctccggcccctgaatgtggctaaccttaaccctgcagctagtgcatgcaatccagcatgtggctagtcgtaatgagcaattgcgggatgggaccaactactttgggtgtccgtgtttcacttttttccttttataattgcttatggtgacaatatatagtgatatatattgacacc

SEQ ID NO: 673 - DNA, 611 bp, Rhinovirus A
  source 1..611: mol_type = genomic DNA
ttaaaactggatctaggttgttcccacctagatctcccaagtggagtggtacactattatcacggtaattttgtacgccggttttatctccccttaccccaagtaacttagaagtattacataaagaccaacaggcagtgattatccagatcactaaaggtcaagcacttctgtctccccggtcaaagttgatatgctccaacagggcaaaaacaactgagatcgttatccgcaaagtgcctacgcagagcctagtaactaccttgaaattacttggttggtcgttccaccaaaccccatggtagacctggcagatgaggctagaaattccccactggtaacagtgttctagcctgcgtggctgcctgcacaccctttgggtgtgaagccaagtaatggacagggtgtgaagagccgagtgtgctcactttgagtcctccggcccctgaatgtggctaaccttaaccctgcagctagagcgcgcaaaccagcgtgtatctagtcgtaatgagcaattgcgggacgggaccaactactttgggtgtccgtgtttctttttattcttatatttgcttatggtgacaatatataattatttgtatattggcacc

SEQ ID NO: 674 - DNA, 611 bp, Rhinovirus A
  source 1..611: mol_type = genomic DNA
ataaaactggcgtgcatagttcccatccagatcacccaagtggtgtagtgctctgttattccggtaactttgcacgccagttttattacccctttccccagtaacttagaagctttaatacactgaccaatagggtgcgacaaccagtcgtacaaggtcaagcacttctgtttccccggtcaatgttgatatgctcctccagggcaaaaacaatagcgatcgttatccgcaagatgcctacgcaaagcctagtagcatctttgaaaatacttggttggtcgctcatgtgcaaccccagcattagacctggcagatgaggctagaaattccccactggcgacagtgttctagcctgcgtggctgcctgcacaccctaacgggtgtgaagcctggtattggacaaggtgtgaagagccccgtgtgctcatcttgagtcctccggcccctgaatgcggctaaccttaaacctgcagccattgcttacaatccagtgagtttatggtcgtaatgagcaattgcgggatgggaccgactactttgggtgtccgtgtttctctttttacttaaatttgagcttatggtgacaatatatagcaatatatattggcatc

SEQ ID NO: 675 - DNA, 611 bp, unidentified
  source 1..611: mol_type = unassigned DNA; note = unclassified Enterovirus sequence
ttaaaactgaatcatggttgttcccaccatgattacccacgcggtgcagtggtcttgtattacggtacatttccataccagttttatacaccccaccccgaaacatatagaagtttgtacacaatgaccaataggtggtggccatccaggttactgacggtcgagcacttctgtttccccggtacccttgtatacgcttcacccgaggcgaaaaacgaggttatcgttatccgcaaagtgcctacgagaagcctagtaacacttttgaaacctatggctggtcgctcagctgctcacccagcagtagacctggcagatgaggctagacattccccaccagcgatggtggtctagcctgcgtggctgcctgcacaccctattgggtgtgaagccagaaagtggacagggtgtgaagagcctattgtgctcactttgagtcctccggcccctgaatgtggctaatcctaaccccgtagctgttgcatgcaacccagcatgtatgcagtcgtaatgggcaactatgggatggaaccaactactttgggtgtccgtgtttctcgtttcacttttcattgcttatggtgacaattgtagttgatacacttgttacc

SEQ ID NO: 676 - DNA, 611 bp, Rhinovirus A
  source 1..611: mol_type = genomic DNA
ttaaaactgggtgcgagttgttcccactcgcacttcctacgtggagtagtacactattattacggtaattttgtacgccagttttataacccttccccttttgtaacttagaagtttgaacttgagaccaataggtggtgatcaaccagatcgccaaaggtcaagcacttctgtttccccggtcaacattgatatgctccaccagggcaaaaacaattgcgatcgttacccgcaaagtgcctacgcaaagcttagtaatatcttgaacgatatatggttggtcgctccactaatccccatagtagacctggcagatgaggctggaaactccccactggcgacagtgttccagcctgcgtggctgcctgcgcactctcacgagtgcgaagccatatatttgacaaggtgtgaagagccccgtgtgctcactttgagtcctccggcccctgaatgtggctaaccttaaccctgcagctagtgcatacaaaccagtatgtggctagtcgtaatgagcaattgcgggacgggaccaactactttgggtgtccgtgtttcactttttcttttatggtttgcttatggtgacagtatatagtgtatatattgttacc

SEQ ID NO: 677 - DNA, 611 bp, Rhinovirus A
  source 1..611: mol_type = genomic DNA
ttaaaactgggtccaggttgttcccacctggacttcccacgtggagttgtgcactgttattccggtaactttacacgccagttttatctcccttcccaaatgtaacttagaagatgtacacagcgaccaataggtggcaactagccaagttgcttaaggtcaagcacttctgtccccccggtcaatgttgatacgctctcccagggcgaaaacaactgagatcgttatccgcaaggcgcctacacaaaacctagtaacatcttgaatggtatgtggctggtcgttccgctaaaccccatagtagacctggcagatgaggctagaaattccccactggcgacagtgttctagcctgcgtggctgcctgcgtgtccttacggacacgaagccatatacttgacaaggtgtgaagagtcccgtgtgctcgtcttgagtcctccggcccctgaatgtggctaaccttaaccctgcagccagtgcgcacaaaccagtgtgtagctggtcgtaatgagtaattgcgggatgggaccaactactttgggtgtccgtgtttcactttttaccttttattatgcttatggtgacaatatatagatgcatatattgacacc

SEQ ID NO: 678 - DNA, 611 bp, Rhinovirus A
  source 1..611: mol_type = genomic DNA
ttaaaactgaatccaggttgttcccacctggatttcccatgtggagtagtacactgttattccggtaactttgtacgccagttttataaccccttccccttatgtaacttagaagataagcacaaagaccaataggtggtggctatcccagtcactaaaggtcaagcacttctgtttccccggtcaacgttgatatgctccaccagggcaaaaacaaccgagatcgttatccgcaaagtgcctacgcaaagcctagtagcactttgaatagcatgtggttggtcgctccactattccccatagtagacctggcagatgaggctagaaatcccccactggcgacagtgttctagcctgcgtggctgcctgcgtgtcctaacggacacgaagccatatgtttgacaaggtgtgaagagccccgtgtgctcactttgagtcctccggcccccgaatgtggctaaccttaaccctgcagctggggcatacaatccagtgtgaactcagtcgtaatgagcaattgcgggatgggaccaactactttgggtgtccgtgtttcacttttttttataatgcttatggtgacaatatataataatttgtatattggcacc

SEQ ID NO: 679 - DNA, 611 bp, Enterovirus B
  source 1..611: mol_type = genomic DNA
attagctggcccggtacaccaatcgggtcttgaccaagcacttctgttaccccggactgagtatcaataggctgctcacgcggctgaaggagaaaacgttcgttatccggccaattacttcgagaaacctagtaacaccgtgaaggttgcgcagcgtttcgttccgcactaccccagtgtagatcaggtcgatgagtcaccgcatcccccacgggtgaccgtggcggtggctgcgttggcggcctgcccatggggaaacccatgggacgcttcaatattgacacggtgcgaagagtctattgagctaattggtagtcctccggcccctgaatgcggctaatcctaactgcggagcagatacccgcacaccagcgggcagtctgtcgtaatgggtaactctgcagcggaaccgactactttgggtgtccgtgtttccttttatttttatattggctgcttatggtgacaattgaaagattgttaccatatagctattggattggccatccagtgagcaacagagcgattgtatttctctttgttggattcataccactaaactacaatagttataacactctattgtatatcattcatctgaacacaaaaag

SEQ ID NO: 680 - DNA, 612 bp, unidentified
  source 1..612: mol_type = unassigned DNA; note = unclassified Kobuvirus sequence
tttcccctgttcgtaactaagtgtgtgcccaatctcctcactcctgctggcttcaccgaccggcagtgtccaaaatgctaggtgaatcccctccctttcctctgggcttctgcccagcttcctccccccagcctgacgtgacacaggctgtgcaaagaccccgcgaaagctgccaaaagtggcaattgtgggtcccccctttgtaaaggcgtcgagtctttctccctcaaggctagacccgtcagtgaattctgtcgggcaactagtgacgccactgcacgcctctgacctcggccgcggagtgctgccccccaagtcgtgcccctgaccacaagttgtgctgtctggcaaacattgtctgtgagaatgttccgctgtggctgccaagcctggcaacaggctgccccagtgtgcgtagttctcatccagacttcggtctggcaacttgctgttaagacacggcgtaaggggcgtgtgccaacgccctggaacgagtgtccactctaataccccgaggaatgctacgcaggtacccctggttcgccagggatctgagcgtaggctaattgtctaagggtattttcatttcccattctttctttcttgttcata

SEQ ID NO: 681 - DNA, 612 bp, Rhinovirus A
  source 1..612: mol_type = genomic DNA
ttaaaactggatctgggttgttcccacccagatttcccatgtggagtagtactctattattccggtaattttgtacgccagttttatattccctaccccgagtaacttagaagataagcacacaaggccaatagtgggtgattagccaaatcatcaaaggtcaagcacttctgtttcccccggtcaaggttgatatgctctaccagggcaaaaacaactgagatcgttatccgcaaaatgcctacacaaagcctagtatcatcttggaaggcacagagttggtcgctccactattccccatagtagacctggcagatgaggctagaaaatccccactggcgacagtgttctagcctgcgtggctgcctgcgtgccttgcgaggcacgaagccctgtgtttgacaaggtgtgaagagccccgtgtgctcattttgattcctccggcccctgaatgtggctaaccttaaccctgcagctagtgcacacaaaccagtgtgtatctagtcgtaatgagtaattgcgggacgggaccaactactttgggtgtccgtgtttcactttttaccttttaattgcttatggtgacaatatatataaatatatattgacacc

SEQ ID NO: 682 - DNA, 612 bp, Rhinovirus A
  source 1..612: mol_type = genomic DNA
ttaaaactggatctgggttgctcccacccagattacccaagtggtgtagtactctgttattacggtagctttgtacgccagttttatcacccctccccacaatgtaacttagaagttttacacttacagaccaataggatgtgattatccaaatcactaaaggtcaagcacttctgtttccccggttagatttgatacgctccaacagggcgaaaacagatctgatcgttatccgcaagatgcctacgcaaagcttagtagcgctctgaatgctttttggctggttgttccactacaaacccagtagtaaacctggcagatgaggctagaagttccccactggcgacagtgttctagcctgcgtggctgcctgcacaccctatgggtgtgaagccaatcagttgacagggtgtgaagagccccgtgtgctcatcttgagtcctccggcccctgaatgtggctaaccttaaacccgcagccaaggtgtgcaaaccagcacattcttggtcgtaacgagtaattgtgggatgggaccaactactttgggtgtccgtgtttctttttattcttttacaatgcctatggtgacaatatatagtatatattgtcatt

SEQ ID NO: 683 - DNA, 612 bp, Rhinovirus A
  source 1..612: mol_type = genomic DNA
ttaaaactgggtccaggttgttcccacctggatctcctacatggagttgtactctgttattccggtaaccttgtacgccagttttatatcccctccccaaatgtaacttagaagttatacacacagaccaataggcggtgatcctccagatcactaacggtcaagcacttctgtctccccggtttgaattgatacgctccaacagggcgaaaacaatttgaatcgttacccgcaaagtgcctacgcaaagcctagtagcactttagaaaatttatggttggtcgctcagctataccccctagtagacctggcagatgaggctagaagtaccccactggcgacagtgttctagcctgcgtggctgcctgcacaccctcacgggtgtgaagccatatatttgacaaggtgtgaagagccccgtgtgctcactttgagtcctccggcccctgaatgtggctaaccttaaccctgcagctagtgcatgtaatccaacatgttgctagtcgtaatgagcaattgcgggatgggaccaactactttgggtgtccgtgtttcactttttaccttttatttgcttatggtgacaatatatataatatatatattggcatc

SEQ ID NO: 684 - DNA, 612 bp, unidentified
  source 1..612: mol_type = unassigned DNA; note = unclassified Enterovirus sequence
ttgaaactgagtgtgggttgttcccacccacacttcccatgtggagtagtacactgttattacggtaaccttgtacgccagttttatcatccctttccctttgtaacttagaagttttaaacttgagaccaataggtggtgatcagccagatcactaaaggtcaagcacttctgtctccccggtcaacgctgatatgctccgccagggcaaaaacagctgcgatcgttatccgcaaagtgcctacgcaaagcctagtaatatcttgaatgatatatggttggtcgttcagctaaaccccatagtagacctggcagatgaggctggaaataccccactggtgacagtgttccagcctgcgtggctgcctgcgcactcttgcgagtgcgaagccatatatttgacaaggtgtgaagagccccgtgtgctcactttgagtcctccggcccctgaatgtggctaaccttaaccctgcagctagtgcatacaatccagtgtgtggctagtcgtaatgagcaattgcgggatgggaccaactactttgggtgtccgtgtttcactttttcctttataatttgcttatggtgacagtatatagcttatatattgttacc

SEQ ID NO: 685 - DNA, 612 bp, Rhinovirus C
  source 1..612: mol_type = genomic DNA
ttaaagctggatcatggttgttcccaccatgattacccacgcggtgcagtggtcttgtattacggtacatttccataccagttttatacaccccaccccgaaactcatagaagtttgtacacaatgaccaataggtggtggccatccaggtcgctaatggtcaagcacttctgtttccccggcacccttgtatacgcttcacccgaggcgaaaaatgaggttgtcgttatccgcaaagtgcctacgaaaagcctagtaacactttgaaaacccatggttggtcgctcagctgtttacccaacagtagacctggcagatgaggctagacattccccaccagcgatggtggtctagcctgcgtggctgcctgcacaccctgccgggtgtgaagccagaaagtggacaaggtgtgaagagcctattgtgctcactttgagtcctccggcccctgaatgtggctaaccctaaccccgtagctgttgcatgtaacccaacatgtatgcagtcgtaatgggcaactatgggatgggaccaactactttgggtgtccgtgtttcctgttttactttttcattgcttatggtgacaattgtatctgatacacttgttacc

SEQ ID NO: 686 - DNA, 612 bp, Rhinovirus A
  source 1..612: mol_type = genomic DNA
ttaaaactgggtccaggttgttcccacctggatctcctacatggagttgtactctattatcccggtaatcttgtacgccagttttatatcccttccctttttgtaacttagaagttaaacacacagaccaataggtggtggctatccaagtcattaatggtcaagcacttctgtttccccggtttagattgatacgctccaccagggcgaaaacaatttaaatcgttatccgcaaaatgactacgcaaagcctagtaatatcttgaaggacttatggttggtcgctccactaaaccccatagtagacctggcagatgaggctagaaataccccactggagacagtgttctagcctgcgtggctgcctgcacaccctatgggtgtgaagccatactttcgacaaggtgtgaagagccccgtgtgctcattttgagtcctccggcccctgaatgtggctaaccttaaccctgcagctagtgcatgcaatccagcatgttgctagtcgtaacgagcaattgcgggatgggaccaactactttgggtgtccgtgtttcactttttccttttatttgcttatggtgacaatatatatagtacatatatattggcatc

SEQ ID NO: 687 - DNA, 613 bp, Rhinovirus A
  source 1..613: mol_type = genomic DNA
ttaaaactggatctgggttgttcccactcaggtctcccacgtggagtagtacactgttattacggtaactttgtacgccagttttacatcccctccccccaagtaacttagaagataagcacacaggccaataggagatgatcagccagatcattatgggccaagcacttctgtttccccggtcgaagttgatatgctccaacagggcaaaaacaactgagatcgttatccgcaaagcgcctacgcaaagcctagtaactatctggaaattacttggttggtcgctccgccataccccatggtagacctggcagatgaggctagaaattccccactggcgacagtgttctagcctgcgtggctgcctgcacaccctttttgggtgtgaagccaagtaatggacagggtgtgaagagccccgtgtgctcgctttgagtcctccggcccctgaatgtggctaaccttaaccccgcagctagagcacacaacccagtgtgtatctagtcgtaatgagcaattgcgggatgggaccaactactttgggtgtccgtgtttcttgtttttcttttatatttgcttatggtgacaatatatagtgatatatattggcatc

SEQ ID NO: 688 - DNA, 613 bp, Rhinovirus A
  source 1..613: mol_type = genomic DNA
ttcaaactgggttgtggttgatcccaccacaactgctcactgagcgtagtgctctcatattccggtatgcttgcacgccagttttactcccctcccctcattgtaacttagaagcaaagcacacctgatcaataggagataacttgccaggttatctaagatcaagcacttctgtttccccggcaagtgtgaatatgctttacccaaggcaaaagctgatcttgtcgttatccgcaaggtgcctacgagaagcctagtaatgctcaagatgtggtttgactggtcgctccgctgttccccacagtagacctggcagatgaggctggacattccccaccagcgatggtggtccagcctgcgtggctgcctgcacaccctatgggtgtgaagccaaatttactgacagggtgtgaagagcctattgtgctcaccttgattcctccggcccctgaatgtggctaatcctaaccccgctgctattgcacacgaaccagtgtgtagatagtcgtaatgagcaatagtgggatggaaccaactactttgggtgtccgtgtttcttgtttttctttatttgtcttatggtcacaatatatatataacgtatattgtgatc

SEQ ID NO: 689 - DNA, 613 bp, unidentified
  source 1..613: mol_type = unassigned DNA; note = unclassified Enterovirus sequence
tgtggttgtacccaccaccgggcatactgtgcgtggtacactgtgattccggtcaccttgtacgcctgtttgctaccctaccccaactttctttcgttctttacttccagtaacttagaagttgacacagagtccaataggatgcagctaatccaagtctgccacggacaagcacttctgtttccccgggtgtgtgaatagactccaacagggttgaagctgtagcactcgttatccgcataactaccacgcgaatgttagtaacaccctctaggtatagtgggatttcgctccgcagaaaccccatctgtagattagggcaatgaggctacacggaccccactggcgacagtggtgtagcctgcgtggtgccctacctggggtttcataccccaggattccactttactgacagggtgtgaaggcgctagtgtgctagttgtgagtcctccggtccctgaatgtggctaatcctaaccccgtggccatttcatgtaaaccaacatgcaggtggtcgtaacgagtaatcacgggatggaaccaactactttgggtaaccgtgtttcctgttttactttaatgtgtgtcttatggttacaactatagagtaacc

SEQ ID NO: 690 - DNA, 614 bp, Rhinovirus A
  source 1..614: mol_type = genomic DNA
ttcaaactggatctgggttgttcccacccagatcacccaagtggtgtagtactctgtcattccggtgactttgtacgccagtttttacaccccccccttcttgtaacttagaagaattaagttcagaccaataggaaaacgacaaaccagtcgtttaaggtcaagcacttctgtttccccggtcaatgctgatatgcttcaccaaggcaaaaacagcagcgatcgttacccgcaagacgcctacgcaaagcctagtaatgcctttgaagatatttgtctggtcactcaggtacaatcccagtactagacctggcagatgaggctggaaaatccccactggcgacagtgttccagcctgcgtggctgcctgcacacccatacgggtgtgaagccaaatattggacaaggtgtgaagagccccgtgtgctcgtcttgagtcctccggcccctgaatgcggctaaccttaaccccacagccattgcttgcattccagcaagtctatggtcgtaatgagcaattgtgggatgggaccgactactttgggtgtccgtgtttcactttttaccttttattatgcttatggtgacaatatatagcgttatatattggcatc

SEQ ID NO: 691 - DNA, 614 bp, Rhinovirus A
  source 1..614: mol_type = genomic DNA
cacttgggtgatctgggtgggaacaacccagatcccccaagtggtgtagtgctctgttattccggtaaccttgcacgccagttttatcacccctttccccatgtaacttagaagttttaaacacagaccaatagggagcgacaaaccagtcgtgaaaggtcaagcacttctgtttccccggtcaacgttgatatgctctcccagggcaaaaacaacagcgatcgttacccgcaagatgcctacgcaaagcttagtaacgccctcgaagatactcggttggtcgttcatgtgcaaccccagcattagacctggcagatgaggctagaaattccccactggcgacagtgttctagcctgcgtggctgcctgcacaccctgacgggtgtgaagcctagtattggacaaggtgtgaagagccccgtgtgctcatcttgagtcctccggcccctgaatgcggctaaccttaaacctgcagccattgctcacaatccagtgagtttgtggtcgtaatgagcaattgcgggatgggaccgactactttgggtgtccgtgtttctctttttaccttacattttagcttatggtgacaatatatagtgatatatattggcatc

SEQ ID NO: 692 - DNA, 614 bp, unidentified
  source 1..614: mol_type = unassigned DNA; note = unclassified Enterovirus sequence
ttaaaactgaaccatggttgttcccaccatggttacccacgtggtgcagtggacttgtattacggtacatttccataccagttttataacccctaccctgaaacttttagaagcatgtacacatacagaccaacaggtggcaatcagccagattgctaacggtcaagcacttctgtttccccggtaatcttgcatacgcttcacccgaggcgaaaagtgagattatcgttatccgcaaagtgcctacgagaagcccagtagcacattgaaagcctatggttggtcgctcagctgttcacccaacagtagacctggcagatgaggctagatattccccaccagcgatggtgatctagcctgcgtggctgcctgcacaccctatcgggtgtgaagccagaaagtggacaaggtgtgaagagcctattgtgctcactttgagtcctccggcccctgaatgtggctaatcctaaccccgtagctgttgcatgtaacccaacatgtctgcagtcgtaatgggcaactacgggatggaaccaactactttgggtgtccgtgtttcttgtttttctttatatttgcttatggtgacaattgtagatactacacttgttacc

SEQ ID NO: 693 - DNA, 615 bp, Enterovirus A
  source 1..615: mol_type = genomic DNA
cgaccaatagtgggcgtgacgcaccagtcacgtcttggtcaagcacttctgtttccccggaccgagtatcaatagactgcttacgcggttgaaggagaaaacgttcgttacccggctaactacttcgagaaacctagtagcaccatgaaagttgcagagtgtttcgctcagcacttcccccgtgtagatcaggtcgatgagccactgtgaaccccacgggcgaccgtgacagtggctgcgttggcggcctgcccatggggcaacccgtgggacgctctaatacagacatggtgtgaagagtctattgagctagttagtaatcctccggcccctgaatgcggctaatcctaactgcggagcacgcaccctcaatccagggggcagtgtgtcgtaacgggtaactctgcagcggaaccgactactttgggtgtccgtgtttccttttattccttactggctgcttatggtgacaatcaaagagttgttaccatatagctattggattggccatccggtgtctaacagagctattgtctacctgttcattggatacgtccctctcaattacaagactctccaaactcttaactacatactgctacttaatcataagaa

SEQ ID NO: 694 - DNA, 615 bp, Rhinovirus A
  source 1..615: mol_type = genomic DNA
ttaaaactgggtttgggttgatcccacccaaaccacccacgtggtgtagtacactgttatctcggtaactttgtacgccagttttatctccccctcccccctttgtaacttagaagtcatgcacaatgaccaatagcaggcaatcatccagattgtcatcggtcaagtacttctgtttccccggttcagattgatatgctccaacagggcaaaaacaacctggatcgttatccgcaagatgcctacgcagaacctagtatcacactggaagattctcggttggtcgctcagttacaaccccagtaacagacctggcagatgaggctagaaattccccactggcgacagtgttctagcctgcgtggctgcctgcacacccgtttgggtgtgaagcctagaattggacagggtgcgaagagtcgagtgtgctcatcttgagtcctccggcccctgaatgcggctaaccctaaccctgcagccattgcccacaaaccagtgggtctatggttgtaatgagcaattgcgggatgggaccgactactttgggtgtccgtgtttcactttttacttattatttgcttatggtgacaatatatagatacatatattgacacc

SEQ ID NO: 695 - DNA, 615 bp, Rhinovirus A
  source 1..615: mol_type = genomic DNA
ttaaaactgggtttgggttgttcccacccaaaccacccacgcggtgttgtacactgttattccggtaaccttgtacgccagttttatatcccttcccccccttgtaacttagaagacatgcgaatcgaccaatagcaggcaatcaaccagattgtcaccggtcaagcacttctgtttccccggctctcgttgatatgctccaacagggcaaaaacaattggagtcgttacccgcaagatgcctacgcaaaacctagtagcatcttcgaagatttttggttggtcgctcagttgctaccccagcaatagacctggcagatgaggctagaaataccccactggtgacagtgttctagcctgcgtggctgcctgcacacccacacgggtgtgaagccaaagattggacaaggtgtgaagagtcacgtgtgctcatcttgagtcctccggcccctgaatgcggctaaccttaaccccgtagccattgctcgcaatccagcgagtatatggtcgtaatgagtaattacgggatgggaccgactactttgggtgtccgtgtttcactttttacttatcaatttgcttatggtgacaatatatatagatatatattgacacc

SEQ ID NO: 696 - DNA, 615 bp, Rhinovirus A
  source 1..615: mol_type = genomic DNA
ttaaaactgggttcaggttgatcccacctgaacctcccaagcggagtagtactctgttatttcggtaactttgtacgccagttttatatccccctccccatgtaacttagaagatgagctcacagaccaatagccggcaatcatccagattgtcaatggtcaagcacttctgtttccccggtcaacgttgatatgctccaacagggcaaaaacaactgagatcgttatccgcaaagtgcctacgcaaagcctagtaatgctttcgaagtcatttggttggtcgctccgctgtaacccacagtagacctggcagatgaggctagaaactccccactggcgacagtgttctagcctgcgtggctgcctgcacaccctttgggtgtgaagccaaattacggacaaggtgtgaagagccccgtgtgctcactttgagtcctccggcccctgaatgtggctaaccttaaccctgcagctagagtgcacaatccagtgtatttctagtcgtaatgagcaattgcgggatgggaccaactactttgggtgtccgtgtttcactttctttttttatcttttatttgcttatggtgacaatatattgaattatatattgacacc

SEQ ID NO: 697 - DNA, 615 bp, Rhinovirus A
  source 1..615: mol_type = genomic DNA
ttcaaactggatctgggttgttcccacccagatcacccaagaggtgtagtgctctgtcattccggtgaccttgcacgccagttttatcaccccttccctcttgtaacttagaagaattaaactcagaccaataggaagcgacaagccagtcgtgacaggtcaagcacttctgtttccccggtcaaagttgatatgcttcaccaaggcaaaaacaacagcgatcgttatccgcaagatgcctacgcaaagcctagtagtgcctttgaaaatatttgtctggttgctcaagtacaaccccagtactaaacctggcagatgaggctggagcttccccactggtaacagtgttccagcctgcgtggctgcctgcacacccttacgggtgtgaagccaaatattggacaaggtgtgaagagccccgtgtgctcatcttgagtcctccggcccctgaatgcggctaaccttaaccccacagccattgctcacaatccagtgagtgtatggtcgtaacgagcaattgtgggatgggaccgactactttgggtgtccgtgtttctcttttttcctttttaattctgcttatggtgacaatatatagtgttatatattggcatc

SEQ ID NO: 698 - DNA, 615 bp, Rhinovirus A
  source 1..615: mol_type = genomic DNA
ttaaaactggatcatggttgttcccaccatgattacctacgggtgtagtatacttgtatcccggtacatttatacgccagttttataacccccaccccaaatgtaacttagaagcatgtacacaatgatcaatagggtggtggctatccaagtcatctaagatcaagcacttctgtctccccggtgagtgtgaatatgctttacccaaggcaaaagctaatctcatcgttatccgcaaggtgcctacgggaagcctagtaacattctgaagatattttggttggtcgatcagttgcactcacccatgcaatagacctggcagatggggctaggcatacctcactggtaacagtggcctagcccgcgtggctgcctgcacaccttcgggtgtgaagccataatattgacagggtgcgaagagcctactgtgctcaccttgagtcctccggcccctgaatgtggctaatcctaaccccgtatccattgcacacaaaccagtgtgtctatggtcgtaatgggtaactacgggatggaaccaactactttgggtgtccgtgtttcttgtttttctttaatactgcttatggtgacattatatattgatatagtgtcatc

SEQ ID NO: 699 - DNA, 615 bp, unidentified
  source 1..615: mol_type = unassigned DNA; note = unclassified Enterovirus sequence
ttaaaactgggcaggagttgttcccactcttgccacccacagggtgtggtgctcttgtattacggtacacttgcatgccagttttatctcccccctccccacaatgtaatttagaagccaatcacatgaccaataggaagtggtaagccataccacttaaggtcaagcacttctgtttccccggtatgcgtggaataggcctcttaaggggctgaagccacaattatcgttacccgcatgtgaactacgcgaaacctagtactaccttgaaagtacattgtctggtcgctcagccaatccccatggtagacctggcagatgaggcaagaggtaccccactggtaacagtgttcttgcctgcgtggctgcctgcacacccttaccgggtgtgaagccaatgtatagacagggtgagaagagtcgagtgtgcttcacatgagtcctccggcccctgaatgcggctaatccaaccccgcagctgtagtatgcaagccagcatatgtgcagtcgtaatgggtaactgcgggacggaaccgactactttgggtgtccgtgtttcctgtttttcctttattcatgcttatggtgacaatattgagaattaatattgtcact

SEQ ID NO: 700 - DNA, 615 bp, Rhinovirus A
  source 1..615: mol_type = genomic DNA
ttaaaactggatctgggttgttcccacttggatctcccaaagggagtggtactctgttattacggtaactttgtacgccagttttatcctccccttaccccatgtaacttagaagtttttcataaagaccaatagttggtaatcatccagattacttaaggtcaagcacttctgtttccccggtcaatgttgatatgctccaacagggcaaaaacaactgcgatcgttatccgcaaagcgcctacgcaaagcttagtagcacctttgagattgtttggttggtcgttccgccatttcccctggtagacctggcagatgaggctagaagtaccccactggcgacagtgttctagcctgcgtggctgcctgcacaccctgtgggtgtgaagccaaataatggacaaggtgtgaagagccccgtgtgctcgctttgagtcctccggcccctgaatgcggctaaccttaaccctgcagctagagcatacaaaccagtgtgtatctagtcgtaatgagcaattgcgggatgggaccgactactttgggtgtccgtgtttcactttttttttacttataattgcttatggtgacaatatatatatagtatatattgacacc

SEQ ID NO: 701 - DNA, 616 bp, Rhinovirus A
  source 1..616: mol_type = genomic DNA
ttaaaactgggtctgggttgttcccacccaaaccacccacgcggtgtagtacactgttattccggtaactttgtacgccagttttatatccccaccccccttttgtaacttagaagttatgcacactgaccaatagtgggcaatcatccagattgtcatcggtcgagcacttctgtttccccggtttgagttgatatgctccaccagggcaaaaacaactcagatcgttatccgcaagatgcctacacagaacttagtaccattctggaaaattcttggctggtcgttcaattactaccccagtaatagacctggcagatgaggctagaagttccccactggcgacagtgttctagcctgcgtggctgcctgcacacccttctggggtgtgaagcctagaattggacagggtgtgaagagtcgcgtgtgctcatcttgagtcctccggcccctgaatgcggctaaccctaaccctgcagccattgcccacaatccagtgggtttatggtcgtaatgagcaattgcgggatgggaccgactactttgggtgtccgtgtttcactttttacttattatttgcttatggtgacaatatatagatacatatattgacacc

SEQ ID NO: 702 - DNA, 616 bp, Rhinovirus A
  source 1..616: mol_type = genomic DNA
ttaaaactgggagtgggttgttcccactcactccacccatgcggtgttgtacactgttattacggtaaccttgtacgccagttttgccacccttccccattatgtaacttagaagtttgtacaacaagaccaataggtgataattatccagattatcaaaggtcaagcacttctgtttccccggtcgatgaggatatgctttacccaaggcaaaaaccttaaagatcgttatccccacactgcctacacagagcctagtaccacttttgatgtaattaggttggtcgctccctgcaaacccagcagtagacctggcagatgaggctggacactccccactggtgacagtggtccagcctgcgtggctgcctgctcaccctattgggtgagaagcctacttattgacaagatgtgaagagccgcgtgtgctcagtgtgcttcctccggcccctgaatgtggctaaccttaaccctgcagccgctgcccataatccaatgggtttacggtcgcaacgcgcaagtgcgggatgggaccaactactttgggtgtccgtgtttcctatttttcttttatttgcattttatggtgacaatttatagtatatagattgtcgtc

SEQ ID NO: 703 - DNA, 616 bp, Rhinovirus A
  source 1..616: mol_type = genomic DNA
ttaaaactggatctaggttgttcccacctagatctcccatgtggagtagtactctattattacggtaattttgtacgccagttttatatccccttccccttttgtaacttagaagtcgtgaacacagaccaataggtggcgatcacccagatcgcttaaggtcaagcacttctgtttccccggtcaacgttgatatgctccaccagggcaaaaacaacggagatcgttatccgcaaggtgcctacgcaaagcctagtaacctcttggaggatatatggttggtcgctcagctataccccatagtagacctggcagatgaggctagaaactccccactggcgacagtgttctagcctgcgtggctgcctgcgcactcttatgagtgcgaagccatatatttgacaaggtgtgaagagccccgtgtgctcaccttgagtcctccggcccctgaatgtggctaaccctaaccctgcagctagtgcatgaaatccatcatgttgctagtcgtaatgagcaattgcgggatgggaccaactactttgggtgtccgtgtttcactttttccttttatatttgcttatggtgacaatatatatataacatatatattggcatc

SEQ ID NO: 704 - DNA, 616 bp, Rhinovirus A
  source 1..616: mol_type = genomic DNA
ttaaaactgggttcaggttgttcccacctgaatctcctacatggagttgtactctattatcccggtaattttgtacgccagttttatcctcccctccccatgtaacttagaagctgtacacaacgaccaacaggtaacattcatccagagtgttaaaggtcaagcacttctgtttccccggtcaaagttgatatgctccaacagggcaaaaacaactgcgatcgttatccgcagagcaactacgcaaagcttagtaccactttcaatggtgtatggctggtcgctccactataaacccaatagtagacctggcagatgaggctagaaactccccactggtaacagtgttctagcctgcgtggctgcctgcgtgcccttttgggcacgaagccttacatttgacaaggtgcgaagagccccgtgtgcttgctttgagtcctccggcccctgaatgtggctaaccttaaccctgcagctagtgtgtgcaatccagcacatggctagtcgtaatgagcaattgcgggatgggaccaactactttgggtgtccgtgtttcttgtttttcttttatatttgcttatggtgacaatatatatagaatatatatattggcatc

SEQ ID NO: 705 - DNA, 616 bp, Rhinovirus C
  source 1..616: mol_type = genomic DNA
ttaaaactgggtacaggttgttcccacctgtaccacccaagtggtgtagtgctcttgtattccggtacatttgcacgccagtttgccacccctaccctctatgtaacttagaagcttacacaaagaccaataggcggtggtaaacccataccactaacggtcaaacacttctgtttccccggcatatgaggaataggctccaaaagggctgaagccactagtgtcgttatccgcattggtactacgcaaagcctagtatcggcctgaaaatttcttggttggtcgttcggccagttaccccactggtagacctggcagatgaggcaggacttaccccactggcgacagtggtcctgcctgcgtggctgcctgcacacccttatggggtgtgaagcctaggaacggacagggtgtgaagagccccgtgtgctaccaatgagtcctccggcccctgaatgcggctaatcttaccccgcagctgttgcacacaatccagtgtgtatgcagtcgtaatgagcaattgtgggatggaaccgactactttgggtgtccgtgtttccttgttttccttatatttgcttatggtgacaatattgatattatcagtgttgtcatc

SEQ ID NO: 706 - DNA, 617 bp, Pegivirus D
  source 1..617: mol_type = genomic DNA
tgataccgtgtcccggtacgacctcgcgcgtccccaagctcgccctgaggggggagcgtaagggcgcgtagtggggtagccccccaaaccgagccaccctagtgagtgactttagaatggttagggagactaccgccttcgctgtttggggacctaatgatccgcgtgccagggttcttcgggtaaatcccggcgcggtgttttgggttcagggcagtaggggcagacgggccagcagtcgctggttcctggtaccaccaccctatccggacgacctccctcacgaaaggtcgccacggtctgtggctcgacgacgcctataattcagtccgaggggcgcagccctcgttaaacttaggcaaggttcctcgccattgatttggccaggggtttaagtgaacgccgcccttttaatgtttaatagggttctttcccggcgggttgacaaacacttccctgggctcttcgttggcctcggttccttgatgcttcggcacccatgagcgcacaggggggggaccctgcgacagtccgccaagaggaaaatccttcgggtgacctcgtgcgcaacccaatcccttcttcttccacatggcgtgtctgtggtgcatgctgtg

SEQ ID NO: 707 - DNA, 617 bp, Rhinovirus A
  source 1..617: mol_type = genomic DNA
ttaaaactgggtctgggttgtccccacctagatcacccaagtggtgtagtacactgttatttcggtaaccttgtacgccagttttataaccccctccccaaatgtaacttagaagctgtacacaacgaccaatagagggtaatcatccagattacttacggtcaagcacttctgtctccccggtttactttgatatgctccaacagggcaaaaacaaagtgaatcgttacccgcaagatgcctacgcaacgcctagtaacatcctgaattgtttatggttggtcgctcaattacaaccccagtaatagacctggcagatgaggctagatattccccactggcgacagtgatctagcctgcgtggctgcctgcacaccccttgtgggtgtgaagccataatcatgacagggtgcgaagagccacgtgtgctcatcttgagtcctccggcccctgaatgcggctaaccctaaccctgcagccattgcctacaaaccagtgggtatgtggtcgtaacgagaaattgcgggatgggaccgactactttgggtgtccgtgtttcactttttaccttatatttgcttatggtgacaatatatacgagtttatatattgacacc

SEQ ID NO: 708 - DNA, 617 bp, unidentified
  source 1..617: mol_type = unassigned DNA; note = unclassified Enterovirus sequence
ttaaaactgagtgtgggttgcacccacccacactgtctacggacgttgtacacttgtatcccggtacatttgtacgccagtttgcctccccttccctttatgtaacgtaagaagcctcagcacaatggccaacaggtggtaacaatccatgttacctacggtcaagcacttctgtctccccggtacgaagagtgttaagtcttacccaagaccgaagctttgagtatcgttatccgcataactactggacaaagcccagtaacaccccacgatgtaggatggttggtcgttccaccagtgtaaccccctggtagacctggcagatgaggctagagtttccccactggtgacagtgttctagcctgcgtggctgcctgctcccttatgggagaagccattctattgacaaggtgtgaagagccccgtgcgctagttatgagtcctccggcccctgaatgcggctaatccaaccctgcagccattgcatggaaaccaccatgtagatggtcgtaatgagcaattgcgggacggaaccgactactttgggtgtccgtgtttcttgtttttcttatcaattgcttatggtgacaatatatacagctaatatattgttcacc

SEQ ID NO: 709 - DNA, 617 bp, Rhinovirus A
  source 1..617: mol_type = genomic DNA
ttaaaactggatctgggttgttcccacccagatcacctacatggtgttgtacactattattacggtaattttgtacgccagttttatatccccttccccaaatgtaacttagaagcaatgcaaactgatcaatagggggcaatcatccagattgctaatgatcaagcacttctgtttccccggtcaaggttgatatgctccacaagggcaaaaacaaccgagatcgttatccacaagatgcctacgcaaagcctagtaatgcttttgaagatacttggttggtcgctcagctgtgcacccgacagtagacctggcagatgaggctagaagtacccctctggcgacagagttctagcctgcgtggctgcctgcacacccttttgggtgtgaagccaagtattggacaaggtgtgaagagccccgtgtgctcatcttgaatcctccggcccctgaatgtggctaaccttaaacctgcagccagtgcacacaaaccagtgtgtagctggtcgtaatgagcaattgcgggatgggaccaactactttgggtgtccgtgtttcactttttacctttatattgcttatggtgacaatatatatagcacatatatattgttatc

SEQ ID NO: 710 - DNA, 617 bp, unidentified
  source 1..617: mol_type = unassigned DNA; note = unclassified Enterovirus sequence
ttaaaactgaatcatggttgttcccaccatgattgtctactggacgttgtactcttgtattccggtacacttgtacgccagttttataaccccttcccctttgcaacttagaagaaagtaaacactggccaataggaaatagcaaaccacgctatttacggtcaagcacttctgtttccccggtctgacgggatatgcttcacccgaggcagaaactcagatgatcgttatccgcaaagtgcctacgggaagcctagtagcactttggaagttgttgggctggtcgctcaattgctgaccccgagcaatagacttggcagatgaggctggacgtgccccaccagtgatggtggtccagcctgcgtggctgcctactcaccctaacagggtgagaagcctatcaatagacaaggtgtgaagagcctactgtgctcactttgattcctccggcccctgaatgtggctaatcctaaccccgtatctatcgcatgcacaccagcatgtaggtagtcgtaatgggcaactacgggacggaaccaactactttgggtgtccgtgtttccttgttcttttattacttgcgtatggtgacaattgtatgaaatacgattgacacc

SEQ ID NO: 711 - DNA, 618 bp, Rhinovirus A
  source 1..618: mol_type = genomic DNA
ttaaaactgggagtgggttgttcccactcactccacccatgcggtgttgtactctgttattacggtaactttgtacgccagtttttcccacccttccccataatgtaacttagaagtttgtacaatatgaccaataggtgacaatcatccagactgtcaaaggtcaagcacttctgtttccccggtcaatgaggatatgctttacccaaggcaaaaaccttagagatcgttatccccacactgcctacacagagcccagtaccatttttgatataattgggttggtcgctccctgcaaacccagcagtagacctggcagatgaggctggacattccccactggcgacagtggtccagcctgcgtggctgcctgctcacccttcttgggtgagaagcctaattattgacaaggtgtgaagagccgcgtgtgctcagtgtgcttcctccggcccctgaatgtggctaaccttaaccctgcagccgttgcccataatccaatgggtttgcggtcgtaatgcgtaagtgcgggatgggaccaactactttgggtgtccgtgtttcctgtttttcttttgattgcattttatggtgacaatttatagtgtatagattgtcatc

SEQ ID NO: 712 - DNA, 618 bp, Rhinovirus A
  source 1..618: mol_type = genomic DNA
ttaaaactgggagtgggtgttcccactcactccacccacgtggtgctgtacactgttattccggtaactttgtacgccagtttttccctcccttccctcattatgtaacttagaagcatgaacatatggaccaataggcaataatcatccagattattgaaggtcaagcacttctgtttccccggtcaataaagatatgctttacccaaggcaaaaacttttgagatcgttacccgcacatcaactacgcaaagcctagtatcacctttgatgtactaagactggtcgtttcctgcaaccccagcagtagacctggcagatgaggctggacgtaccccactggcgacagtggtccagcctgcgtggctgcctgctcgcccatatgggcgagaagccttattattgacaaggtgtgaagagccgcgtgtgcttggtgtgagtcctccggcccctgaatgtggctaaccttaaccctgcagccattgctcataatccaatgagttagtggtcgtaatgcgcaagtgcgggatgggaccaactactttgggtgtccgtgtttcttattttttctttcatgtgtgttatatggtgacaatttatagtatataagttgtcatc

SEQ ID NO: 713 - DNA, 618 bp, Rhinovirus A
  source 1..618: mol_type = genomic DNA
ttaaaactgggtccaggttgttcccacctggacctcctaagtggagtggtacactattattccggtaattttgtacgccagttttatctccccaccccccttttgtaatttagaagttatgaacacagaccaataggtggcaactagccaagttgttaaaggtcaagcacttctgtctccccggctgacgttgatatgctccaacagggcaaaaacaatgaaagtcgttatccgcaaagtgcctacgcaaagcctagtaacactttgaaatgtctatggttggtcgctcagctattccccatagtagacctggcagatgaggctagaaataccccactggtaacagtgttctagcctgcgtggctgcctgcgcaccctccccgggtgcgaagccatatatatgacaaggtgcgaagagccccgtgtgctcactttgaatcctccggctcctgaatgtggctaaccttaaccccgcagccagtgcacataagccaatgtgtggctggtcgtaatgagcaattgtgggatgggaccaactactttggatgtccgtgtttcctgtttttcttttattcttgcttatggtgacaatatatatagtttatatatattggcatc

SEQ ID NO: 714 - DNA, 618 bp, Rhinovirus C
  source 1..618: mol_type = genomic DNA
ttaaaactggatacaggttgttcccacctgtatcacccaagtggtgtggtgctcttgtatttcggtacgtttgcacgccagtttgctaccccttcccttttacgtaacttagaagtttacacaaagaccaataggcggtggtaaatccataccactaacggtcaaatacttctgtttccccggcatgcgaggaataggctccaaaagggctgaagccactagtgtcgttatccgcattggtactacgcaaagcctagtattaccttgaaaatttcttggctggtcgctccaccagataccccactggtagacctggcagatgaggcaggacttaccccactggcgacagtggtcctgcctgcgtggctgcctgcacaccccttacggggtgtgaagcccagaaacagacaaggtgtgaagagccccgtgtgctactagtgagtcctccggcccctgaatgcggctaatcttaccccacagctgttgcacgcaaaccagcgtgtatgcagtcgtaatgagcaattgtgggatggaaccgactactttgggtgtccgtgtttctttttattcctattatttgcttatggtgacaatattgatattatcagtgttgtcatc

SEQ ID NO: 715 - DNA, 619 bp, Shanbavirus A
  source 1..619: mol_type = genomic DNA
tttcaaaaggccctgggcatacggcgttattcgtaacgtcgtatgtccagggcggtagcatcaggccaaggcctgatgctaccacgtgtggactaaaccacacactcttcttgtgacacgttgtgtcacctatccctttcttggtaacttagaagcttgtacacttacgcacgtaggtgccccacatccagtggggtttgtgcaaagcaatcttgttccccggtaaaccctgataggctgtaaccacggccgaaacaaggtttgtcgttacccgactcactactacacaaagcctagtaaagttcaatgaaagtgcgcagcgtgatccggtcaaaacccccttgaccagaaacacatgatgagggtcaccaacccccactggcgacagtgtggtgtccctgcgttggcatgtggcctcgtagaggcgttgcaatctggatttgctccgaagagccccgtgtgctagtgtttatacctccggccccttgaatgcggctaatcctaacccccgagcatgtacacacaagccagtgtgtagcatgtcgtaatgagcaatttggggatggaaccgactactttagggtgtccgtgtttctcattattctttgtttgatgtttt

SEQ ID NO: 716 - DNA, 619 bp, Enterovirus B
  source 1..619: mol_type = genomic DNA
cacacggtcaatagataactcagcaaaccagctgggtcttgaccaagcacttctgttaccccggactgagtatcaataagctgctcgcgcggctgagggagaaaacgtccgttacccggccaattacttcgagaaacccagtatcaccatgaaggttgcgcagcgtttcgttccgcacaaccctagtgtagatcaggtcgatgagccaccgcgttccccacgggcgaccgtggcggtggctgcgctggcggcctgcccatggggtgacccatgggacgcttcaacactgacatggtgcgaagagtctattgagctaattggtaatcctccggcccctgaatgcggctaatcctaactgcggagcagatacccacacaccagtgggcagtctgtcgtaatgggcaactctgcagcggaaccgactactttgggtgtccgtgtttcctcttattcttgattggctgcttatggtgacaattgggagattgttaccatatagctattggattggccatccagtgacaaacagagcaattatctactcgttcattggttttgtgccactgaattataaggttttaatcaccctcaaattcatattagcactcaacacatcaaa

SEQ ID NO: 717 - DNA, 619 bp, Rhinovirus A
  source 1..619: mol_type = genomic DNA
ttaaaactggatctaggttgttcccacctagatctcctacacggagttgtactctgttattccggtaactttgtacgccagttttatacccccttccccctttgtaacttagaagctgaacatactgaccaataggcggcattcaaccagaatgtcaaaggtcaagcacttctgtttccccggttaaagctgatatgctccaacagggcaaaaacagccttaatcgttatccgcaagacaactacgcaaagcctagtatcatctttgaaagtatgtggttggtcgctccgctataaactcaatagcagacctggcagatgaggctagaaactccccactggcgacagtgttctagcctgcgcggctgcctgcgtgccctatacgggtacgaagccatatatttgacaaggtgtgaagagccccgtgtgcttgtcttgagtcctccggcccctgaatgtggctaaccttaaccctgcagctggtatgcacaatccagtacatggccagtcgtaatgagcaattgcgggatgggaccaactactttgggtgtccgtgtttcctattttacctttatatttgcttatggtgacaatatatatataacatatatattggcatc

SEQ ID NO: 718 - DNA, 619 bp, Rhinovirus A
  source 1..619: mol_type = genomic DNA
ttaaaactgggtctgggttgtccccacccagaccacccacgtggtgttgtacactgttattccggtaactttgtacgccagttttgaactccccttaccccttttgtaacttagaagttaaacaaaccgaccgatagcaggcaatcacccagattgcttatggtcaagcacttctgtctccccggtctcctttgatatgctccaccagggcaaaaacagagtagatcgttatccgcaagatgcctacgcaacgcctagtagcattttgaagtaattttggctggtcgctcatttacaaccccagtaatagacctggcagatgaggctagatactccccactggtgacagtgatctagcctgcgtggctgcctgcacaccctttccgggtgtgaagccaaacttatgacaaggtgtgaagagccacgtgtgctcatcttgagtcctccggcccctgaatgcggctaaccttaaccctgcagccattgcctacaagccagtgggtatgtggtcgtaatgagaaattgcgggatgggaccgactactttgggtgtccgtgtttcactttttaccttatatttgcttatggtgacaatatatatatagatatatattgacacc

SEQ ID NO: 719 - DNA, 619 bp, Rhinovirus C
  source 1..619: mol_type = genomic DNA
ttaaaactgagtatgggttgttcccacccatactgcctacgggcgtagtactcttgtgctccggtacatttgtacgccagtttttcacccccaccccctaggtaactcttagaagcacttgcacacagacgaataggcagccaacactccacgttggtcaacgtcaagcacttctgtttccccggtattaggggttaggcttttcaagaggctgaagcctgaagtatcgttacccgcgcaattactaagcagagcctagtatcacttcgacccttccactggctggtcgttcaatgagaaaacccactcatagacctggcagatggggctggaaataccccactggcgacagtgttccagcccgcgtggctgcctgtcccccattttgggggaaagccaatgtaaggacaaggtgtgaagagccgcgtttgctaattgtgagtcctccggcccctgaatgcggctaatcttaccccacagctattgcatggaagccaccatgtggatagtcgtaacgggcaactgtgggacggaaccgactactttgggtgtccgtgtttccttttattccatttattatctcatggtgacaacgtatacagattatatgttgtttacc

SEQ ID NO: 720 - DNA, 620 bp, Rhinovirus B
  source 1..620: mol_type = genomic DNA
ttaaaacagcggatgggtatcccaccatccgacccactgggtgtagtactctggtactttgtacctttgtacgcctgtttctccctcccttcccaacctaaacaatccttgtaacttagaaggtttcgattatcgcacaatagggactattgcaaccagcaatagtcagtgcaagcacttctgtttccccggagcggagtgtagatggccaccgctgtcaaaagctcttaaccgttatccgccagttaactacgcaacggctagtagtgccttgttgcttttatggcgttcgatcaggcgagatttaccccctcgctagtctggtcgatgaggctgagaattccccacgggcgaccgtgtctcagcctgcgtggcggccagcccagcctttgctgggacgccttgattgcgacatggtgtgaagacccgcgtgtgcttaactgtgagtcctccggcccctgaatgcggctaacctaaaccctggagccttgaaacacaacccagtgttcgcaaggtcgtaacgagcaattccgggacgggaccgactactttgggtgtccgtgtttcctttattctttcaattgttcttatggtcacaatataagtgttatattgtgatc

SEQ ID NO: 721 - DNA, 620 bp, Rhinovirus A
  source 1..620: mol_type = genomic DNA
ttaaaactgggagtgagttgtccccactcactctacccacgcggtgttgtacactgttattacggtaactttgtatgccagtttttgttcccctatccccctttaaagtaacttagaagcatgaacttacagaccaaaaggtgatgatcacccagatcattaaaggtcaagcacttctgtttccccggtcaatgttgatatgcttcaacaaggcaaaaacaacagcgatcgttatccgcaagatgcctacacaaagcttagtacctcctttgatggtatttgtctggtcgctcaggtgtttccccaacactagacctggcagatgaggctagaaactccccactggcgacagtgttctagcctgcgtggctgcctgcacaccctttcgggtgtgaagccaaatactggacaaggtgcgaagagccccgtgtgctcatcttgagtcctccggcccctgaatgcggctaaccttaaacccgcagccattactcacaatccagtgagcagatggtcgtaatgagcaattgtgggatgggaccgactactttgggtgtccgtgtttcatgttttactttatgacttgcttatggtgacaatatatagagatatatattggcatc

SEQ ID NO: 722 - DNA, 620 bp, unidentified
  source 1..620: mol_type = unassigned DNA; note = unclassified Enterovirus sequence
ttaaaactgagtgtgggttgttccccacccacactgtctacgggacgttgtactcttgtattccggtacacttgtacgcccagtttgccaccctaaacaccccgtaacaatagaagtctacgcacacttagaccaatagggggtgttcatccagttcacccaaggtcaagcacttctgtttccccggcataggggtgttaggcttcgcccgaggccaaagctctgattgtcgttatccgcacaactactggacaaagcctagtagcaccctacgatgtagcatggttggttgttccgccagtatcccctggtaaacctggcagatggggctagaagttcctcactggcgacagtgttctagcccgcgtggctgcctgctcccttatgggagaagccattctactgacaaggtgtgaagagccccgtacgctagttgtgattcctccggcccctgaatgcggctaatccaaccctgcagccattacatggaagccaccatgtggatggtcgtaatgagtaattgcgggacggaaccgactactttgggtgtccgtgtttcttgtttttcttttactgacgtttatggtgacaatatatatataacgtatatattgttcatc

SEQ ID NO: 723 - DNA, 621 bp, unidentified
  source 1..621: mol_type = unassigned DNA; note = unclassified Picornaviridae sequence
gggggctcttcaagcccccccaaccgaattttcttcaacaactactatgtaagttgcattatactctccagatcaattcgaatttgtataatgtactttagtttttgttgtcgactacagtgattataagtaagtagcaatatgtgtccagatcaattcgaatcacaatattgttcattataattgtatgtaggtctcagttgagagaaaaattttgttttgaaaacccagttttttcacaccggaggaatgaatctcaaatcttgggttttcgaggttgtcgtgcggacacttctcgagtagttgaatgatgctgatttgactgctttggaatgttgtcttttgcgatgatgtcggattcacacgggcttcacatgccgagagatggcttcgaacacgctcgtgataatgtcagtggttgcttcgagatttacaaatgtatgcgtacccggaaacagaacttggaaattgatgtcacggtgattgagttctgcacgatggcgatagtacctctttgtactgatcgttgaactggtcaaggcccctgcaggaagtacctgtttcgggctagttgactggcattgagcaccagagtcgaagtttgcccttcaaattgcaaca

SEQ ID NO: 724 - DNA, 621 bp, Rhinovirus A
  source 1..621: mol_type = genomic DNA
ttaaaactgagtgtgggttgtccccacccacactgtctacggacgtagtactctcatatcacggtatgtttgtacgccagtttgcctcccctcccaagtgtaacttagaagtttgtactttataaaggccaataggcgggtagtcaaccacactactcatggtcaagcacttctgtttccccggtatgcgaagaataagctttaacaaaggctgaagcttcaattatcgttatccgcatgataactacgcaaagcttagtagcattttgaaagtttattggttggtcgctccactggaaaacccccccagtagacctggcagatgaggctaagtaatccccactggcgacagtgacttagcctgcgtggctgcctgcacacctggagacaggtgtgaagccaagtaatggacaaggtgtgaagagccccgtgtgcttatcatgagtcctccggcccctgaatgcggctaatccaaccccacagctattgcacataatccaatgtgtatttagtcgtaacgggcaactgtgggacggaaccgactactttgggtgtccgtgtttcctttattctcatttaagtttcctatggtgacaaatataagtgattatatctgtcatc

SEQ ID NO: 725 - DNA, 621 bp, unidentified
  source 1..621: mol_type = unassigned DNA; note = unclassified Enterovirus sequence
tctgcagatatcttaaaactgggttcaggttgttcccacctgaacttcccacgtggagtagtacactattattacggtaattttgtacgccagttttgcttccctccccaatggtaacttagaagatgtacacaacgaccaacaggcggtggttacccaaaccatcaaaggtcaagcacttctgtttccccggtcaacgttgatatgctccaacagggcaaaaacaaccacgatcgttacccgcaagatgcctacgcaaagcctagtaatacactggaagatttatggctggtcgctccactataccccatagtagacctggcagatgaggctagaagtaccccactggcgacagtgttctagcctgcgtggctgcctgcgcaccctatgggtgcgaagccatatattggacagggtgtgaagagccccgtgtgctcatcttgagtcctccggcccctgaatgtggctaaccttaaccccgcagccagagcacgcaatccagtgtgtttctggtcgtaatgagtaattgtgggatgggaccaactactttgggtgtccgtgtttcacttttttcctttattatgcttatggtgacaatatatacacatatatattgacacc

SEQ ID NO: 726 - DNA, 621 bp, Rhinovirus A
  source 1..621: mol_type = genomic DNA
ttaaaactgggagtgagttgtccccactcactctacccacgcggtgttgtacactgttattacggtaactttgtatgccagtttttgttcccctatccccctttaaagtaacttagaagcatgaacttacagaccaaaaggtgatgatcacccagatcattaaaggtcaagcacttctgtttccccggtcaatgaggatatgctttacccaaggcaaaaaccttaaagatcgttatccgcacattaactacgcaaagcctagtatcgcctttgatgtattaagactggtcgttccctgcatacccagcagtagacctggcagatgaagctggacgttccccactggcgacagtggtccagcctgcgtggctgcctgctcacccatttgggtgagaagccttattattgacaaggtgtgaagagccccgtgtgcttaatgtgaatcctccggcccctgaatgtggctaaccttaaccccgcagccgttactcacaatccagtgaaatgacggtcgtaacgcgaaagtgtgggatgggaccaactactttgggtgtccgtgtttcctattttttccttaatgtgtgttatatggtgacaatttatagcgtataagttgtcatc

SEQ ID NO: 727 - DNA, 621 bp, Rhinovirus A
  source 1..621: mol_type = genomic DNA
ttaaaactggatctaggttgttcccacctaaatctcctacatggagttgtactctattattccggtaattttgtacgccagttttatcctcccctccccttaaagtaacttagaagttggacatatcgaccaataggtaacatttatccaaaatgttaaaggtcaagcacttctgtttccccggtcaaggttgatgtgctctaacagggcaaaaacagctgcgatcgttatccgcaaagcaactacgcaaagcctagtagcattttttgagagtatgtggttggtcgctccactataaacccaatagtagacctggcagatgaggctagaaattccccactggtaacagtgttctagcctgcgtggctgcctgcgtgctccttgtgagcacgaagccatatatttgacaaggtgtgaagagccccgtgtgcttgctttgagtcctccggcccctgaatgtggctaaccttaaccctgcagctagcgtgtacaatccagtacaaagctagtcgtaatgagcaattgcgggatgggaccaactactttgggtgtccgtgtttcctgtttttcttttatatttgcttatggtgacaatatatatataacatatatattggcatc

SEQ ID NO: 728 - DNA, 622 bp, Rhinovirus B
  source 1..622: mol_type = genomic DNA
ttaaaacagcggatgggttccctaccatccgacccactgggtgtagtactctggtactctgtacctttgtacgcctgtttatccactacccttttcctaaattttccacccgtgtaaccttagaagcaaacaaattgtacaatagggtgcatcacaaccagtgatgtacagtacaagcacttctgtttccccggagcggggtatagacggtcaccactgtcaaaagcccttaaccgttacccgccaaccaactacgtaacggctagtaacaccatgaatttgtcttgacgttcgatcaggtggtaaccccccactagtttggtcgatgaggctgagaactccccacgggtaaccgtgtctcagcctgcgtggcggccaacccagcttctgctgggacgccaattcattgacatggtgtgaagacctgcatgtgcttggttgtgattcctccggcccctgaatgcggctaaccctaaccccggagccacgcggcataatccaatgtcgtatgggtcgtaatgagtaattctgggatgggaccgactactttgggtgtccgtgtttcctgtttttccaaattattcttatggtcacagcatataaatagatatatactgtgatc

SEQ ID NO: 729 - DNA, 622 bp, Rhinovirus B
  source 1..622: mol_type = genomic DNA
ttaaaacagcggatgggtatcccaccatccgacccactgggtgtagtactctggtactctgtacctttgtacgcctgtttctcctcaaccctcccctacccgttatatatctcagtaacttagaagatatcattaccgcacaatagggaccgttgtaaccagcaacggtcagtgcaagcacttctgtttccccggagcggagtatagacggccactgctgtcaaaagctcttaaccgttacccgccagttaactacacaacagctagtaacatcttgttgttcttagggcgttcgatcaggtgagtttaccccctcactagtctggtcgatgaggctgagaaatccccacgggtgaccgtgtctcagcctgcgtggcggccagcccagcttatgctgggacgccttaagtatgacatggtgtgaagactcgcgtgtgcttagctgtgagtcctccggcccctgaatgcggctaacctaaaccccggagccttgaggcacaatccagtgcccgcgaggtcgtaacgagaaattctgggacgggaccgactactttgggtgtccgtgtttccttttatctttttgatgttcttatggttacaatatataaagtatattgtaatc

SEQ ID NO: 730 - DNA, 622 bp, Rhinovirus A
  source 1..622: mol_type = genomic DNA
ttaaaactgggtccaggttgttcccacctggatctcctacgtggagttgtactctattattccggtaattttgtacgccagttttatctcccctacccctctatgtaacttagaagtttatgcacagcggccaataggtgacatttatccaaaatgtcaaaggtcaagcacttctgttaccccggttagaattgatatgctccaacagggcaaaaacaattttgatcgttatccgcaaggcaactacgcaaagcctagtaccatttttgatgatgtgtggttggtcgctccactgtgaacccgacagtagacctggcagatgaggctagaaattccccactggtaacagtgttctagcctgcgtggctgcctgcgtacccttttgcgggtacgaagccatacatttgacaaggtgtgaagagccccgtgtgcttgccttgagtcctccggcccctgaatgtggctaaccttaaccctgcagctagtgtgcacaatccagtgcatggctagtcgtaacgagcaattgcgggatgggaccaactactttgggtgtccgtgtttcttgtttttcttttatatttgcttatggtgacaatatatacataatatatatattggcacc

SEQ ID NO: 731 - DNA, 622 bp, Rhinovirus A
  source 1..622: mol_type = genomic DNA
ttcaaactgaatcatggttgttcccaccatgattacctacgggtgtagtacacttgtatcccggtacatttgtgcgccagttttatatcccctaccccaattgtaacttagaagttaagcaacacaagatcaataggcggtggttatccaaaccatcaatgatcaagtacttctgtctccccggtaggtgtgaatatgctttaaccaaggcagaagctaatcctatcgttatccgcaaggtgcctacgggaagcctattaacactttgaaagaaatttggctggtcgctcagttgcgcaatcccacgcaatagacctggcagatggggctagacaaaccccaccagcgatggtggtctagcccgcgtggctgcctgcacacccttttttgggtgtgaagccagaaattggacagggtgcgaagagcctactgtgctcaccttgagtcctccggcccctgaatgtggctaatcctaaccctgcagctgttgcacaagatccattgtgtatacagtcgtaatgagcaattgcgggatggaaccaactactttgggtgtccgtgtttccttgttttcttttatcattgcttatggtgacaagtatatatagatatatttgtcatc

SEQ ID NO: 732 - DNA, 623 bp, Avihepatovirus A
  source 1..623: mol_type = genomic DNA
tttgaaagcgggtgcatgcatggccattttccagcacaggttcagctggtatggcatgcatgcatcgactgcttgggggtgtccctgacccccttaattcaacgtctagcccacgatacgggcaccctatccaatttgtatccctttacctcccatggactgacttgtatggacttggatctaaattggattatcctttacttgtggtggttagccaaccatgctctggtgtaatgattccatgtgttcatttggctaagtgccgaccttggaggtgggggtgaaattttgcaagccactagcgtcgtcaactttagcctctggagatgttggattagttgcattctggacagaccaagcctcgtctataccgtgggctaatggtcttcgttgtgaagcggattaccggtagtagcatcttagacttccaaggttgtcatgagtgtgtctgtagagtaggcacacatctgtccaggcacaagcacatctctcgatcgctccagactagttcctgagggacagatgttgtggggggcttgggaaaacccccttaacctacactaccggatagggtcgcggctggtcgagtcccacacactataatatcactagactttcatgca

SEQ ID NO: 733 - DNA, 623 bp, Rhinovirus B
  source 1..623: mol_type = genomic DNA
aaaacagcggatgggtatcccaccatccgacccactgggtgtagtactctggtactttgtacctttgtacgcctgttcttcccattgtaccctcccttaacttccaacccaagcaacattagaagttatcaattttcagtacaataggaagcatcacatccagtgatgttgtgtacaagcacttctgtctccccggagcgaggtataagcagtacccactgctaaaagcctttaaccgttacccgccaatcaactacgtaacagctagtatcatcatgtttttgactggacgttcgatcaggtggttcccccccactagtttggtcgatgaggctaggaataccccacgggtaaccgtgtcctagcctgcgtggcggccaacccagcatttgctgggacgcccttttaaagacatggtgtgaagactcgcatgtgcttgattgtgattcctccggcccctgaatgcggctaaccttaaccccggagccttgtgttgcaatccagcaaaagcaaggtcgtaatgagcaattctgggacgggaccgactactttgggtgtccgtgtttctcattttacattacttttcttatggtcacagcatatataataaatatactgtgatc

SEQ ID NO: 734 - DNA, 623 bp, Rhinovirus A
  source 1..623: mol_type = genomic DNA
ttaaaactgggtgtgggttgcacccacccacactgtctacggacgtagtgctctcatattacggtatgcttgcacgccagtttgtttcccctttccccttttgtaactatagaagattgcacttaatctcgaccaataggcagtagtgatccacactacttacggtcaagcacttctgttaccccggtatgcggagaataggctctgaaaagggctgaagcttcaattatcgtcatccgcgcaattactacgcaaagcttagtaacttcccaagaaattctttggttggccgttccgctggtaccccaccagtaggcttggcagatgaggctgagtaatccccactggcgacagtgactcagcctgcgtggctgcctacacacctggtaacaggtgtgaagccatagaaaggacagggtgtgaagagccccgtgtgctaattgtgattcctccggcccctgaatgcggctaatctaaccccacatccaatgcgcataagccaatgcgtatttggtcgtaatgggcaactgtgggacggaaccgactactttgggtgtccgtgtttctttttattccttataattagttcatggtgacaagtataagtgtttatatttgtcatc

SEQ ID NO: 735 - DNA, 624 bp, unidentified
  source 1..624: mol_type = unassigned DNA; note = unclassified Picornaviridae sequence
ttttcatgttgtataattcgagttctccaattatatttaatagaagattttcatttatgatcatgcaataatataatgaattcatgtagaaaatgttatattattccttcgtcctttgtgaaccggagagttagtattggaaatgagggatttattttaaaacaaatgtcttatttcctctctttaacgttatatttattgacagtttgtgatttatatatcatggttattgagagaaaattagcttttatataaattagtgtttttatttaaaagttttaattcttggcagtgtattaatgaatttaatttggcagtataagtttattcaaaacataccttccatatgtagtagggaacttgctgtatttaatacaatactgattattaagtgtttttcttgtcgtataataattgaagtagaatcttttgttattccgactatagacttgattaataactgataatctttattttattttgtatagtattattaggttctagggaagtttccccctatgagaacctcctaaccttttggcaattaggcgaactaagaaaattgcctggacaatgggaagacccatataatattcccttttcctttataaatttaaatcaagt

SEQ ID NO: 736 - DNA, 624 bp, unidentified
  source 1..624: mol_type = unassigned DNA; note = unclassified Salivirus sequence
ttcccctgcaaccattacgcttactcgcatgtgcattgagtggtgcatgtgttgaacaaacagctacactcacatgggggcgggttttcccgccctacggcttctcgcgaggcccacccctcccctttctcccataactacagtgctttggtaggtaagcatcctgatcccccgcggaagctgctcacgtggcaactgtggggacccagacaggttatcaaaggcacccggtctttccgccttcaggagtatccctgctagcgaattctagtagggctctgcttggtgccaacctcccccaaatgcgcgctgcgggagtgctcttccccaactcaccctagtatcctctcatgtgtgtgcttggtcagcatatctgagacgatgttccgctgtcccagaccagtccagtaatggacgggccagtgtgcgtagtcgtcttccggcttgtccggcgcatgtttggtgaaccggtggggtaaggttggtgtgcccaacgcccgtactcaggggatacctcaaggcacccaggaatgccagggaggtaccccgcttcacagcgggatctgaccctggggtaaatgtctgcggggggtcttcttggcccacttctcagtacttttcagg

SEQ ID NO: 737 - DNA, 624 bp, Parechovirus A
  source 1..624: mol_type = genomic DNA
tattagagttatggcacgccatctgccaccccacacaaatgtgggttagaaaagaaaactgtccctatgcctggtctccactattcgaaggcaacttgcaattagaagagtggaattaagacgcttaaagcatagagacagttttcttttctaacccacatttgtgtggggtggcagatggcgtgccataactctaatagtgagataccatgcttgtggaccttatgctcacacagccatcctctagtaagtttgtgagacgtctggtgacgtgtgggaacttattggaaacaacgttttgctgcaaagcatcctactgccagcggaaaaacacctggtaacaggtgcctctggggccaaaagccaaggtttaacagaccctttaggattggttctaaacctgagatgttgtggaagatatttagtacctgctgatctggtagttatgcaaacactagttgtaaggcccacgaaggatgcccagaaggtacctgtaggtaacaagtgacactatggatctgatttggggccagatacctctatcttggtgatctggttaaaaaacgtctagtgggccaaacccgggggggacccccggtttcctcttatcctattaatgccact

SEQ ID NO: 738 - DNA, 624 bp, Rhinovirus B
  source 1..624: mol_type = genomic DNA
ttaaaacagcggacgggtatcccaccatccggctcactgagcgtagtactctggtattgtgtacctttgtacgcctgttttccccaaatcccctaccctttatatctcctaccccgtaacgtaagaagttttcaaacagtacaataggaagcaccacatccagtggtgttatgtacaagcacttctgtttccccggagcgaggtataggtggtcaccaccgccaaaagcctttaaccgttacccgccaaccaactacgtaatggctagtaacatcattgatttagattggcgttcgatcaggtggtatccccccactagtttggtcgatgaggctaggaataccccacgggtgaccgtgtcctagcctgcgtggcggccaacccagcatacgctgggacgccagtttactgacatggtgcgaagacttgcatgtgcttggttgagagtcctccggcccctgaatgcggctaaccttaaccccggagcctcgcagcataatccaatgttgtagaggtcgtaacgagtaattctgggatgggaccgactactttgggtgtccgtgtttcctgtttttctttaaaatgtcttatggtcacagcatatatactgtatatactgtgatc

SEQ ID NO: 739 - DNA, 624 bp, Rhinovirus B
  source 1..624: mol_type = genomic DNA
acagcggatggataccccaccatccgacccactgggtgtagtacactggtactctgtacctttgtacgcctgtttctccccttgcaccctccctcattatcctaacccttgtaacattagaagatgagcaacccgtgcaataggagataccacaaccagtggtgttaagcacaagtacttctgtttccccggagcggagtatagacggtccccactgtcaaaagctcttaaccgttatccgccaaccaactacgtgacgactagtagcatcattttgacactttgacgttcgatcaggtaggttcaccccacctactagtttggtcgatgaggctgggagtccctcacaggtaactgtgtcccagcctgcgtggcggccaacccagcaattgctgggacgccaatttgttgacatggtgtgaagatcctaatgtgcttggttgtgagtcctccggcccctgaatgcggctaaccttaaccccggagccttgtggcacaagccagtgacattaaggtcgtaaggagcaattctgggatgggaccgactactttgggtgtccgtgtttcctatttttctttaaattgtcttatggtcacagcatatattaattatatactgtgatc

SEQ ID NO: 740 - DNA, 625 bp, unidentified
  source 1..625: mol_type = unassigned DNA; note = unclassified Sapelovirus sequence
ccccatttctccccttcggcttcgtgccgtcgcacccctttacccttttccttaccctcttaagaatgattgtagattgttttagaaaggaaggttagtacacctgaaagtacaacaatttgcttctctggtttggataaaaggttaaagacattagaaggttaacacaggtccttgcaaaacctgagtacaattttgttttgacgacgagactggattatgatttcacggttggtcgccgaggttaaaagactattgtgctagctagagtaagtggttggcaattgaaagctaccaaaggggtgtaggtctacgctttgcgggctgaagctaccaatggattaatagtgagtatgttgtttttcccttctagtgatgcgcgaccgcacacaaaagagctaggggcacataggggcaaaaggaaaagtattacttatcctgaatgtgcaattgagtcggtgacgagtgcgtcagatgtgaatccagcatactggcgtatggcgcatcctcttggcattaccctaatgtgtatcttggtagggggggccctatcaacttagcctagtgctgcctgacagggttgcggctggtcatttgtgtgtggtataaccagtagtaatccctc

SEQ ID NO: 741 - DNA, 625 bp, Rhinovirus B
  source 1..625: mol_type = genomic DNA
ttaaaacagcggatgggtttcccaccatccgacccactgggtgtagtgctctggtattttgtacctttgcacgcctgtttcccatttgtacccttccttaatctccttcccccgtaacgttagaagttttggaattttaaagtacaataggaagcgccacatccagtggtgttgcgtacaaatacttctgtttacccggagcgaggtataggttgtacccacggccaaaagcctttaaccgttatccgccaatcaactacgtaacggctagtatcatcttgcttttgatttggtgttcgatcaggtggtatcccccactagtctggtcgatgaggctaggaattccccacgggcgaccgtgtcctagcctgcgtggcggccagcccagcttttgctgggacgccttttcaaagacatggtgtgaagacctgcatgtgcttggttgtgagtcctccggcccctgaatgcggctaaccttaaccctggagcccagcagcataatccaatgttgtttgggtcgtaatgagcaattccgggacgggaccgactactttgggtgtccgtgtttccttttattcttacattgtcttatggtcacagcatatatattatatatactgtgatc

SEQ ID NO: 742 - DNA, 625 bp, Rhinovirus B
  source 1..625: mol_type = genomic DNA
ttaaaacagcgggtgggtatcccaccacccgacccactgggtgtagtacactggtattttgtacctttgtatgcctgtttgccatccctccctctcctcttacccttacccttattttgcggtaactttagaagtttgtaaatcacgcgcaatagggtataccacatccagtggtatgaagcacaagcaattcttgttccccggagctggatataaactgctaacgtggttgaaagtccttaaccgttatccgccagttaactgcgagaagactagtaactccatgtttgtttttaagcgttcgatcaggtggataccccattcactagtttggtcgatgaggctgggaatcccccacaggtaactgtgtctcagcctgcgtggcggccaacccagcttttgctgggacgcttactgacagacatggtgtgaagatcctattgcgcttaactgtgagtcctccggcccctgaatgcggctaacctcaaccccggagccttgtggtgtaaaccaacactcgcaaggtcgtaacgagtaattctgggacgggaccgactactttgggtgtccgtgtttcctttatttcttattgattgtctcctatggttacaaatttactgtaatc

SEQ ID NO: 743 - DNA, 625 bp, Rhinovirus B
  source 1..625: mol_type = genomic DNA
ttaaaacagcggatgggtttcccaccatccgacccactgggtgtagtgctctggtattttgtacctttgcacgcctgtttcccctttgtacccatcctgaatttcctccctctgcaacgttagaagtttgtgaaattaaaagtacaataggaagcatcacatccagtggtgttcagtacaagcactcctgtttccccggagcgaggtataggttgtacccacgaccgaaagcctttaaccgttatccgccaatcaactacataacggctagtatcatcatgtttttgatctggcgttcgatcaggtggtttcccccactagtctggtcgatgaggctaggatttccccacgggcgaccgtgtcctagcctgcgtggcggccagcccagcttatgctgggacgcctttttaaagacatggtgtgaagacctgcatgtgcttgattgtgagtcctccggcccctgaatgcggctaaccttaaccctggagcccgacagcataatccaatgttgtttgggtcgtaatgagcaattccgggatgggaccgactactttgggtgtccgtgtttctttttattcttatattgtcttatggtcacagcatatatagtatatatactgtgatc

SEQ ID NO: 744 - DNA, 625 bp, Rhinovirus A
  source 1..625: mol_type = genomic DNA
ttaaaactgagtgtgggttgttcccacccacactgtctacggacgtagtgctctcatattccggtatgtttgcacgccagtttgcctctccttttcccacgtaacgttagaagcttatgcactaaatcgaccactaggtgagtgataaaccatatcattctttggtcaagcacttctgtttccccggtatgcagggaataggccctccccagggctgaagccttaattatcgttatccgcacatttactacgcaaagcctattagcgttctggaagttcactggctggtcgttccgctagactaacccgtctagtagacctggcagatgaggctggataaaccccactggcgacagtgatccagcctgcgtggctgcctgcacacctggaaacaggtgtgaagcccatgaatggacagggtgtgaagagccccgtgtgctaagtgtgagtcctccggcccctgaatgcggctaatctaaccccacagctaatacacacaaaccagtgtggatttagtcgtaatgggtaactgtgggacggaaccgactactttgggtgtccgtgtttccttttattccttttatattgcttatggtgacaggtatatagatatatatttgttacc

SEQ ID NO: 745 - DNA, 625 bp, Rhinovirus A
  source 1..625: mol_type = genomic DNA
ttaaaactggatctgggttgttcccacccagatcacctacatggtgttgtacactattattacggtaatcttgtacgccagttttatactccctttcccaaatgtaacttagaagcaaagcaaactgatcaataggggacaatcatccagattgtcaaagatcaagcacttctgtttccccggtcaaagttgatatgctccacaagggcaaaaacaactgagatcgttatccgcaagatgcctacgcaaagcctagtaatacattgaaagatacttggttggtcgctcagctgttaacccaacagtagacctggtagatgaggctagagattcccctccggcgacggagttctagcctgcgtggctgcctgcacacccactgggtgtgaagccaagtattggacaaggtgtgaagagccgcgtgtgctcatcttgagtcctccggcccctgaatgtggctaaccttaaacctgcagccagtgcacacaatccagtgtgtagctggtcgtaatgagcaattgcgggatgggaccaactactttgggtgtccgtgtccgtgtttcactttttttccttttattattgcttatggtgacaatatatatagcatatatatattgttatc

SEQ ID NO: 746 - DNA, 625 bp, unidentified
  source 1..625: mol_type = unassigned DNA; note = unclassified Enterovirus sequence
ttaaaactgggtaggggttgttcccacccctaccacccacgtggtgtagtgctcctgtattacggtacacttgcacgccagtttgcctccctacccccttcccattcacacccaaccctgcgtaacttagaagctatgcacaagaccaataggtggtaacaatccatgttactaaaggtcaagtacttctgtttccccggcatgcgtggaataaacagtgcaaacggttgaggccacaaatgtcgttacccgcgcatgaactacgcagagcctagtatccccctgaaagtccattggttggtcgctcagctaatccccatagtagacctggcagatgaggcaagacgcaccccactggcgacagtggtcttgcctgcgtggctgcctgcacacccttcggggtgtgaagccaattgatagacagggtgtgaagagccgagtgtgcttcatgtgagtcctccggcccctgaatgcggctaatccaaccccgcagctgtggcacacaatccagtgtgtatgcagtcgtaacgggcaactgcgggacggaaccgactactttgggtgtccgtgtttccttttattctttaatcaagtacttatggtgacaataataaatattgttacc

SEQ ID NO: 747 - DNA, 626 bp, Rhinovirus B
  source 1..626: mol_type = genomic DNA
ttaaaacagcggatgggtatcccaccatccgacccactgggtgtagtactctggtattttgtacctttgtacgcctgtttcttccctttgtacccgccccttaaacttccaccccacgtaacgttagaagtttatacaagcagtacaataggttgcaccataaccagtggtgtttcgtacaagcacttctgtttccccggagcggggtatagacggtacccactgtcaaaagcccttaaccgttatccgccaatcaactacgtaatggctagtaacaccatgaaggtaagttgacgttcgatcaggtggtaacccccactagtttggtcgatgaggctaggaattccccacgggtaaccgtgtcctagcctgcgtggcggccaacccagcatttgctgggacgccaatttactgacatggtgtgaagacttgcatgtgcttgattgtgactcctccggcccctgaatgcggctaaccttaaccccggagccttgcagcataatccaatgttgtggaggtcgtaatgagcaattctgggatgggaccgactactttgggtgtccgtgtttcctgttttctttaagttgtcttatggtcacagcatatatactatatatactgtgatc

SEQ ID NO: 748 - DNA, 626 bp, Rhinovirus B
  source 1..626: mol_type = genomic DNA
ttaaaacagcggatgggtaccccaccatccgacccactgggtgtagtactctggtacttcgtacctttgtacgcctgttcttcccattgtacccttcctgaacttccaacccaagtaacgttagaagctcaacatttagtacaacaggaagcaccacatccagtggtgtttagtacaagcacttctgtttccccggagcgaggtataggctgtacccactgccaaaaacctttaaccgttatccgccaaccaactacgtaaaagctagtagtattatgtttttaactaggcgttcgatcaggtggatttcccctccactagtttggtcgatgaggctaggaattccccacgggtgaccgtgtcctagcctgcgtggcggccaacccagcttatgctgggacgcctttttatagacatggtgtgaagactcgcatgtgcttggttgtgattcctccggcccctgaatgcggctaaccttaaccctggagccttgtgtcacaaaccagtgatgataaggtcgtaatgagcaattccgggacgggaccgactactttgggtgtccgtgtttcttatttttcttattattgtcttatggtcacagcatatatataacatatactgtgatc

SEQ ID NO: 749 - DNA, 626 bp, unidentified
  source 1..626: mol_type = unassigned DNA; note = unclassified Enterovirus sequence
aacagccgtctggttgatcccaccagcgggcacaatgtgcgttgtacactgcgatctcggtcgctttgtatgcctgtttttaccacccaccccaactttactatcttctttacttcacaagtaacatagaagcatgtacatgacgcccaataggacaacgtctcacccagagatgttaagggcaagcacttctgtttccccggatgtgtgaataggcttcacccgaggctgaaactgtagcattcgttatccgcatgactactacgcgactgctagtagcgttctgtgtgacatgtggggtttcgttcagcagagacccagtctgtagatcagggtaatgaggctacacaatccccactggtgacagtggtgtagcctgcgtggtgccctgcccgaggttcgtcctcgggaccctccatgttagacagggtgtgaagacactagtgtgctagtcatgagtcctccggcccctgaatgcggctaatcttaaacctgcagccaccacatgcacgccagcatgcaggtggtcgtaatgagcaattgcgggatggaaccgactactttgggtgtccgtgtttctctttttacatttatgtgtctcttatggttacatcattggtgtaatc

SEQ ID NO: 750 - DNA, 627 bp, unidentified
  source 1..627: mol_type = unassigned DNA; note = unclassified Picornaviridae sequence
ttcaaggttcagccggccgggggttttgaggggttttggctggtccctatggaggcatagttatcgggactgtattcccgatggtttgagttagggccgacctgctcctgtattgcccacagctttgggctatcttgaggtgtttgtttgtgggaccctctcttgggtctcatttgtttttcttctgttttatgtctatcttttcccggttgtctccatacctatgctgctaccgctgcgcccggcggggttaaccctggggctagcccatggctgtggccgccaaaagtggagatgtcatgactattccatggcttgggctttgggtgtgtccagcaggtgacaggaacttagctgatcttggcaggggggtaggctacgggtgaaacccccccgtcctctcactcatattgagtgatgtcgtgtacacgtgaaccttggtggataggggtgagatcgtttggtcaaaaacccctcaacgcctggtgcgggcatgtcgtcatgtcatgcggctttgttcgtgtttcctgtctgttggcacccagtgctgaactcatggtaattggcaccctatgagtttagggctaatcaggggcatttaggtttttagcaccactgcttaatttg

SEQ ID NO: 751 - DNA, 627 bp, Rhinovirus B
  source 1..627: mol_type = genomic DNA
ttaaaacagcggatgggtatcccaccatccggcccactgggtgtagtactctggtacattgtacctttgtacgcctgttttccccctcttgtacccgcccttcaagctccttgcccaagtaacgttagaagtttgaacattggtacaataggaagcatcacatccagtggtgtactgtacaaacacttctgttgccccggagcgaggtatagatggtccccaccgtcaaaagcctttaaccgttatccgccaatcaactacgtaatggctagtagcaccttggatttaagttggcgttcgatcaggtggtaacccccactagtttggtcgatgaggctaggaattccccacgggtgaccgtgtcctagcctgcgtggcggccaacccagcatccgctgggacgccaatttaatgacatggtgtgaagacctgcatgtgcttgattgtgagtcctccggcccctgaatgcggctaaccctaaccccggagccttgcagcacaatccagtgttgttaaggtcgtaatgagcaattctgggatgggaccgactactttgggtgtccgtgtttcttatttttcttgaatttttcttatggtcacagcatatatacattatatactgtgatc

SEQ ID NO: 752 - DNA, 627 bp, Rhinovirus B
  source 1..627: mol_type = genomic DNA
ttaaaacagcggatgggtatcccaccatccgacccacagggtgtagtgctctggtattttgtacctttgcacgcctgtttccccattgtacccctccttaaatttcctccccaagtaacgttagaagtttaaggaaacaaatgtacaataggaagcatcacatccagtggtgttatgtacaagcacttctgtttccccggagcgaggtataagtggtacccaccgccgaaagcctttaaccgttatccgccaatcaactacgtaatggctagtattaccatgtttgtgacttggtgttcgatcaggtggttccccccactagtttggtcgatgaggctaggaactccccacgggtgaccgtgtcctagcctgcgtggcggccaacccagcttttgctgggacgcctttttacagacatggtgtgaagacctgcatgtgcttgattgtgagtcctccggcccctgaatgcggctaaccttaaccccggagccttgcaacataatccaatgttgttgaggtcgtaatgagtaattctgggatgggaccgactactttgggtgtccgtgtttccttttattctttatattgtcttatggtcacagcatatatagcatatatactgtgatc

SEQ ID NO: 753 - DNA, 628 bp, Rhinovirus B
  source 1..628: mol_type = genomic DNA
ttaaaacagtggatgggtttcctaccatccgacccactgggtgtagtgctctggtatattgtacctttgcacgcctgttttcccattgtacccttccttaaattcctccccatgtaacgttagaagtttaagaacataaatgtacaataggaagcatcacatccagtggtgtatggtacaagcacttctgtttatccggagcgaggtataagcggtacccactgctgaaagcctttaaccgttaaccgccaatcaactacgtaacggctagtattaccttgtttgcaatctggcgttcgatcaggtggttccccccactagtttggtcgatgaggctaggagttccccacgggcgaccgtgtcctagcctgcgtggcggccaacccagcatttgctgggacgcctttttgtagacatggtgtgaagacctgcatgtgcttgattgtgagtcctccggcccctgaatgcggctaaccttaaccccggagccttgtgacataatccaatgtcattaaggtcgtaatgagcaattctgggacgggaccgactactttgggtgtccgtgtttctctttattctttacattgtcttatggtcacagcatatataatacatatatactgtgatc

SEQ ID NO: 754 - DNA, 628 bp, Rhinovirus B
  source 1..628: mol_type = genomic DNA
ttaaaacagcggatgggtatcccaccattcgacccattgggtgtagtactctggtactatgtacctttgtacgcctgtttctccccaaccacccttccttaaaattcccacccatgaaacgttagaagcttgacattaaagtacaataggtggcgccatatccaatggtgtctatgtacaagcacttctgtttcccaggagcgaggtataggctgtacccactgccaaaagcctttaaccgttatccgccaaccaactacgtaacagttagtaccatcttgttcttgactggacgttcgatcaggtggattttccctccactagtttggtcgatgaggctaggaattccccacgggtgaccgtgtcctagcctgcgtggcggccaacccagcttatgctgggacgcccttttaaggacatggtgtgaagactcgcatgtgcttggttgtgagtcctccggcccctgaatgcggctaaccttaaccctagagccttatgccacgatccagtggttgtaaggtcgtaatgagcaattccgggacgggaccgactactttgggtgtccgtgtttctcatttttcttcatattgtcttatggtcacagcatatatatacatatactgtgatc

SEQ ID NO: 755 - DNA, 630 bp, Rhinovirus B
  source 1..630: mol_type = genomic DNA
ttaaaacagcggatgggttctcccaccatccgacccactgggtgtagtactctggtatgatgtacctttgtacgcctgtttattcccaaacccccacccgttattcgcccaacccctgtaacgttagaagtttggaacttaattgtacaatagggagcaccatatccaatggtgtaacgtacaagcacttctgtttccccggagcgaggtataggtggtacccactgccgaaagcctttaaccgtcatccgccaatcaactacgtaacagctagtaacatcttgttgttgattggacgttcgatcaggtggttcaccccccactagtttggtcgatgaggctgggaatcccccacgggtgaccgtgtcccagcctgcgtggcggccaacccagcttatgctgggacgccctttcaatgacatggtgtgaagactcgcatgtgcttgattgtgagtccgccggcccctgaatgcggctaaccctaaccctggagccttgcaccacaatccagtggtgtctgggtcgtaatgagtaattctgggatgggaccgactactttgggtgtccgtgtttctcatttttcttttaattgtcttatggtcacagcatatagtattatatactgtgatc

SEQ ID NO: 756 - DNA, 631 bp, Rhinovirus B
  source 1..631: mol_type = genomic DNA
ttaaaacagcgggtgggtatcccaccacccgacccactgggtgtggtacactggtactttgtacctttgtatgcctgtttgcttccactcccctttacctaatattcttccccaagtatattttgcggtaacgttagaagaagcaaagttagtgcaataggatgtatcacaaccagtggtataaagcacaagcaattcttgttccccggagctggatatagactgctaacgtggtcaaaagtccttaaccgttatccgccagctaactgcgagaagactagtaacaccatgtttgtttttagacgttcgatcaggtgaataccccattcactagtttggtcgatgaggctgagaataccccacaggtaactgtgtctcagcctgcgtggcggccaacccgactcatgtcgggacgcctactaatagacatggtgtgaagatcctattgcgcttagttgtgagtcctccggcccctgaatgcggctaaccctaaccccggagccttgtggtgtaaaccaacatttgcaaggtcgtaatgagtaattctgggatgggaccgactactttgggtgtccgtgtttcctttatttttattgtgtgtgtcttatggttacaaatacaatttgtaatc

SEQ ID NO: 757 - DNA, 632 bp, unidentified
  source 1..632: mol_type = unassigned DNA; note = unclassified Picornaviridae sequence
ttgaaaactggcccccctggggatctttgcacctttgaagtgcatatcctcaggggttaaccaggtggtggacataatgtccacctttgtttcaacatggttctttggcattttctccagagtaactaaaagataaatgccatctggatggattttctggttataaaatgactttctcgttgatcggtttttccactatcttcattgccgggtggttgccaagcccggaagtgctatcactctaggattcgagtcttcatccgtcgcggatttctagggcccatatctggtgctgaaatattgcaaggaatggtgaaccctagttgtctaacactgtaagtctcgatgtcttagaccaggtagccttggcacaattcctaaccaccaacatgtttctcgtgaaattccctcgccggggtgtagtagcgagtctcctctgttgggctcatggttaggggatgctcctaggtagagtggaacctcttcttcattttaaggtgggacctgattcagtatcccactggaagttagaggtctgggtattggggtaacccagcttggtccacactgcttgatagagtcgcggctggccgacctaggacatctttaaaaagtcagttgattttaacctt

SEQ ID NO: 758 - DNA, 633 bp, unidentified
  source 1..633: mol_type = unassigned DNA; note = unclassified Megrivirus sequence
gggggctcttccccctgggctcttttccggtaatccgattggcgaccggattatcgtgactctgctgagtcgtccgtgcctctaggaaacttgttggctccggctgacactttttctggacatcggatgggcggcttggtggggctagccaaccctgactgactttatgtgtatgacctcttttcctcttgcgctttagtctgtcgcgtctgatccacgtacggattaaatggtatgtcataaggctaagcctcgttctgaaatcccctagccaaaggggcctagtaggatcttggtgtttccttatgacctctaccgaccatgttagctagagctagggctgaataggatgcatcccagactcctttttggatatctggagcaagacaccggagtttaactatgtacgctggataaggctcgaacacacccagattgaaggtggtgctgaaatattgcaagcctaggtctgtgtagtgttagtagatgcccgccgctatagttttctccgccccctgtgggttagtagtgtacctatttggacgcagagccggcaatctctgcctttgcctagtactggttgatagacccgcggctggtcgagttaacatggtataaccagttgaaacggct

SEQ ID NO: 759 - DNA, 633 bp, Enterovirus B
  source 1..633: mol_type = genomic DNA
cacccacagggcccactgggcgctagtacactggtatcacggtacctttgtgcgcctgtttgacccaccttccccaaacgtaacttagaagcacaactcaaatgatcattagacggctcagtatgccaactgggtctcgatcaagcacttctgttaccccggactgagtaccaataggctgctcacgcggctgaaggggaaaccgttcgttacccgaccaactacttcgagaaacctagtaccaccatgaaagttgcgcagcgtttcgctccgcacaaccccagtgtagatcaggccgatgagtcaccgcaaaccccacgggcgaccgtggcggtggctgcgctggcggcctgcccatgggacaactcatgggacgctacaatactgacatggtgtgaagagtctattgagctagttggtagtcctccggcccctgaatgcggctaatcctaactgtggagcagatacccacgcaccagtgggcagtctgtcgtaatgggcaactccgcagcggaaccgactactttgggtgtccgtgtttcttttattcctacgctggctacatatggtgacgatttgtaccataaagccttaaccgctcctcaacaccgtcataacacttaacacgctgag

SEQ ID NO: 760 - DNA, 633 bp, Rhinovirus A
  source 1..633: mol_type = genomic DNA
ttaaaactgggtgtgggttgttcccactcacaccacccaatgggtgttgtactctgttattccggtaactttgtacgccagttttccctcccttctccccctcctacccttttacgtaacttagaagctttaaacatgagaccaatagcaggcaactttccaggttgtctaaggtcaagcacttctgtttccccggttgacgttgatatgctccaacagggcaaaaacaactgatatcgttatccgcaaagtgcctacacagagcctagtaggattctgaaagatctttggttggtcgctcagctgcatacccagcagtagacctcgcagatgaggctggacattccccactggtaacagtggtccagcctgcgtggctgcctgcacacctcttacgaggtgtgaagccaaggattcgacagggtgtgaagagccgcgtgtgctcactttgagtcctccggcccctgaatgcggctaaccttaaacctgcagccatagctcataagccaatgagtttatggtcgtaatgagtaattgcgggatgggaccgactactttgggtgtccgtgtttcattttttccttttatcaattgcttatggtgacaatatatatatatatatatattggcatc

SEQ ID NO: 761 - DNA, 634 bp, Parechovirus B
  source 1..634: mol_type = genomic DNA
agaatagccaatctgtaacttcaacacctaagcgcatcttgcccgccgttatctggtcgaaggcacttgcaataagactggttaaccctccatgcgtgattcacaatcctatctgtctctcgagtgctttacgctcgggtaggggctcacccaggaggtcccactctttacagaggtctgcgcaggtggctttcacctctcgacagcgcccctcaatcctgccttaggtgtgaaggttgcacgtattccaatgtgaacagtgcttgaattttgttggtaggtgtagcgaccacacatgagccagcggatttcccctggtggtaacaccagcctctgggcccaaaaggcatgtctttgacctcatgtgtgcacaatcccagtgatgccaatgattagtaaagcacttagtatatatatgggatataccaatctcaagcacctaagggtgtaggtatggtaggctgaaggatgccctggaggtacccgcaggtaacgattggttcactgtggatctgaccaggggcccaccggaacttcgttctgggtagaagctctcgagccttgggttaaaaaacgtctaggcctatcccccggggggacccggggtttcccttataaccccatattttgcatc

SEQ ID NO: 762 - DNA, 636 bp, Pestivirus A
  source 1..636: mol_type = genomic DNA
tggagtctatacgaggaggacagcctgttaataacccagttagaaatatcaaataatttactcatatcagaagacttgccagccgctgtcaagaacataatggccaggactgatcacccagagccgatccaacttgcttacaacagttatgaggtccaggtcccagtcctgttcccaaaaataaggaacggagaggttacagacacctacgaaaactactcatttctaaacgctaggaagttaggagaggatgtgcccgtatacatctatgccactgaagatgaggacctggcagttgacctcctagggctggactggcccgaccctgggaatcagcaggtcgtggagaccagcaaagcactgaagcaagtggccggattgtcttcagctgagaatgccttgctcatagctttatttgggtatgtaggttaccaagctctatcaaagaggcatgtcccaatggtcacagatatatacactatagaggaccagagactggaagacaccacccacctccagtatgcacccaacgccataaaaaccgaagggacagagactgaattgaaggaattgccggcgggtgacgtggagaaaatcatgggagccatctcggattatgcagctggaggactggaa

SEQ ID NO: 763 - DNA, 637 bp, Enterovirus A
  source 1..637: mol_type = genomic DNA
acttagaagcttcacacaatcacgaccatcagtaggcctggcatcccagtcacgtcttggtcaagcacttctgttccccctgactgagtatcaataaactgctcacgcgggtgaaggagaaaacgttcgttatccggctaagtacttcgagaaccccagtagcaccgtgaaagttgcggagtgtttcgctcagcacttcccccgtgtacatcaggtcgatgagttactgttaaccccacgggcgaccgtgacagtggctgcgttggtagcctgcccatggggttacccttgggacgctctcatacagacctggtgtgaagagtctattgagctagttagtagtcctccggcccctgaatgcggctaatcctaactgcggagcacgcaccctcaacccagggggcggcgtgtcgtaacgggtaactctgcagcggaaccgactactttgggtgtccgtgtttccttttattccttactggctgcttatggtgacaattgaaaagttgttaccatatagctattggattggccatccggtgtctaacagagctattgtttacctatttattggatacgtccctcttaatctcaaggccattcaaactcttaattatatattgctccttaactgtaagaa

SEQ ID NO: 764 - DNA, 638 bp, Hepatovirus B
  source 1..638: mol_type = genomic DNA
gggagtaaacctcaccaccgtttgccgtggtttacggctacctatttttggatgtaaatattaattcctgcaggttcaggtctcttgaattatgtccacgctagtggcactctcttacccataagtgacgccttagcggaacctttctacacttgatgtggttaggggttacattatttccctgggccttctttggccctttttcccctgcactatcattctttcttccgggctctcagcatgccaatgttccgaccggtgcgcccgccggggttaactccatggttagcatggagctgtaggccctaaaagtgctgacactggaactggactattgaagcatacactgttaactgaaacatgtaactccaatcgatcttctacaaggggtaggctacgggtgaaaccccttaggttaatactcatattgagagatacttctgataggttaaggttgctggataatggtgagtttaacgacaaaaaccattcaacagctgtgggccaacctcatcaggtagatgcttttggagccaagtgcgtaggggtgtgtgtggaaatgcttcagtggaaggtgccctcccgaaaggtcgtaggggtaatcaggggcagttaggtttccacaattacaatttgaa

SEQ ID NO: 765 - DNA, 639 bp, unidentified
  source 1..639: mol_type = unassigned DNA; note = unclassified Megrivirus sequence
ttcccgaccggtctggcaaaccggacggttatcctggttagatgtctgatggttgctggaacgtggtggctactgctgccaccttctggcttcctttaatgggcatctagctgggttctttgccacaatccatcttactctcttacccattttctattacccagacttgttgttaactggtaaagttgacctactggcttcgttttgagactattctggtgttggtggacactctttccacaagtagattgtatggagttcatgctcgttttgaaccgggaatggcacaacccgtagtaggatcttgcctctgccatactaatctgcgcctgttgcttttagactatgggctgctaaggatgacattggaacccctttttggatattccatgtcaagtcaactgtttcatctggtgtacgctggaaatccttgttccgaggtcttgtctggaggtggtgctgaaatattgcaagccacaggcagttccttggacttggtgccgctatcagatgctacaccctctatgggcaaatgttgaaccttagtggacgcgtgagatgggaatccacgccggccatagactggctgataagctcgcggctgatcgagttgcaacagtaatcagttgatttgccact

SEQ ID NO: 766 - DNA, 639 bp, Rhinovirus C
  source 1..639: mol_type = genomic DNA
ttaaaacagccgtgtggttgtacccaccaccgggcacattgtgcgtggtacactggaattacggttcctttgtacgcctgttttcccttcccactttctttcttccttcacttcctaattgtaacataattagaagcatgacatacagtccaataggaggcggttaatccataaccgtcatagacaagcacttctgtttccccggatgtgtgaataggcttccaccgaggctgaagctgtagcattcgttatccgcacacgtactacgcgaaaactagtaacaccttgattggtggtgtggtgtttcactcggcgctaccccagcgtagatcagggcaatggggctacggaaaccccaccggcgacggtgtcgtagcccgcgtggtgccctgcccagatccttgcgatctgggacaccatatcattgacagggtgtgaagattctagtgtgctacgtgtgagtcctccggcccctgaatgtggctaaccttaaccccgcagctatggtgtgcaaaccagcacattcgtagtcgtaatgggcaactgtgggatgggaccaactactttgggtgtccgtgtttccttttattcttataattttccttatggttacaagcttatggttataggtttgtaacc

SEQ ID NO: 767 - DNA, 639 bp, unidentified
  source 1..639: mol_type = unassigned DNA; note = unclassified Enterovirus sequence
gacataagcgccgggtttgttaaaacagctgcgtggttgttcccaccaccaggcacacagtgcgtggtacactggaatttcggttcctttgtacgcctgttttcccaccctcatgtttgtttgtctttacgcgtaacttagaagcattgcaaacagctcaataggaatagtccatccaggactgttacgagcaagcacttctgtctccccggacgtgtgaatagacctcaccaaggttgaagctgtagcgttcgttatccgctcatctactgcgcaaagactagtaactaactgaagccttaatggtgtttcgctcagcagtaccccactgtagatcagggcaatgaggctacgcattccccactggtgacagtggcgtagcctgcgtggtgccctgcccaggtttcggcctgggacaccattttgacgacagggtgtgaagaccggcgtgcgctaggtgtgagtcctccggcccctgaatgcggctaatcctaaccctgcagccattgcatgtgatccaacatgtggatggtcgtaatgagtaattgcgggatggaaccgactactttgggtgtccgtgtttcctgttttaccaattactgtctcatggttacaaatttgtgtatcaagtttgtaact

SEQ ID NO: 768 - DNA, 640 bp, unidentified
  source 1..640: mol_type = unassigned DNA; note = unclassified Picornaviridae sequence
ttttgaaaagggtcccagggggatcttttattccctctgggcccttttcacgtagtagggagtggcgcccctactgcgttactctgccaggtagtctgggtaggtaaacgggagatcggcttcgggcttatcttcttaatagcctacgtaactgggctgactggtgggggagctactagatccgggaaaggactagttaccccttgtaactctccttcgtgtcaccccatccacttaccctttttccctaccccttagaatcttaagtagatgtgcaggcctggccccccggaaatgggcaaatcggacgtttgcgtgtagggtcgttctgaaaggtggggcccactccaccgtagtaggatcttcctgtttcacgtttaaacctctccgggcaggtgtcgctagacactaggctgtataggatggcaagcacttaggtttcgcaccttcctagtgcgccaagaccccgtcttttagttttagtacatggttctttgtaagatgtctaaccagaggaggtggtgctgaaatattgcaagccactctggcgaacgtccgctgcattgcctggaacgaactttctgacgtctagcactggtagcgcggtactagattagtagggtacctatatggacagggg

SEQ ID NO: 769 - DNA, 640 bp, unidentified
  source 1..640: mol_type = unassigned DNA; note = unclassified Enterovirus sequence
ttaaaacagccgtgtggttgttcccaccaccggacacactgtgtgttgtgcactggaatctcggttcctttgcatgcctgttttataaccccttcccctttactttctatcattcttttcttccaagtaacttagaagctgaacaacagtccaataggaagtgaccaacccatggtcactaaggacaagcacttctgtttccccggatgcgtgaatagactctaaaagggttgaagctgtagcattcgttatccgcacttgtactacgcgatggctagtatcatcctgctctttccattggcgtttcgctcagcgtggtatcccccacgtagatcagggtaatgaggctacatgtaccccaccggcgacggtgatgtagcctgcgtagtgccccgcctgggtcttgtgcccaggacgccataggtcagacagggtgtgaagacttgagtgtgctacaagtgagtcctccggcccctgaatgcggctaatcctaaccccgcggctatcgtacgcaatccagcgtattggtagtcgtaatgagcaattgtgggatggaaccgactactttgggtgtccgtgtttcctttatttcttgacatgttgcttatggtcacaagtttatggttataaatttgtgatc

SEQ ID NO: 770 - DNA, 641 bp, unidentified
  source 1..641: mol_type = unassigned DNA; note = unclassified Kobuvirus sequence
ggatttaggccgtggtgcccgtgggcacgacggccacggctccagccgcactcctctccacgccttgtcccacgggacataaagtggagccctaagccctaaacccccatgttacccaattttcttatccacttccctttttccctttgactcacatttttcttgaccgcgcttgtgaggcggttcccgtacagttgagttgacgggtcccgcgcgggacctgaaaattactccatactgattaggaaaggttctagtacgcttgtacccttaaggccagcgggctacctcctttaggtcttatagccccaactggttagaaccactccagctcacctctatcggtgcgggagtgctaccacccctgcctgcgtcaagcccgtttttctagtgatctgtccacaaacacttggattcccgtcgcgactgacagaacctggcgacaggtgtctcgatgtgtgtgaccaagtggcatgagaatcggaaactaacgctggtaagatggtaagtgcccaatccctgtggggtgatgtttttctctgcataggaatgctgcgaaggtaccccggccttgagtcgggatctgatcgcaggctaattgtcctctgtgcagttcatttccttttcttttcattggcatc

SEQ ID NO: 771 - DNA, 641 bp, Rhinovirus C
  source 1..641: mol_type = genomic DNA
ttaaaacagccgtgtggttgtacccaccaccggacacactgtgtgttgtgcactggaatctcggttcctttgcatgcctgttttaaaccccccttcccccactctttctatcattcttttcttcctaatgtaacttagacgttataccacagtccaataggacgtggccaatccaggccatgacggacaagcacttctgtctccccgggcgtgtgaataggcctcaacaaggctgaagctgtagcgctcgttatccgcatttgtactacgcgatggctagtatcatccttctcttggtcttggcgtttcgctcagcgtggtaaccccccacgtagatcagggcaatgaggctgcatatgccccaccggcgacggtgatgcagcctgcgtggtgccccgcctgggttaacccccaggacgccacaatcaagacagggtgagaagacctgagtgtgctacagatgagtcctccggcccctgaatgcggctaatcctaaccctgcagctatcgtatgcaaaccagcatattggtagtcgtaacgagcaattgcgggacggaaccgactactttgggtgtccgtgtttctctttttatttgaaatgttgcttatggttacaagttttggtattaaacttgtgacc

SEQ ID NO: 772 - DNA, 641 bp, unidentified
  source 1..641: mol_type = unassigned DNA; note = unclassified Enterovirus sequence
tgtgtacatctcttctagtttcggggaggggtttaaaactgaaccacggttgttcccactgtggttacctaaagggtgtagtggtcttgtattacggtacatttccatgccagttttatcacccctccccgaaattagaagagatgtacacaccgaccaatagggagtggccaaccaggtcgctaaaggtcaagcacttctgtttccccggttggtttggatatgctttacccaaggcaaaaaccgaaccagtcgttatccgcaaagtgcctacgagaagcctagtagcatcttcgaaaccaatggttggtcgctccattgcaaccccagcaatagacctggcagatgaggctgagcagtccccgccagcgatggtggctcagcctgcgcggctgcctgcgcaccccttagggtgcgaagccagaaagtggacaaggtgtgaagagcctattgtgctcactttgagtcctccggcccctgaatgtggctaatcttaaccccgcagctatcgcacataaaccaatgtgtaggtagtcgtaatgggcaactgtgggatggaaccaactactttgggtgtccgtgtttccttgttttctttacaaatgcttatggtgacaattgtgtgatatacagttgtcgcc

SEQ ID NO: 773 - DNA, 642 bp, Enterovirus B
  source 1..642: mol_type = genomic DNA
taatgtaacgtagaagttttacacactgatcaacagtaggcacagcgcaccagttgtgtctcgatcaagcacttctgtctccccggaccgagtatcaatagactgctcacgcggttgaaggagaaagcgttcgttacccggctgactacttcgagaaacctagtagcactatgaaagttgcgaagtgtttcgttcagcacttcccccgtgtagatcaggtcgatgagtcactgtattccctacgggtgaccgtagcagtggctgcgttggcggcctgcccatggggcaacccatgggacgcttcaatacagacatggtgcgaagagtctattgagctagtcagtagtcctccggcccctgaatgcggctaatcctaactgcggagcatgtgccttcgatccagagggtagcatgtcgtaatgggcaactctgcagcggaaccgactactttgggtgtccgtgtttccttttattcttatactggctgcttatggtgacaattgagagattgttgccatatagctattggattggccatccggtgagtaatagagctattatctactcctttgtgggttttgtatcattgaactataaggtcttgaagactctcaactttattttgacactcaacaccgcaaa

SEQ ID NO: 774 - DNA, 643 bp, Enterovirus B
  source 1..643: mol_type = genomic DNA
aagcgtaacttagaagcttacctcacgtggtcaataggcggctcagtacaccaactgggtcttgaccaagcacttctgttaccccggaccgagtatcaataggctgcccacgcggctgaaggagaaaacgttcgttacccggccaattacttcgagaaacctagtatcaccatggaagttgcgcggcgtttcgctccacacaaccccagtgtagatcaggctgatgagtcaccgcactcctcacgggcgaccgtggcggtggctgcgttggcggcctgcccatggggcaacccatgggacgcctcaatactgacatggtgtgaagagtctattgagctaattggtagtcctccggcccctgaatgcggctaatcctaactgcggagcagacactcacaagccagtgggcggtctgtcgtaacgggcaactctgcagcggaaccgactactttgggtgtccgtgtttccttttattcctacattggctgcttatggtgacaattgagagattgttaccatatagctattggattggccatccggtgacaaacagagcgattgtctattcatttgtcggttttgtaccattaaactccaaagtcttgaaaaccctcaacctaatcatcctacttaactcagtaaa

SEQ ID NO: 775 - DNA, 643 bp, Enterovirus D
  source 1..643: mol_type = genomic DNA
ccaagggcccacgtggcggctagtactctggtacttcggtacctttgtacgcctgttttatctcccttcccaatgtcaataggtggggcgcaaaccagcgctctcatgagcaagcactcctgtctccccggtgtggttgtataaactgttcccacggttgaaaacaacctatccgttatccgctatagtacttcgagaaacctagtatcacctttggattgttgacgcgttgcgctcagcacactaacccgtgtgtagcttgggtcgatgagtctggacataccccactggcgacagtggtccaggctgcgttggcggcctactcatggtgaaaaccatgagacgctagacatgaacaaggtgtgaagagtctattgagctactatagagtcctccggcccctgaatgcggctaatcctaaccatggagcaagtgctcacaggccagtgagttgcttgtcgtaatgcgcaagtccgtggcggaaccgactactttgggtgtccgtgtttcactttttacttttatgactgcttatggtgacaatttgatattgttaccatttagctgtcaaattaattgcaaaagatcctaagtcttacttaccaatttgcattttgataaccttgatttgaaaattttaata

SEQ ID NO: 776 - DNA, 643 bp, unidentified
  source 1..643: mol_type = unassigned DNA; note = unclassified Enterovirus sequence
cggataacgtttaaaacagcggatgggttcccccaccatccgacccactgggtgtagtactctggtattatgtacctttgtacgcctgtttactcccaaaccccccctcccgttacatttccaacccctgtaacgttagaagtttggaatttaacagtacaataggaggcaccatacccaatggtgtaatgtacaagcacttctgtttccccggagcgaggtataggtggtacccaccgctgaaagcctttaaccgttatccgccaatcaactacgtaacagctagtagcattttgtcgttgactggacgttcgatcaggtggtttacccccccactagtttggtcgatgaggctggaaattccccacgggtgaccgtgttccagcctgcgtggcggccaacccagctcatgctgggacgccctttcaatgacatggtgtgaagactcgcatgtgcttggttgtgaatcctccggcccctgaatgcggctaaccctaaccccggagccttgcatcgcaatccagtgatgttggggtcgtaatgagtaattctgggatgggaccgactactttgggtgtccgtgtttctcatttttctttgaattatcttatggtcacagcatatagtaatatatactgtgatc

SEQ ID NO: 777 - DNA, 644 bp, unidentified
  source 1..644: mol_type = unassigned DNA; note = unclassified Picornaviridae sequence
gaaaagagtcccaggaggaattccccctgggaacccttttccgttgggaaggcttggcaaccttcctggcgttaggctgcttagtagtctgcgtattgcgcgccagtttggcttcggctgagctgccgttcaatacactagtgggctattctaggtggctgtagttgccctacagtggccggccagtgaaaccacactgtagtttacccctaccccaaaatctctaatttatgaccgtaatccctaagtgactttcttgtttgctctcacacatgggctttggatcttgttttggattttggtatctgatctctatctggatgtatcagtaatctgaagtgcggacgcaatccgcctagtaggatgactgttgtccttttagaggaaaacctctgtggctagacatagtggtgtatagattcaacaggactcctttttggatatcctaactcccggacccttgttgaatgggctggatttccgcctagccaagggaaaccaccggaacggggatggcaactgaacctagtacggctagtaggaggtctatacatacgatgggctgggaaacccatcctggactatgactgggtgatagcctcgcggcggatcgagtcacagttgtaatccgttgttttgcactc

SEQ ID NO: 778 - DNA, 644 bp, unidentified
  source 1..644: mol_type = unassigned DNA; note = unclassified Enterovirus sequence
aattggcggataacggttaagagcttaaaacagcggatgggttccccaccatccgacccaatgggtgtagtactctggtattctgtacctttgtacgcctgtttctcccctccctcccatcctaaattgtcccagtaacttagaagacttgaattaccgtacaataggtgctgtcacatccagtgatggcttgtacaagcacttctgtttccccggagcggagtatagatggccaccgctgtcaaaagctcttaaccgttatccgccaattaactacgcaacggctagtaacatcttgttattcttagggcgttcgatcaggtgagtacacccctcactagtctggtcgatgaggctgagaattccccacgggcgaccgtgtctcagcctgcgtggcggccagcccagcttatgctgggacgccttaattgtgacatggtgtgaagacccacgtgtgcttaattgtgagtcctccggcccctgaatgcggctaacctaaaccctggagccttgagacacaatccagtgttggcaaggtcgtaatgagcaattccgggacgggaccgactactttgggtgtccgtgtttcctgttatttccaaattgttcttatggtcacaatataagctatatatattgtgatc

SEQ ID NO: 779 - DNA, 644 bp, unidentified
  source 1..644: mol_type = unassigned DNA; note = unclassified Enterovirus sequence
cgaatccttgtagtaatttatgttaaagtacttgatgagacctccattggtggcagtaatagcattctcatgtgatccggtggtattccggtacacttgtacgccagtttgccaccctaaataccccgtaacaatagaagtctacacacacttagaccaatagggggtgttcatccagttcacccaaggtcaagcacttctgtttccccggcataggggtgttaggtttcacccgagactgaagctctgattgtcgttatccgcacaactactggacaaagcctagtaacaccctacgatgtaccatggttggttgttccgccagtaccccctggtaaacctggcagatggggctagaagttcctcactggtgacagtgttctagcccgcgtggctgcctgctcccttatgggagaagccattttactgacaaggtgtggagagccccgtacgctagttgtgactcctccggcccctgaatgcggctaatccaaccctgcagccattgcatggaagccaccatgtagatggtcgtaatgagtaattgcgggacggaaccgactactttgggtgtccgtgtttcttgtttttcttttactgacgtttatggtgacaatatatatataacatatatattgttcatc

SEQ ID NO: 780 - DNA, 645 bp, unidentified
  source 1..645: mol_type = unassigned DNA; note = unclassified Enterovirus sequence
ttaaaactgggcattggttgtccccaccaatgcacaccaagtgtgttagtgctctggaatcttcgttcctttgcacgccagtttgccctcccttccccaagtctttctatcattcttttcttcctaatgtaacttagacgttataccacagtccaataggacgtggccaatccaggccatgacggacaagcacttctgtctccccgggcgtgtgaggaataggcctcaaaaaggctgaagctgtagcgctcgttatccgcattggtactacgcgatggctagtatcatcctggaagtctcttggttggtcgctcagcgtggtaaccccccacgtagatcagggcaatgaggctgcatatgccccaccggcgacggtgatgcagcctgcgtggtgccccgcctgggttaacccccaggaagccaatgagtggacagggtgtgaagagccgcgtgtgctaccaatgagtcctccggcccctgaatgcggctaatccaaccccacagctatggcatgcaagccagcatgtgcgtagtcgtaatgagtaattgtgggacggaaccgactactttgggtgtccgtgtttcctttattctttgaaatgttgcttatggtgacaatattggtattataccattcttgtcatc

SEQ ID NO: 781 - DNA, 647 bp, unidentified
  source 1..647: mol_type = unassigned DNA; note = unclassified Enterovirus sequence
tgtgacctcaccggggaaacagaagtgcttgttcgtggtggtactggtttgtaccaccacgaacaagcacttctgtttccccggtgaggtcacatagactgttcccacggttgaaagtgatcaatccgttatccgctcatgtacttcgggaagcctagtatcacctttggatcttcgacgcgttgcgctcagcactcaaccccagagtgtagcttaggctgatgagtctggacgttccccactggtgacagtggtccaggctgcgttggcggcctacctgtggttcaaagccacaggacgctagttgtgaacaaggtgtgaagagcctactgagctacctgagattcctccggcccctgaatgcggctaatcctaaccacggagcaggtgatcataaaccaatgataggcctgtcgtaatgcgcaagtctgtggcggaaccgactactttgggtgtccgtgtttccttttattctttacattggctgcttatggtgacaatcatagattgttatcataaagcgaattggattggccatccggtgaaaatcagagcgattatatatttgtttattggattcactccattaacaccaatttctcctacactcattaagctagtcctattaataaggtactattatcata

SEQ ID NO: 782 - DNA, 647 bp, Enterovirus C
  source 1..647: mol_type = genomic DNA
cggtacctttgtacgcctgttttatatcccctcccccatgcaactttagaagcaattcaaacagttcaatagagggggtacaaaccagtaccaccacgaacaagcacttctgtttccccggtgaagctgtatagactgtgcccacggttgaaaatggctaatccgttatccgcttaagtacttcgagaagcctagtatcaccttggaatcttcgacgcgttgcgctcagcactctaccccgagtgtagcttaggctgatgagtctgggcataccccaccggcgacggtggcccaggctgcgttggcggcctacccatggctaacgccatgggacgctagttgtgaacaaggtgtgaagagcctattgagctacttgagagtcctccggcccctgaatgcggctaatcccaaccacggagcaagtgctcacaaaccagtgagtggcttgtcgtaacgcgcaagtctgtggcggaaccgactactttgggtgtccgtgtttccttttatttttatcatggctgcttatggtgacaatctaagattgttatcatatagcgtttggattggccatccggtgatttcaaaagtgatatatttgacctatcgccttactgtgtttacctactcattacatccactcaaccata

SEQ ID NO: 783 - DNA, 648 bp, Enterovirus C
  source 1..648: mol_type = genomic DNA
tcacggtacctttgtacgcctgttttacatcccctccccaagtaactttagaagtaaatcataaagttcaatagaagggggtgcaagccagcaccaccacgaacaagcacttctgtttccccggtgaagccgtatagactgcccccgcggttgaaaatggcagatccgttatccgctcacgtacttcgagaagcctagtatcaccttggaatcttcgacgcgttgcgctcagcactctaccccgagtgtagcttaggtcgatgagtctgggcataccccaccggtgacggtggcccaggctgcgttggcggcctacccatggttaacaccatgggacgctagttgtgaacaaggtgtgaagagcctattgagctacctgagagtcctccggcccctgaatgcggctaatcccaaccacggagcaagtgctcacaaaccagtgggtagcttgtcgtaacgcgcaagtctgtggcggaaccgactactttgggtgtccgtgtttccttttatttttatcatggctgcttatggtgacaatctaagattgttatcatatagctattggattggccatccggtgatttttgaaagtgatatttgccttgctatttcattgcatttgcttacttataatactgcaaactcaca

SEQ ID NO: 784 - DNA, 648 bp, unidentified
  source 1..648: mol_type = unassigned DNA; note = unclassified Enterovirus sequence
tactaatacagagtactacacccagtgggtcggatgggtatcccaccatccgacccactgggtgtagtactctggtattatgtacctttgtacgcctgttcttcccattgtaccctccctaaatttccaacccaagtaacgttagaagttccacataacagtacaataggaagcaccacatccagtggtgttttgtacaagcacttctgtctccccggagcgaggtataggctgtacccactgccaaaagcctttaaccgttatccgccaaccaactacgtaaaagctagtaacatcttgtttgtaacttggcgttcgatcaggtggattccccctccattagtttggtcgatgaggctaggaattccccacgggcgaccgtgtcctagcctgcgtggcggccaacccagcatttgctgggacgcccttttatagacatggtgtgaagactcgcatgtgcttggttgtgactcctccggcccctgaatgcggctaaccttaaccccggagccttgtgttgcaagccagcaacattaaggtcgtaatgagtaattctgggacgggaccgactactttgggtgtccgtgtttccaatttttcttattattgtcttatggtcacagcatatttgacaaatatactgtgatc

SEQ ID NO: 785 - DNA, 649 bp, Enterovirus B
  source 1..649: mol_type = genomic DNA
ccaccccgtcgtaacttagaagctaatcaactatggtcactaggcggcccagtatgccaactgggtcttgaccaagcacttctgttaccccggactgagtatcaataggctgctcacgcggctgaaggagaaaacgttcgttacccggccagttacttcgagaaacctagtaccaccatgaaggttgcgcagcgtttcgctccgcacaaccccagtgtagatcaggccgatgagtcaccgcatccctcacgggcgaccgtggcggtggctgcgttggcggcctgcccatggggcaacccatgggacgcttcaatactgacatggtgcgaagagtctattgagctaattggtagtcctccggcccctgaatgcggctaatcctaactgcggagcagatacccgcgtgccagcgggcagtctgtcgtaatgggcaactctgcagcggaaccgactactttgggtgtccgtgtttccttttattcttacactggctgcttatggtgacaattgaaagattgttaccatatagctattggattggccatccggtgactaacagagcgattatctatcaatttgttggttttgtgccattggatttcccaaccctaagaacccttaattttatattggtacttaacacgacaag

SEQ ID NO: 786 - DNA, 651 bp, unidentified
  source 1..651: mol_type = unassigned DNA; note = unclassified sequence
ggttaacttgtttaaccaaggcttccgtgcagggcttgcacgttaggagttcatgttgattcatgctccaatgcccaaaactttgtgtgtttgtttatgtctttcccaaagtttcccccaaggtttcggtactcaaaccttaattcctagtcccatcttttgggccttagtatctaggaaatgtacccgtgccttgacgaacgtaagaaagctgtcttttattgaacggttctaatgaactaagtataactggctcgcgccacctggtgtgtgccgttggaattcccccatggtaacatggtccaacgggcccgaaaggctagtgggcaatcggtcctccaaggaaggggttcccaccccgacctgaacaggatttgatgaagctcacctcccaggctcctaaccccaaggaagtttacttatagtaattagaatttagtatgtaattgctggcaatcttgctagtagtcaggaacgttatgaccaaatgagtagacccccagaaggtaccccattatatgggatctgatctgggcctcatactgtgtgtctccccacatatgaggttaaaaccatgaaagtttggtccaaaatattcttttccttttatcttttctttagtggtgacgccattatatcagcagtttgctg

SEQ ID NO: 787 - DNA, 651 bp, Enterovirus C
  source 1..651: mol_type = genomic DNA
ccccgtaacttagaagcataaaaccaagttcagcaggaaggggtgcaaaccagtacctctatgaacaagcacttctgtttccccggtgacattgcatagactgctcacgcggttgaaagcgatcgatccgttatccgcttgtgtacttcgaaaagcctagtatcgccttggaatcttcgacgcgttgcgctcagcacccgatcccggggtgtagcttaggctgatgagtctggacgtccctcaccggcgacggtggtccaggctgcgttggcggcctacctatggctaacgccataggacgctagatgtgaacaaggtgtgaagagcctattgagctacacgagagtcctccggcccctgaatgcggctaatcctaaccacggagcaagcggtcacgaaccagtggctggcttgtcgtaacgcgcaagtctgtggcggaaccgactactttgggtgtccgtgtttcctgttatttttatcatggctgcttatggtgacaatctgtgattgttatcataaagcgatttggattggccatccggtgagtgttgtatcgaacatttgactgttcatcagaactactgtgttagattcacttcttattcaactaattaatcaaaaacagtacgaagacaaaacaacaatactaca

SEQ ID NO: 788 - DNA, 651 bp, unidentified
  source 1..651: mol_type = unassigned DNA; note = unclassified Enterovirus sequence
cccctaccccttgcaacatagaagcattgtaccacggatcaatagcaggtgtgtcgatccagacgcatcttgatcaagcacttctgttcccccggaccgagtatcaataagctactaacgtggctgaaggagaaaatgtccgttacccggccaactacttcgagaagcccagtaccaccatgaacgttgcagagtgtttcgctcagcacaaccccagtgtagatcaggccgatgagtcaccgcattcctcacgggcgaccgtggcggtggctgcgctggcggcctgcctatggggaaacccataggacgctctaatactgacatggtgcgaagagcctattgagctagttggtagtcctccggcccctgaatgcggctaatcctaactgcggagcatgtgctcacaatccagtgagtggcatgtcgtaacgggtaactctgcagcggaaccgactactttgggtgtccgtgtttccttttatatttatactggctgcttatggtgacaatcaaggaattgttaccatatagctattggattggccatccggtgactaatagagctataatttacctatttgttggattcgtccccctgaacacaaaaacagttcagactctacagtacatcttatttttgaacttgaagaa

SEQ ID NO: 789 - DNA, 652 bp, unidentified
  source 1..652: mol_type = unassigned DNA; note = unclassified Enterovirus sequence
gggggttgtacccacccctggggcccacgtggcgccagtactctggtacgctagtacctttgtacgcctgttttcccctcccgtaaataaatcaagattgctggtcctgtggggagtagtccgactccgcaccgatacgtcgcaccagtactccggtacgcctagtaccctagtacggaggtaccagtactcctctcccgtaacttagaagcaaagcaccaaaccgacccaaaaggacgcgttgcacccagcagcgtgatggtcaagcacttctgtttccccggccgcaaggtcgttacccacccgcaccactacgagaagcctattagacagccaagcttgcaaagcgttgcgttcaaccacaaccccagtggtagctctgagagatgggactcgtcgttcccccatggcaacatggtgacttgtccgcgtgtgctctcgggttcgccaataggcgttcacgccgcacaagtgtaactgttgaagagcctattgtgctggagcggttttcctccggagccgtgaatgctgctaatcccaacctccgagcgtgtgcgcacaaaccagtgttgctacgtcgtaacgcgtaagttggaggcggaacagactactttcggtactccgtgtttccttattttatattactcaatct

SEQ ID NO: 790 - DNA, 652 bp, unidentified
  source 1..652: mol_type = unassigned DNA; note = unclassified Enterovirus sequence
gagcctggtggagcgtatcaatctaaaccggggagacagaagtgcttgaccgttaatgacttggatagccatctcctacatggagttgtactctattattccggtaatcttgtacgccagttttatatcccttccccctttgtaacttagaagttaagcacacagaccaataggtgatggctatccaagtcattaacggtcaagcacttctgtctccccggtttagattgatacgctccaccagggcgaaaacaatctaaatcgttatccgcaaagtgactacgcaaagcctagtaataccttgaagaacttatggttggtcgctccactaaaccccatagtagacctggcagatgaggctagaagtaccccactggtaacagtgttctagcctgcgtggctgcctgcacaccctttgggtgtgaagccatatttttgacaaggtgtgaagagccccgtgtgctcactttgagtcctccggcccctgaatgtggctaaccttaaccctgcagctagtgcatgcaatccagcatgttgctagtcgtaacgagcaattgcgggatgggaccaactactttgggtgtccgtgtttcactttttaccttttatttgcttatggtgacaatatatatagtacatatatattggcatc

SEQ ID NO: 791 - DNA, 654 bp, Enterovirus J
  source 1..654: mol_type = genomic DNA
tttgtacgcctattttaaaacccctacccccgtaacttagaagcatttgacacaagttcaatagtaggaccatcatccaggtggttcatcgaacaagcacttctgttaccccggtcctagtacctgtgaagctgtacccacggcggaaggggaaaacgatcgttacccggctatctacttcgagaagcctagtaacagcattgaaactcttgagcgttgcgttcagcacagtaacccctgtgtagctttggctgatgagtctgggcattccccactggcgacagtggcccaggctgcgttggcggccaaccgatccgggcaaccgggtcggacgcttatttgtggacatggtgtgaagagcctattgagctagatagtagtcctccggcccctgaatgcggctaatcctaactccggagcaaatgcacgcaacccagcgtgtagtttgtcgtaacgcgtaagtctggagcggaaccgactactttgggtgtccgtgtttcctgttttaccttatttggctgcttatggtgacaatatagtattgttaccatatagctattggattggccatccggtgaacagatttcgacaaactctattttactgttgttcacagcctaaagttacaaatcttactctgactcagtagtaatc

SEQ ID NO: 792 - DNA, 655 bp, Parechovirus A
  source 1..655: mol_type = genomic DNA
ctggatttctctaggagagtccctttcccagccctgaggcggctggtaaataaaagcctcaattgtaacaaacatctaagaacactacattaaccccatgcctggtctccactagttgaaggcgacttgcaataagatgagtggaaacaagacgcttaaagcatggtgtaaatcaacttttctaacctgtacattgtatggggtggcagatggcgtgccataattctatcagtgagataccacgcttgtggaccttatgctcacacagccatcctctagtaagtttgtgagacgtctggagacgtgtgggaacttattggaaacaacattttgctgtaaagcatcctactgccagcggaacaacacctggtaacaggtgcctctggggccaaaagccaaggtttaacagaccctctaggattggtttaaaacctgagatgttgtggaaaatattcagtacctaccaatctggtagtagtgcaaacactagttgtaaggcccacgaaggatgcccagaaggtacccgtaggtaacaagtgacactacggatctgatctggggccaggtacctctatctaggtgacctggttaaaaaacgtctagtgggccaaacccgggggggaccccggtttccttttattttatcaatgccact

SEQ ID NO: 793 - DNA, 655 bp, Enterovirus A
  source 1..655: mol_type = genomic DNA
ctgttttatctcccctcccccgtaacgttagaagattaaacaaatgacaaatagcaaatccaccaacccaggtgggttttcgtcaagcacttctgtttccccggacctagtaccaataggctgtacccacggctgaaagggaaaacgttcgttacccggctacctacttcgagaagcctagtaccatcattgaatgtctcaagtgttacgctcagcacaaccccagtgcagttcaggctgatgagtcaccgaatcccccacgggcgaccgtgtcggtggctgcgttggcggcctgcctgcgagttccactcgcaggacgcttgattcatgacatggtgcgaagagcctattgagctaggtagtagtcctccggcccctgaatgcggctaatcccaaccacggagcatccactgacaaaccagtcagcagggtgtcgtaatgggcaactctgtggcggaaccgactactttgggtgtccgtgtttcctgttttatttactctggctgcttatggtgacaatttacggattgttaccatatagctattggattggccatccggattacaagcaagtaatattactgtttgtgggatttttacccttgaatcacattaactacttcattctactaatagtcttgaagttaagtacatc

SEQ ID NO: 794 - DNA, 656 bp, unidentified
  source 1..656: mol_type = unassigned DNA; note = unclassified Picornaviridae sequence
cgaattccggacatctcctttcgggggcgagcgtcaccgtgcccctcatggaggcaactgtgcctctaatcggtgacccactgagaaaattttctttctacgtggctaaacaatgcaactttataataacacaaatttaatgcttaatcttaacaccaaagatttgaacatatgtttggaaagtggcacacttcaaacattgcatagttgctaggggtgaagtccctttaaggggttgcagaggatctttcctctttatgagcggctaggagtatcttcttgatattatgtggtcgtgcaactcacttcccagatgtatgacggtgtactaagcgattggaactagtcataacctctttgaattttggtattgcgagtctagcagggggatatttaccgctaaagggtgacacactcgtgagggtggcctttggtgtgtgtatatttattccgcccatcttgcatggggtgctaaaattctaatgctgtgaaataaccattttctgaatacattctctacatttggagtcaaatatgaggaatgccactcaggtacccttgacatgatcttggatctgagagtgggctaattatctaattatttggcgactttctaaaatcttctgtttttagtggtgacaatttatggttataaa

SEQ ID NO: 795 - DNA, 656 bp, unidentified
  source 1..656: mol_type = unassigned DNA; note = unclassified Enterovirus sequence
gaaaggaggggaaggggttttaaaacagtcgaccggttgttcccaccggcgagcacactgtgcgttgtacactggaattacggttcctttgtatgcctgttttataaccccttcccctcctttctatcacctctaacttccatgtaacttagaagcaacgtacatgagcccaataggagcggctaatccacagccgtatagggcaagcacttctgttaccccggatgtgtgaatagacttctcacgaggttgaagctgaagcattcgttatccgcgcttgtactgcacggaaattagtagcactcttgccagcctcatggtgtttcgctcagcgtttcccccacgtagatcagggcaatggggctacacaacccccaccggcgacggtggtgtagcccgcgtggtgccccgcccgagctactagctcgggacgccatgatgaagacagggtgtgaaggttcgagtgcgctacaagtgagtcctccggcccctgaatgcggctaaccttaaccccgtagctgtggtgtgcatgccagtacaaacacagtcgtaatgggtaactacgggatgggaccgactactttgggtgtccgtgtttcactttttcctttaaatttgtcttatggttacaggtttatgcaaatagatctgtaatc

SEQ ID NO: 796 - DNA, 657 bp, Enterovirus B
  source 1..657: mol_type = genomic DNA
gcggccccctcccccactgtaacttagaagcaatgcataccgatcaacagtgggcgtggcaaaccagccatgtcttgatcaaacacttctgtttccccggactgagtatcaatagactgctcgcgcggttgaaggagaaaacgttcgttatccggccaactacttcgagaagcttaagtaacatcatgaaagttacggagcgtttcgttcagcacatccccagtgtagatcaggccgatgagtcactgctctccccacgggcgaccgtggcagtggctgcgctggcggcctgcccatggggtgacccatgggacgctctaagatggacatggtgcgaagagcctattgagctagttggtagtcctccggcccctgaatgcggctaatcccaactgcggagcatgtgtcttcactccagaagatagcatgtcgtaacgggcaactctgcagcggaaccgactactttgggtgtccgtgtttccttttattcctacactggctgcttatggtgacaattcaagaattgttaccatatagctattggattggccatccggtgagcaatagagcaattatctaccaatttgttggatttgtacccctcgattttacagccattggaacacttaaatacatcttagtactcaacacgacaaa

SEQ ID NO: 797 - DNA, 660 bp, Enterovirus L
  source 1..660: mol_type = genomic DNA
acatgggccagcccaccacacccactgggtgtagtagtctggttctatggaacctttctacgcctcttttgcttccctcccccatttctccttcgattgctccacctgtgatctttgcaacttagaagaaataatgaacccgcacaatagcgggcgctgagccacagcgtcaatgtgcaagcacttctgtttccccggaatgggcccataggctgtacccacggctgaaagggaccggcccgttacccgccttggtactgcgagaatgttagtaactccctcgatagctttaggcgttacgctcagccctttgagcccgaagggtagttcgggtcgatgaggctcgtcattccccactggcgacagtgtgacttgcctgcgttggcggcccggggtggggggcaacccccatccacgcctactgaaggacagggtgtgaaggcgctattgcgctactaaggagtcctccggcccctgaatgcggctaacccgaaccccgagcccacggtggtaaacccgccacaagtgggtcgtaatgagtaatttggggcagggaccgactactttgggtgtccgtgtttcctgtttttccatacgatggctgcttatggtgacaaccataagcaattggattggccatccggtgttcatattgcgaat

SEQ ID NO: 798 - DNA, 662 bp, Cardiovirus A
  source 1..662: mol_type = genomic DNA
ctctttccgagggaaaggaagcgccccagtctgcattcacaagctggtgcttccccgcccagactaagcgccgcacggagggaatcagggtcccggtgccccccctccctaacagtactggtcgaaaccacttgggataagaccggtgtcttgtttagtctatatgttatttctactcatctggtttctttgccagatgatgggcagtgtaaccttgccctcgcttcttgcggagaattcctagtggtctttccactctcgacaaaggaattcatgttccaccaaaagttgtgaagaaagcaagtcctatggaagctttctgatgactgatgatgactgtagcgaccctttgcaggcagcggactcccccacctggtaacaggtgcctctgcggccaaaagccacgtgtttgacagacacctgcaaaggcggcacaaccccagtgcctcatcaaaagtctgatgactgtggaaatggtcaactggcttttcttaagcaaatttggtgtttggggctgaaggatgcccggaaggtaccacactggttgtgatctgatccggggctttagtgcatgtgctttacacatgtagctaaggttaaaaaacgtctaggccccccaaccacggggacgtggttttcctttgaaaaccacaatttataat

SEQ ID NO: 799 - DNA, 663 bp, unidentified
  source 1..663: mol_type = unassigned DNA; note = unclassified Hunnivirus sequence
gccctcacctgtcaattgggaccaccactttcagtgaccccatgcgaagtgctgagagaaggaagctttcttacccttcatttgtgaacccactagtctaagccgcttggaatacgatgagtggaaaagttcattctaaatggagtgaaacatgcttaatttttctagtcaggcacacccttgtgtgtctgagcgccactgtcttggcgtaagtcttcagagtgtcacgccgtgcttgcggatctcacgtggcacatgacgaggctctcgctggaactgtgagtctggaacaagtgaagtaacagtgaaaagtgcatgatcacacattgtgtgggctatgagcctgcggaacaacaactggtaacagttgccccaggggccgaaagccacggtgttaacagcaccctcatagtttgatccatcccaggatggtgatgttgtgtacctagtaattgccaatttgcttgttttggtatcatggcataccggagagtttgcgggtgaaggatgcccagaaggtacccgtaggtaaccttaagagactatggatctgatctggggccctgtctggagtgctttacacacagctcagggttaaaaaacgtctagcccgcatcaacccgagggattcgggttttccctttaaaaacccgactggcattt

SEQ ID NO: 800 - DNA, 663 bp, Enterovirus C
  source 1..663: mol_type = genomic DNA
tttaaaacagcctgggggttgttcccacccccagggcccactgggcgttagtactctggtatcgcggtaccttagtatgcctgttttatgtctcctttcccccgcaactttagaagtaatcaagttatggctcaacagtcgccacacccccagtgtggttccgagcaagcacttctgttccccggttgcgtcttatatgctgtgtgaacggcagaaagggacaatatcgttatccgctcaactactacgggaagcctagtaccaccatggattgacctgaaagttgcgttcagcgcacccccagcgcagctcaggccgatgaggctccgaataccccacgggcgaccgtgtcggagcctgcgttggcggcctgcccacgttgcaaaacgtgggacgctcatttcatgacatggtgcgaagagcctactgtgctagttgagagtcctccggcccctgaatgtggataatcctaaccactgaacctacgggcgcaaaccagcgtctggtaggccgtaacgcgcaagtcggtggcggaaccaactactttgggtgtccgtgtttccttttatctttttgaatgtttatggtgacaattgttgtgtacagttgttaccatagtttgcattcagaaataaacctaacactttccaattatttgttaca

SEQ ID NO: 801 - DNA, 664 bp, Tottorivirus A
  source 1..664: mol_type = genomic DNA
cccctttacgtaactgcaacttaaagagtaccctactgcattggatgtgtggtaaacttttacgcacacatttgtagtagtgttagttatgttctacctaatgagtatgcatgcacccgtcgaaacacgcttgtgataagataggtgagtccatgtgactaatctcattaagataaataagcaccctacaacgcacggcacgctcgtgtcttccgtgcggggccgggacaacagcggcctaaatcttctaggtgaccaccatgcttttgggactatggcaccactgtggacgtgagtacctggcagtaagtctgtgaaaagatggaaggtgtcccaagctatggggcgtatgcatatagcctgcggaacaaacaacggcgacgttgtccccagggcccaaaaggcacgtggataagatccacctatatgtttaccccatagtgtaagtcactggaagtcctagtaatggatgtctggagtaaggctcacggggtagggcgaaggatgcccagaaggtacccgtaggtaaccttaagagactatggatctgatctggggaccggatggcgccatcaccatgacgtggaggccggtttaaaaaacgtctaagcccgaccaacaacctaggggactaggttttccttttttattcatgtatgacgtt

SEQ ID NO: 802 - DNA, 664 bp, unidentified
  source 1..664: mol_type = unassigned DNA; note = unclassified Enterovirus sequence
ccacgcggcgttagtactctggtatcacggtacctttgtatgcctgttttatctcccttcccccgtaacgttagaagaaaacacaaccgacaactagcagattcaccaatccaggtgagtcttcgtcaagcacttctgtttccccggacttagtaccaataggctgtacccacggctgaaggggaaaacgttcgttatccggctacctacttcgagaagcctagtaccaccattgaatgtctcaagtgttacgttcagcacaaccccagtgtagttcaggtcgatgagtcaccgaattccccacgggcgaccgtgtcggtggctgcgttggcggcctgcctgcgggtttcacccgcaggacgcttgattcatgacatggtgcgaagagcctattgagctaggtagtagtcctccggcccctgaatgcggctaatcctaaccacggagccatgcgttacaatccagtaacgttgtggtcgtaacgagtaattctgtggcggaaccgactactttgggtgtccgtgtttcctgttttactcattttggctgcttatggtgacaatctagggttgtcatcatatagcgattggattggccatccggatttgtctttgtgtgatttatctcttgctcacaagcaattttcataggtcatagcatcatc

SEQ ID NO: 803 - DNA, 665 bp, Tremovirus B
  source 1..665: mol_type = genomic DNA
ttcaaatggcccctgggttgatacccagtggtcatttggacactttggtaaggaggtgtaattatccttcccatgtggaacctagtgcttaggtttactttatatgttctttgtttgtcctttgtactttctatcgggcaatcttgttgttcaatacaatatgtatttgaactgcctaagataaattcagttttcaaccaacccctctcttggggttgtgtctttctttctttcttatatcctcttaagctgacttacttgctaatccgactcctcgtcaacgggagggtaaagcagtatcactagggtattgtgatgtaggagaaaaagtaagtagagatagtgcatgtaacgaaagtgacttggtactttaaactctcttaatcccaaagtgtggtattggtcatgttggagtaggctacgggtgaaactccttcacatttagtaatgtgttcacacgctaacgctacggtagatgacagactaggtcttattctcaacgtagggggacgggtgtatgttcatgattagccacatattaaggttttgaggggctgagtcatataagtatgtgcattaatttctggtactggtccctggggactggcccttttctaggttgattttagtttccccaatttttaaaaactaatgagatttacgac

SEQ ID NO: 804 - DNA, 666 bp, unidentified
  source 1..666: mol_type = unassigned DNA; note = unclassified Hunnivirus sequence
cggcggctgagatgatgttcattctaatggagtgaaacatgtctttgattttctagtgcgtgttaggctttctagcacgcagcggcactgtcttgccgtaactctccagaccgtcacgccgtgcttgcggatctcacgtgccggatgacaaggctgtagctggaactgagtgtctagtgcacattgtgtaacagtgaaaactttgtgatcaccgaaaggtgggctagtagcctgcggaacaacaactggtaacagttgcctcaggggccaaaagccacggtgttaacagcaccctactagtttgatggaagcaattcctgatgttgcagagctagtaattgccaagctttgtacattagtatctcggcataccgtgcagtctgtgccagtgaaggatgccctgaaggtacccgtaggtaaccttaagagactatggatctgatcaggggctctctccgtactgctttacaggcggctgagagttaaaaaacgtctagctggccccagcccaagggattgggctttccctttaaagcccacaactcgcatatggtgacaataattgctgttcagacgaacagtgttattgttgtctattctcagagctttttccagacgcactcacacaacggaacttcttggcaagcaaatccaacaacagtcaat

SEQ ID NO: 805 - DNA, 666 bp, Senecavirus A
  source 1..666: mol_type = genomic DNA
tttgaaatggggggctgggccctgatgcccagtccttcctttccccttccggggggttaaccggctgtgtttgctagaggcacagaggggcaacatccaacctgcttttgcggggaacggtgcggctccgattcctgcgtcgccaaaggtgttagcgcacccaaacggcgcacctaccaatgttattggtgtggtctgcgagttctagcctactcgtttctcccccgaccattcactcacccacgaaaagtgtgttgtaaccataagatttaacccccgcacgggatgtgcgataaccgtaagactggctcaagcgcggaaagcgctgtaaccacatgctgttagtccctttatggctgcaagatggctacccacctcggatcactgaactggagctcgaccctccttagtaagggaaccgagaggccttcgtgcaacaagctccgacacagagtccacgtgactgctaccaccatgagtacatggttctcccctctcgacccaggacttctttttgaatatccacggctcgatccagagggtggggcatgacccctagcatagcgagctacagcgggaactgtagctaggccttagcgtgccttggatactgcctgatagggcgacggcctagtcgtgtcggttctataggtagcacatacaaat

SEQ ID NO: 806 - DNA, 666 bp, Enterovirus H
  source 1..666: mol_type = genomic DNA
ttaaaatagctgctgggttgttcccatccagcaggcccactgggcgtgatactctggtattgcggtacctttgtatgcctattttacctcccttccccctgaaacttagaagaaagaaacaaacacgctcactaggtacactgcatccagcagtgtaatgagcaagcacttctgtttccccggaagggatatatggtacgctgtgcaaacggcggaaattaatcctaccgttaaccgcccatctactccgagaagcctagtacctaattgaacttatcaatggagttgcgctcagcaggtgaccctgacctgccagctccggctgatggacctgggcatcccccacaggcgactgtggcccaggtcgcgtggcggccggcccactcttttgagtgggacgccttgataatgacaaggtgggaagagcctattgggctagctggtttcctccggcctcctgaatgcggctaaccctaaccccggagcatatggtggcaacccagccactggtatgtcgtaacgcgtaagtctgggatgggaccgactactttggagagtccgtgtttccattattttctttattgaatcttatggtgacaaattgggagttactcgggtgacgattgattattacttctgaaaacgtagagatatagaatcaacaca

SEQ ID NO: 807 - DNA, 667 bp, unidentified
  source 1..667: mol_type = unassigned DNA; note = unclassified Rosavirus sequence
gggtttctctgccctgtgctttggacgcccgccatggcgttaaactggcaatccccccttttccctacccgtaactaagtttttcctcggtcctttaggctgctaagacgcttgttgctacagcatattggaaccaccgagtcctccataagtaatcatttccacctctttgggtgtctatgcccttagagacggtttggagccccgttgactatgtcagagtgtgtcggtagcaggctttctgctctggacccatgccggccacacctcccagtagtgttgtgaaggaagtaagggattagtgaaaagattaggaatgttgccttggaatgtagcgattactgtaggtgagcggacttccccgggtggtaacacccgcctctcaggccaaaagccacggtgttaacagcacccctacagtaggccactaccccgtggtctccaagaatacagacctcttcttagtaactatccccctagctttcctgaagcatgctgctgtaaaggctaaggatgccctgaaggtacccgcaggtaacgttaagacactgtggatctgatcaggggcttgagtactgaagctttacagaagtagctcaagttaaaaaacgtctatgcctttcccccacgggagtgggggttcccccacacaatttcaacaggcact

SEQ ID NO: 808 - DNA, 667 bp, Mischivirus D
  source 1..667: mol_type = genomic DNA
ttatttttcaaaatgccactggcattacaccatattcgtatggtgtaatgtcagtggttggatgctcagtcctgagggactgtgcatccagtggttaagagccacattctttatttatcaactattgatctttgtaactaagtttaagccagagttctattatggttccacatccagtgggattcagaacaagtacttctgttaccccggtcattattagctgttaagacgtacccacgtctgaaggctgagaagatcgttacccggctgttgtctacgggaaggttagtaacttttagtgaaaggtgatttcattgatccgagaggtgaccccgacctctcagaaactagtgatgagtgtccacatccctcttatggtaacataaggtggtcgctgcgctggcactagggcccaaaaggcatgaatgaaccaagatctgattgtgaagacccaactgtgcacttcagtattcctccggcccctgaatgcggctaatcctaacccatctgcatgtgcctacaacccagtaggtagcatgtcgtaatgcgtaagagatggatggaaccgactactttgggtgaccgtgtttcttttatttttatcaagtctcttatggtcacaagcatagaaaacaagatgcctgtgatcacacgtgagacatccaat

SEQ ID NO: 809 - DNA, 667 bp, unidentified
  source 1..667: mol_type = unassigned DNA; note = Human parechovirus 17 isolate 157Chzj058, complete genome.1 sequence
cttgtttccactcattttattgcaagttgccttcaactagtggagaccaggcatgaggttaatgctataatcttagatgtttgttacagttgaggtttttattaacctcatgcctggtctccactagttgaaggcaacttgcaataaaatgagtggaaacaagacgcttaaagcatggtgtaaattagcttttctaacccacactttgtgtggggtggcagatggcgtgccataactctattagtgagataccacgcttgtggaacttatgctcacgcagccatcctctagtaagtctgtgagatgtctggtgacgtgtgggaacttattggaaacaacattttgctgtaaagcatcctattgccagcggaacaacacctggtaacaggtgcctctggggccaaaagccaaggtttaacagaccctttaggattggttcataacctgaaatgttgtggaagatacttagtacctaccgatctggtagtattgcagacactagttgtaaggcccacgaaggatgcccagaaggtacccgtaggtaacaagagacactatcgatctgatctggggccaggtacctctatcttggtggcctgttaaaaaaacgtttggggggccagcccggggggggtccccgggtttcttttatcttacaactgctata

SEQ ID NO: 810 - DNA, 668 bp, unidentified
  source 1..668: mol_type = unassigned DNA; note = unclassified Picornaviridae sequence
ctgtctcttatacagatgtcagtcagccaacaggctggctgggatgtgcccattttggacgcatgcccccgcgagagtggggcaccttgggggcgggtgagccccccatgttcgccaggtgttactgtcggcccttttatagaggcttttgtgggtatcagaagccgtttttgggtttggtgatggcgaccagcattgtcttgctggttgtgactgtctttttctcctgtttcttttcttattatctccaggctgtctccatgccaatgctgctaccgctgcgcccggcggggttaacccctggattagccaggggctgtggccgctagaagtggagatgcggtgactaatgtagtgtcatgggtaattgatgaggtcatggctgtggtgtggattggtgatcttccattgggggtaggctacgggtgaaacccccacgattgcaccatactatgtatggtgtccggtggtacgtgaaccccctggataggtttgagttttacgacaagaaagcctcaacagggagcgcaggcacggtacgcgtggatgcgccctccactaagcagtcatgcatcatttgttgtctgtcacactactaagccgtaccctatgagtttagggctactcaggggcatttaggtttttaaagcgcatgttgtaaatcactt

SEQ ID NO: 811 - DNA, 671 bp, Parechovirus A
  source 1..671: mol_type = genomic DNA
cgtcgggccttataccccgatttgctgagcttctctaggagagtccctttccccagccagaggtggctggtcaaataataccaattgtaacaaaacatctaagatacaacaaccacacacctggtctccaccagtcgaaggcaactagcaataagataggtgggttgagacgcttaaagtgtgtagtacatttacttttccaacctgtgctttgcacagggtggcagatggcgtgccataactctaatagtgagataccacgcttgtggaccttatgctcacacagccatcctctagtaagtttgcaagacgtctgatgacgtgtgggaacttgttggaaataatagtttgctgtaaagcatcccattgccagcggaatcacatctggtaacaggtgcctctggggccaaaagccaaggtttaacagaccctttgggattggttcaaacctgaactattatggaaaatatttagtacctgccgatttggtagtagtgcaaacactagttgtaaggcccacgaaggatgcccagaaggtacccgtaggtaacaagtgacactatggatctgatctggggccaactacctctatcttggtgagttggttaaaaaacgtctagtgggccaaacccgggggggaccccggtttccttttatttaataatgccact

SEQ ID NO: 812 - DNA, 672 bp, unidentified
  source 1..672: mol_type = unassigned DNA; note = unclassified Picornaviridae sequence
gggagagcttattgctctcccgccgtcttgcctatctataggtccaatctgtgtgatattccctaattaattaggtttgtcagttttcagatggatataatagtcattaatttatatttaatcatattagttcaaagggctataacttacccctgaatagtaacaaaatataaaatactcggtaccgaccggggtccgatctaatactaattattatatgatttgaccttatgataagttcaagaagtttctcttgattccagataaacccccctggaatttccccttatctttttcatataataactagtaatttcggatgcataaatactagttgtaagtcaaggtataattattaaaccgaacatttaattacttattagcactaatgaatgcccccatataaatagttatgggtatgagttcgcgattttcaacaacgatgcatgatttagagtaatgttaataagtgattttattagtaaagttttctaatgtatatgtcggcagttgcctacaacacgttaacctctgtgttaaaacctcgatgatatgtttatccatagacttcgggcatatacttctaaagtatgcgtgttcttctgaaaactcggtatgattgtcgcatgagtaagatagcgttccaatcaattccttttaatttctttcacg

SEQ ID NO: 813 - DNA, 672 bp, unidentified
  source 1..672: mol_type = unassigned DNA; note = unclassified Senecavirus sequence
ccctttttgaatggggggctgggccctcatgtccagcccttcctttccccttccggggggtaaaccggctgtgtttgctagaggcacagaggagcaacatccaacctgcttttgtggggaacggtgcggctccaattcctgcgtcgccaaaggtgttagcgcacccaaacggcgcatctaccaatgctattggtgtggtctgcgagttctagcctactcgtttctcccctgctcactcatttacacacaaaaactgtgttgtaactacaagatttggccctcgcacgggatgtgcgataaccgcaagactgactcaagcgcggaaggcgctgtaaccacatgctgttagtccctttatggctgcgagatggctatccacctcggatcactgaactggagttcgaccctccttagtaagggaaccgagaggccttcccgcaacaagctccgacacagagtccacgtgattgctaccaccatgagtacatggttctcccctctcgacccaggacttctttttgaatatccacggctcgatccagagggtggggcatgatccccctagcatagcgagctacagcgggaactgtagctaggccttagcgtgccttggatactgcctgatagggcgacggcctagtcgtgtcggttctataggtagcacatacaaat

SEQ ID NO: 814 - DNA, 672 bp, Enterovirus C
  source 1..672: mol_type = genomic DNA
tttaaaacagcttgagggttgttcccaccctcaaggcctactgggcgctagtacaccggtatctcggtacccttgtacgcctgttttatcttccctccccaaaagtaactttagaagcaagtaaactcacagctcaatagccgtcgcaccgccagtgcgactatgagcaagcactcctgtttccccggttgcgtcctatatgctgtggaaacggcagaaggggacaatatcgttacccgcttatctactacgggaagcctagtaacaccattgaacactttgagggttgcgttcagcgccaaacccggcgtagctcaggccgatggggcttcggaatccccacgggtgaccgtgtcgaagcccgcgttggcggcctgcccacaccaatgggtgtgggacgctcaatttgtgacatggtgcgaagagcctactgtgctaggtgagagtcctccggcccctgaatgtggctaatcccaaccaccgaacccgtggttgcaatccagcaactagcgggccgtaatgcgcaagtcggtgacggaaccaactactttgggtgaccgtgtttcctttatctcttatattgcaattttatggtgacatttatagtatttaagtgttaccatatattgcgcaaacatattgtaataatacagagttactactgcagaaatc

SEQ ID NO: 815 - DNA, 673 bp, Harkavirus A
  source 1..673: mol_type = genomic DNA
taaaaggggacgcggtgtggcagctttggctgtcatgccgtgttctccttttaccccaaggactagccttgggggttttccaaattcctttccctgtaggctttacttctctttatctatcttttctgtaactaagttttgcctattctaaaaatattttagaatgtgtttggatgtaactaagtttgtgcctgccctaaaaatattttagggcttgtttggataacctcgtcccttgtgttcagtgccgcacaatttgctaggcactgttcacttcctttgtttgtccattatgtatgctaaggtatgaattccatcatatgcttagcctctacatgcataatcttattccctccctggtgcaaactacgcccccaacatatgtgaatcttttaagcatattcctgaccccacacatatatatgtgttctcgtgaattcccccaccgtgaggtggtcacttggacgtggtgtgtgtcacacagcatatatatgatgcaggatgttgtttttaagataagcatatgtccttagtgctttgcatcatttcctccacaccccgtgaatgcggctaatcttaaccctgttgggtccgtgggtaaaccaacccattaaccacaggacggaaccgactactttcgggagtgtgtgtttctttttcttcttttgtcact

SEQ ID NO: 816 - DNA, 673 bp, unidentified
  source 1..673: mol_type = unassigned DNA; note = unclassified Enterovirus sequence
agggcccacgtggcgtagtactctggtatcacggtacctttgtacgcctattttacccccccttccccattgtaacttagaagataatcaaacagttcaatagtcgggctgccacccaggtagcttactgaacaagcacttctgttaccccggtcttagtacctgagaagctgtacccacggcggaaggggaaagtgatcgttacccggctatctacttcgagaagcctagtaacaccattgaacttgctgagtgttgcgctccacacagtaaccccctgtgtagctttggctgatgagtctgggcattccccactggcgacagtggcccaggctgcgttggcggccaaccgatccaggcaactgggtcggacgctgagtaacggacatggtgtgaagagcctattgagctagatagtagtcctccggcccctgaatgcggctaatcctaaccccggagcaggtacgcacaatccagtgtggagcctgtcgtaatgcgtaagtccgggacggaaccgactactttgggtgtccgtgtttcctgttttatttaccttggctgcttatggtgacaaactagtgttgtcatcatatagcgtttggattggccatccggttttgtacacgagtgtttcactacccgagactctatcacctctaccttattgagaaaa

SEQ ID NO: 817 - DNA, 675 bp, unidentified
  source 1..675: mol_type = unassigned DNA; note = unclassified Enterovirus sequence
gtattggtactggtttatactcccttcccctgtaacttagaagatataaaccaagttcaatagaagggggtacaaaccagtaccaccacgaacaagcacttctgtttccccggtaaagttgcatagactgtacccacggttgaaggcgactgatccgttatccgctcttgtacttcgagaagcctagtaacatcttggaatcttcgatgcgttgcgctcatcactcaaccccagagtgtagcttaggtcgatgagtctggacattccccaccggtgacggtggtccaggctgcgttggcggcctacctgtggtccaaagccacaggacgctagttgtgaacaaggtgtgaagagcctattgagctacaagagagtcctccggcccctgaatgcggctaatctcaaccacggagcaagtgctcacaaaccagtgagtggcttgtcgtaacgggtaactctgtggcggaaccgactactttgggtgtccgtgtttccttttatttttataatggctgcttatggtgacaatcacagattgttatcataaagcgaattggattggccatccggtgaaagtgagatatattatttatctttttgttggatttactccgattacttctttcacttacaaaatcatcaccacagttttgctaattagaaatacataccata

SEQ ID NO: 818 - DNA, 679 bp, unidentified
  source 1..679: mol_type = unassigned DNA; note = unclassified Enterovirus sequence
ggtacctttgtgcgcctgttttatactcccttccccgagtaactttagaagcaattcaacaagttcaatagagggggtgcaatccagcgccaccacaacaagcacttctgtctccccggtgactttacataagctgtacccacggctgaaagtgaatgatccgttatccgcttgtgtacttcgagaagcctagtaccaccttggaatctccgacgcgttgcgctcagcactctaccccgagtgtagcttaggttgatgagtctgggcattccccaccggcgacggtggcccaggctgcgttggcggcctacccatagctaacgctatgggacgctagttgtgaacaaggtgtgaagagccgattgagctactcaagagtcctccggcccctgaatgcggctaatcccaaccacggagcaagtgccttcaaaccagagggtggcttgtcgtaatgcgcaagttcgtggcggaaccgactactttgggtgtccgtgtttccttttattccattactggctgcttatggtgacaatcatagattgttatcataaagcgacttggattggccatccggtgaaatataaacacattgtctacttgtttgtcgggtttaccccactcactcagtccaccctcagcataataaacattgtgtcactgataagatattactactaca

SEQ ID NO: 819 - DNA, 682 bp, Enterovirus B
  source 1..682: mol_type = genomic DNA
ggtacctttgtgcgcctgttttatatacccttccccctctacagtaacttagaagtttgaatcatacggtcaatagacaacccagtgcaccagctgggccctgaccaagcacttctgttgccccggaccgagtatcaataagctgctcacgcggctgaaggagaaaacgttcgttacccggccatttacttcgagaaacctagtaacaccatgaaggtagcgcagcgtttcgctccgcacaaccccagtgtagatcaggtcgatgagccaccgcactccccacgggtgaccgtggcggtggctgcgttggcggcctgcccatggggcaacccatgggacgcttcaatactgacatggtgcgaagagtctattgagctaaatggtagtcctccggcccctgaatgcggctaatcccaactgcggagcagatacccacacaccagtgggcagtctgtcgtaacgggcaactctgcagcggaaccgactactttgggtgtccgtgtttccttttattctcacattgactgcttatggtgacaattgaaagattgttaccatatagctattggattggccatccagtgacaaacagagcaattgtgtatctttttgttggtttcataccactgaactgcaaagttttgaaaacccttgacctcattttgctactcaacacaacaaa

SEQ ID NO: 820 - DNA, 683 bp, unidentified
  source 1..683: mol_type = unassigned DNA; note = unclassified Kobuvirus sequence
tttgaaaagggggtggggggggcctcggccccctcaccctcttttccggtggccacgcccgggccaccgatacttcccttcactccttcgggactgttggggaggaacacaacagggctcccctgttttcccattccttcccccttttcccaaccccaaccgccgtatctggtggcggcaagacacacgggtctttccctctaaagcacaattgtgtgtgtgtcccaggtcctcctgcgtacggtgcgggagtgctcccacccaactgttgtaagcctgtccaacgcgtcgtcctggcaagactatgacgtcgcatgttccgctgcggatgccgaccgggtaaccggttccccagtgtgtgtagtgcgatcttccaggtcctcctggttggcgttgtccagaaactgcttcaggtaagtggggtgtgcccaatccctacaaaggttgattctttcaccaccttaggaatgctccggaggtaccccagcaacagctgggatctgaccggaggctaattgtctacgggtggtgtttcctttttcttttcacacaactctactgctgacaactcactgactatccacttgctctcttgtgcctttctgctctggttcaagttccttgattgtttttgactgcttttcactgcttttcttctcacaatccttgctcagttcaaagtc

SEQ ID NO: 821 - DNA, 683 bp, Foot-and-mouth disease virus
  source 1..683: mol_type = genomic DNA
cccccccataaagaacgttaccgtcttttccgacgttaaagggatgcaaccaaacgcctcttaccgtcctttccgacgttaaaggattgcaaccatacgacttgccttcttttccgaagtaaaaggatacaagcatacagttttgcccgttttcatgagaaatgggacgtccgcgcacgaaacgcgccgttgctctttgcattcttgtacaaacacgatcttgacgcaggaatcctagaccaacccaacccgtgcaactgcgagtttcgcccggtctttccgggtcttgagagacaaacagatgtactgagaccaactccacgattggtctactagcgggtactagtaacactcattttgcttcgtagcggagcacatgagcggtggggactcccccatggtaacatggacccaccgggccaaaagccacgcctcacggcctcatgtgtgtgcaaccccagcacggcaacttgtttgtgaaccacaccttaaggtaacactgagactggtacttggtttctggagacaggctaaggatgcccttcaggtaccccgaggtaacacgagacactcgggatctgagaaggggaccgggagttctatcaaactgcccgatttaaaaagcttctatgcctgaataggtgaccggaggccggcaccttttctttattttaaaccacttt

SEQ ID NO: 822 - DNA, 685 bp, Hepatovirus A
  source 1..685: mol_type = genomic DNA
cttttggagttctttggtctggggaactaaaataccagacccgcgtttgcctagcgatataggctttaattgttgtttgtcattgtgcgtttgatatgtgttttaatgtaaataataattctagcaggttctagttcttgatcatgtcctctttaaggcactcatttcaacttgctatctttcttttcttccttggttctccctacaccaaatgcactggccgctgcgcccggcggggtcaaccacatgattagcatgtggctgtaggtgttgaaggctgggacatgaacatcaatggaatagtgcgcatgcttactggggtccattgaagtagtgggatctttctattggggtaggctacgggtgaaaccccttaggttaatactcatattgagagataccttggataggttaactgtgctggatatggttgagtttaacgacaaaaagccatcaacagctgtggacagaacctcatccttagattgctcactatggatatgtgctctgggcgtgtttcttgcatgatggccattggtcaattcatgcctgggccaatgtaggattagccttaaattactttttaaaagtagcctcatttagctggactaatggtggggcgtatgatcctgcatttggcctctggggtaatcaggggcatttaggtttccacataatagcaaat

SEQ ID NO: 823 - DNA, 686 bp, Enterovirus C
  source 1..686: mol_type = genomic DNA
caccccagaggcccacgtggcggccagtactctggtatcacggtacctttgtacgcctgttttatatcccttccccatgtaactttagaagcaattcacatagttcaatagagggggtacaaaccagtgccaccacgaacaagcacttctgtttccccggtgaagctgtatagactgtccccacggtcaaaaacggcagatccgttatccgctcatgtacttcgagaagcctagtagcatcttggaatcttcgatgcgttgcgttcagcactctaccccgagtgtagcttaggtcgatgagtctgggcataccccaccggcgacggtggcccaggctgcgttggcggcctacccatggctaacgccatgggacgctagttgtgaacaaggtgtgaagagcctattgagctacatgagagtcctccggcccctgaatgcggctaatcctaaccacggagcaagtactcacaacccagtgagcagcttgtcgtaacgcgtaagtctgtggcggaaccgactactttgggtgtccgtgtttccttttatttttgatatggctgcttatggtgacaatcaaagattgttatcatatagcttttggattggccatccggtgatttttgagactataacgtttacttgccttaccacacaacttagtactttgctacattcacacagtcata

SEQ ID NO: 824 - DNA, 687 bp, Enterovirus B
  source 1..687: mol_type = genomic DNA
tggtatcacggtacctttgtgcgcctgttttatctacccctccccaatgtaatttagaagcatatgaaaagcggtcaatagccggctcagtatgccaactgagtcttgaccaagcacttctgttaccccggactgagtatcaataagctgctcgcgcggctgaaggagaaaacgttcgttacccggccaattacttcgagaaacccagtaccaccatggaggttgcgcggcgtttcgctccacacaaccccagtgtagatcaggtcgatgagtcaccgcgttccccacgggcgaccgtggcggtggctgcgttggcggcctgcccatgggttagcccatgggacgcttcaatactgacatggtgcgaagagtctattgagctaattggtagccctccggcccctgaatgcggctaatcctaactgcggagcagacgcctacatgccagtgggtagtctgtcgtaacgggcaactctgcagcggaaccgactactttgggtgtccgtgtttccttttatctttgtattggctgcttatggtgacaattgaaagattgttaccatatagctattggattggccatccagtgacaaacagagcgattgtttactcatttataggttttgtaccacttgactacaaggccctaatcactctcaattatatattgatactaaatacgacaaa

SEQ ID NO: 825 - DNA, 687 bp, unidentified
  source 1..687: mol_type = unassigned DNA; note = unclassified Enterovirus sequence
tggtatcacggtacctttgtgcgcctgttttatttaccctctccccagtgtaacttagaagcacgcttcatgcggtcaataggcggctcagtataccaactgagtctcgaccaagcacttctgttaccccggaccgagtatcaataagctactcacgtggctgaaggagaaaacgtccgttacccggccaactacttcgagaaacctagtaccaccatgaatgttgcgcggcgtttcgctccgcacaaccccagtgtagatcaggtcgatgagtcaccgcatccctcacgggcaaccgtggcggtggctgcgctggcggcctgcctatggggcaacccataggacgcttcaatacggacatggtgagaagagtctattgagctagttggtagtcctccggcccctgaatgcggctaatcctaactgcagagcagattcccacacgccagtgggtagtctgtcgtaacgggcaactctgcagcggaaccgactactttgggtgtccgtgtttccttttattcttgtactggctgcttatggtgacaattgaaagattgttaccatatagctattggattagccacccagtgtctaatagagcaattatttatctttttgttggatttatcccacttgactataaagcacttgtaacgctcaagtatattatagatctcaacacaacaa

SEQ ID NO: 826 - DNA, 689 bp, Enterovirus C
  source 1..689: mol_type = genomic DNA
ttcccactccagaggcccacgtggcggctagtactctggtattgcggtacctttgtacgcctgttttataccccctccccaagtaactttagaagcaattcacaaagttcaatagagggggtacaaaccagtaccaccacgaacaagcacttctgtttccccggtgaagctacatagactgtccccacggtcgaaggtggcagatccgttatccgctcaagtacttcgagaagcctagtaccaccttggaatcttcgatgcgttgcgctcagcactctaccccgagtgtagcttaggtcgatgagtctgggcatgccccaccggtgacggtggcccaggctgcgttggcggcctacccgtggctaacgccatgggacgctagttgtgaacaaggtgtgaagagcctattgagctacttgagagtcctccggcccctgaatgcggctaatcctaaccacggagcaagtgctcacaaaccagtgagtggcttgtcgtaacgcgtaagtctgtggcggaaccgactactttgggtgtccgtgtttccttttattttcattatggctgcttatggtgacaatctaagattgttatcatatagcttttggattggccatccggtgatttgaaagagatatatttaccttattgttctaccatatctaattactcatcacagccacataatcaca

SEQ ID NO: 827 - DNA, 689 bp, unidentified
  source 1..689: mol_type = unassigned DNA; note = unclassified Enterovirus sequence
gacagttgggtagcattgtgcgcctgttttatacaccctttcccacaatgcaacttagaattataactaaaccggccaatagaaagctcggcaaaccagccgagttctggtcaagcacttctgttgccccggactgagtatcaataagctgctcgcgcggctgaaggagaaaacgttcgttacccgaccaactacttcgagaaacccagtatcaccatgaaagctgcgtagcgtttcgttccgcacaaccccagtgtagatcaggccgatgagtcaccgcaatccccacgggcgaccgtggcggtggctgcgctggcggcctgcccatggggcgacccatgggacgcttcaataccgacatggtgtgaagagtctattgagctagttggtagtcctccggcccctgaatgcggctaatcccaactgcggagcagacgcttgcataccagcaagtagtctgtcgtaacgggcaactctgcagcggaaccgactactttgggtgtccgtgtttccttttattttttatactggctgcttatggtgacaattgaaagattgttgccatatagctattggattggccatccggtgacgaacagagctatcatatactcttttgttgggtttgtcccattgaactacaaggcattgaataccctcaatttcattctagcactaaatacaataaa

SEQ ID NO: 828 - DNA, 691 bp, unidentified
  source 1..691: mol_type = unassigned DNA; note = unclassified Cosavirus sequence
tggaatactgcaaagatgtcaccgtgctatacacggtctttgaaccacacaccggctacttggcacttgcagcgcagtaagtttattttccacttatccttgatttttagccgtacagtttctctctgcatgggcggcgtgatactcccgttccttcttggacagattgcctccgcgttctctgtggatctcaaggtggtcaagtcactggtgagtagagcgaaggttaaggagatctgaggcattcccacgtggcgttgccgggagttgtagcaatgctgcgtgtgtgtacggatctcgcctcatggcgtcatgagcctcacacgccaaaagctctgtccgagaggacctacacagtcgagcaaccctagctccttcctacaaagccttgtgtgaatgagctcacgtttactcaactttattctctactcacatcaggcgccaaagatgtcttgaaggtacctcgtgtatctgggcacgagcaccatcgactacccggacttgcacttcggtgcagacacatgtggtgtcccagcccccttgctccggcaagggggctctgctcgctcagcacgagatctgatcaggagtctcccccggtgtaaagcaccttgacagggatttaaaaattgaccaaggccttgcacacaacctaggggactaggttttcctttttatttacaaggttttc

SEQ ID NO: 829 - DNA, 693 bp, Enterovirus A
  source 1..693: mol_type = genomic DNA
gttgtacccactcacagggcccactgggcgttagcactctggtaccccggtacctttgtgcgcctgttttatatccccccaagtaatgcacctcgatcaatagcgggcgtggcgcaccagccacgtcatgatcaagcacttctgtttccccggaccgagtatcaatagactgctaacgcggttgagggagaaaacgtccgttacccggccaactgcttcgagaaatccagtaacatcatgaaaattgcagagtgtttcgctcagcacttccccagtgtagatcaggtcgatgagtcaccgcgttccccacgggcgaccgtggcggtggctgcgttggcggcctgcctgtggggcaacccgcaggacgctctaatatggacatggtgtgaagaatctattgagccagttggtagtcctccggcccctgaatgcggctaatcctaactgcggagcacgcgccttcaatccagtgggtagcgtgtcgtaatgggtaactctgcagcggaaccgactactttgggtgtccgtgtttccatttattcttacattggctgcttatggtgacccatatagctattggattggccatccggtatcgaatagagcgattatctatcagtttgttggatttattccgttgagtgtgcagcagtatcgcactttgcttttaatagtgagactgaatagtgcaaa

SEQ ID NO: 830 - DNA, 693 bp, Enterovirus A
  source 1..693: mol_type = genomic DNA
ctgattctgcggaatctttgtgcgcctgttttatactccctcccccaacacagtaacttagaagtcataaactcacatgaccaatagtgggcatgacgcaccagtcatgtctcggtcaagcacttctgtctccccggactgagtatcaataagctacttgcgtggctgaaggagaaaacgttcgttatccggctaactacttcgagaagcttagtagcaccatgaaagttgcggagtgtttcgctcagcacttcccccgtgtagatcaggtcgatgagtcactgcgttcctcacgggagaccgtggcagtggctgcgttggcggcctgcctatggggcaacccataggacgctctaatatggacatggtgtgaagagcctattgagctagttagtggtcctccggcccctgaatgcggctaatcctaactgcggagcacataccctcaacccagggggcagtgtgtcgtaacgggcaactctgcagcggaaccgactactttgggagtccgtgtttccttttattcttatattggctgcttatggtgacaattgagagattgttaccatatagctactggattggccacccggtgtctaatagagccctggtttaccaatttattggatttgtgcctttatcacccacagtttattcaaccttagtatttttgatatatcttaacaataggcg

SEQ ID NO: 831 - DNA, 693 bp, Enterovirus C
  source 1..693: mol_type = genomic DNA
tacgttatcgcggtacccttgtacgcctgttttatactcccttcacccgtaacttagaagcaagcaaaccaagttcaatagaagggggtacaaaccagtaccaccacgaacaagcacttctgtttccccggtgaggttgcatagactgtacccacggtcaaaagcgattgatccgttatccgctctagtacttcgagaagcctagtatcaccttgggatcttcgatgcgttgcgctctgcactcgaccccggagtgtagcttaggtcgatgagtctggacacccctcaccggtgacggtggtccaggctgcgttggcggcctacctgtggcccaaagccacaggacgctagttgtgaacaaggtgtgaagagcctattgagctaccagagagtcctccggcccctgaatgcggctaatcccaaccacggagcaagtgctctcaaaccagagagtggcttgtcgtaacgcgcaagtctgtggcggaaccgactactttgggtgaccgtgtttccttttatttttatcatggctgcttatggtgacaatctcagattgttatcataaagcaaattggattagccatccggtgaaagtcaaatcgattatttacttatttattggtttttctccactaacaccacaaacacttaaaattattgaaatagtgctgctaattagataccactatcata

SEQ ID NO: 832 - DNA, 694 bp, unidentified
  source 1..694: mol_type = unassigned DNA; note = unclassified Enterovirus sequence
cgtcgaccggggagacagaagtgcttgaccttatacagctggtatgctgcttgctattggtctgtgtgcaaaacttctaagttaaaattgggtctgggttgctcccacccagatcacccacgtggtgttgtgctctgttattccggtaactttgcacgccaattttataaccccttcccccatgtaacttagaagttttgcacacagaccaatagcaagcagcataccagctgtataaggtcaagcacttctgtctccccggtcgacgttgatatgcttcaacaaggcaaaaacaacagagatcgttatccgcaagatgcctacacaaagcctagtacctcctttgacggtgtttgtctggtcgctcaggtgcttccccagcactagacctggcagatgaggctagaaactccccactggcgacagtgttctagcctgcgtggctgcctgcacacccttctgggtgtgaagccaaatactagacaaggtgtgaagagccccgtgtgctcatcttgagtcctccggcccctgaatgcggctaaccttaaacccgcagccattgctcacaatccagtgggtagatggtcgtaatgagcaattgtgggatgggaccgactactttgggtgtccgtgtttcatgttttactttatgatttgcttatggtgacaatatatagtgatatatattggcatc

SEQ ID NO: 833 - DNA, 694 bp, Enterovirus C
  source 1..694: mol_type = genomic DNA
tccggtattacggtacccttgtacgcctgttttatactcccctcccccgtaacttagaaaacttcaaaatcaaagttcaataggagggggtacaaaccagtaccaccacgaacaagcacttctgtttccccggtgatgttgtatagactgtctccacggttgaaaacgactgatccgttatccgctctagtacttcgagaagcccagtaccaccttggaatcttcgatgcgttgcgctcagcactcaatcccagagtgtagcttaggttgatgagtctggacatccctcaccggcgacggtggtccaggctgcgttggcggcctacctgtggcccaaagccacaggacgctagttgtgaacaaggtgcgaagagcctattgagctactagagattcctccggcccctgaatgcggctaatcccaaccacggagcaggtactcacaacccagtgagcagcctgtcgtaacgcgcaagtctgtggcggaaccgactactttgggtgtccgtgtttccttttatttttatatggctgcttatggtgacaatcattgattgttatcataaagcgaattggattggccatccggtgaaagttagacttatcatttacttgtttgttggattcactcctttgactaaattcacccctgacatcatcttagttgtgatactgattaggagacttcatcata

SEQ ID NO: 834 - DNA, 695 bp, Enterovirus A
  source 1..695: mol_type = genomic DNA
tctgattctgcggaatccttgtgcgcctgttttatatcccctttcccaatttgaaacatagaagtgatgcgcaccattgatcaatagtaggcgtaacgcgccagttacgtctcgatcaagcacatctgtttccccggaccgagtatcaatagactgctcacgcggttgaaggagaaagcgttcgttacccggctaactacttcgagaaacccagtagcaccatggaagctgcagggtgtttcgctcagcacttcccccgtgtagatcaggtcgatgagccactgcaatccccacgggcgaccgtggcagtggctgcgttggcggcctgcctatggggagacccataggacgctctaatgtggacatggtgcgaagagtctattgagctagttagtagtcctccggcccctgaatgcggctaatcctaactgcggagcacatgccttcaacccagaaggtggtgtgtcgtaacgggcaactctgcagcggaaccgactactttgggtgtccgtgtttcctttcattcttatatcggctgcttatggtgacaattacggaattgttaccatatagctattggattggccatccggtgtgtaatagagctattatatatctgtttgttggctttgtgccattaactttaaagtctacaactactcttgattttatattgaccctcaacacagttaaac

SEQ ID NO: 835 - DNA, 696 bp, Cardiovirus A
  source 1..696: mol_type = genomic DNA
ttgccagtctgctcgatatcgcaggctgggtccgtgactacccactccccctttcaacgtgaaggctacgatagtgccagggcgggtactgccgtaagtgccaccccaaacaacaacaacaaaacaaactccccctccccccccttactatactggccgaagccacttggaataaggccggtgtgcgtttgtctacatgctattttctaccgcattaccgtcttatggtaatgtgagggtccagaacctgaccctgtcttcttgacgaacactcctaggggtctttcccctctcgacaaaggagtgtaaggtctgttgaatgtcgtgaaggaagcagttcctctggaagcttcttaaagacaaacaacgtctgtagcgaccctttgcaggcagcggaaccccccacctggtgacaggtgcctctgcggccaaaagccacgtgtataagatacacctgcaaaggcggcacaaccccagtgccacgttgtgagttggatagttgtggaaagagtcaaatggctctcctcaagcgtattcaacaaggggctgaaggatgcccagaaggtaccccattgtatgggatctgatctggggcctcggtgcacgtgctttacacgtgttgagtcgaggtgaaaaaacgtctaggccccccgaaccacggggacgtggttttcctttgaaaaccacgattacaat

SEQ ID NO: 836 - DNA, 697 bp, Enterovirus B
  source 1..697: mol_type = genomic DNA
ctagcactccggtattgcggtacccttgtgcgcctgttttatcctccctccccctaacgtaatttagaagcaagactttaacggtcattaggtggctcagcacaccagccgagtcaagaccaagcacttctgttaccccggactgagtatcaataagctgctcacgtggctgaaagagaaaacgttcgttacccggccaattacttcgagaaacctagtaccaccatggaggttgcgcagcgtttcgctccgcactaccccagtgtagatcaggtcgatgagtcaccgcattccccacgggcgaccgtggcggtggctgcgttggcggcctgcccatggggaaacctatgggacgcttcaatactgacatggtgtgaagagtctattgagctaattggtaatcctccggcccctgaatgcggctaatcctaactgcggagcagacacccacaagccagtgagcagtctgtcgtaacgggcaactctgcagcggaaccgactactttgggtgtccgtgtttccttttattccattactggctgcttatggtgacaattgagagattgttaccatatagctattggattggccatccggtgagcaacagagcacttatatatctctttgttggattcataccactagacaccaggagttttacgtctttggtttatattttaaggttgaacacagcaaa

SEQ ID NO: 837 - DNA, 697 bp, unidentified
  source 1..697: mol_type = unassigned DNA; note = unclassified Enterovirus sequence
aacagaagtgcttgaccattgacaatttggttaattgccgcctattggtcgttatgtactttcttctaagttacaaggggggggtgttaaaactggatctgggttgttcccactcaggtctcccacgtggagttgtactctattattccggtaatcttgtacgccagtttttacacccccccccttgtaacttagaagaaagtacataacgaccaataggcggcaattaaccaaattgtcaatggtcaagcacttctgtttccccggtcaagattgatacgctccaacagggcgaaaacaatcgagatcgttatccgcaaagtgcctacgcaaagcttagtaacattttggaaagtttatggttggtcgctcagctaaaccccatagtagacctggcagatgaggctagagactccccactggcgacagtgttctagcctgcgtggctgcctgcacaccctcacgggtgtgaagccatatactcgacaaggtgcgaagagccccgtgtgctcactttgagtcctccggcccctgaatgtggctaaccttaaccccgcagctagcgcatgcaaaccagtatgtagctagtcgtaatgagcaattgtgggatgggaccaactactttgggtgtccgtgtttcactttttaccttttatttgcttatggtgacaatatatatatagtatatattgacacc

SEQ ID NO: 838 - DNA, 697 bp, unidentified
  source 1..697: mol_type = unassigned DNA; note = unclassified Enterovirus sequence
ggcaccttgcggataacgatcgctgttgtttttgccctgttggagcatatcaacattgaccggggaaacagaagtgcttgacctattaaaactggatctgggttgttcccacccagatcatccacgtgatgttgtgctctattattccggtaattttgcacgccagtttttcatccctttccctttgtaacttagaagattgaacaaatgaccaataggacgcaacaaaccagttgtaataggtcaagcacttctgtttccccggtcaatgttgatatgctccaacagggcaaaaacaacagcgatcgttatccgcaaggtgcctacgcaaagcctagtagcactcttgaaattgcttggttggtcgctcaggtgcaaacccagcactagacctggcagatgaggctagaaaatccccactggtgacagtgttctagcctgcgtggctgcctgcacacccatttgggtgtgaagccaaacaatggacagggtgtgaagagccccgtgtgctcatcttgattcctccggcccctgaatgcggctaaccttaaacctgcagccattactcacaatccagtgagttggtggtcgtaatgagtaattgcgggatgggaccgactactttgggtgtccgtgtttcactttttaccttattttatgcttatggtgacaatatattgtaatatatattgacacc

SEQ ID NO: 839 - DNA, 698 bp, Enterovirus A
  source 1..698: mol_type = genomic DNA
ttaaaacagcctgtgggttgttcccacccacagggcccactgggcgctagtactctggtattacggtacctttgtacgcctgttttacaacccttcccccatgtaacttagaagcaacaaataaacgaccaatagcacactcaccaatccagatgagtgatggtcaagcacttctgttaccccgggcttagtaccaatagactgccatcgcggttgaaggggaaaacgctcgttatccggctctctactgcgagaagcctagtaacgccttagaaatgctcaagcgttgcgctcagcacaaccccagtgtagctcaggtcgatgagtcactgcattccccacgggcgaccgtggcagtggctgcgtttgcggcctgcctacagctctacgctgtaggacgcttgtgtatggacatggtgtgaagagcccattgcgctagggagtagtcctccggcccctgaatgcggctaatcctaaccccggagctggtgcttgtaaaccaacaagtggccagtcgtaatgggcaactctgggatggaaccgactactttgggtgtccgtgtttcctgttttatttaccttggctgcttatggtgacaatctagtgttgttgccatatagcgattggattggccatccggatattgttttagacacttgtgtttgtgagtagatctcttctgacataggatataaca

SEQ ID NO: 840 - DNA, 698 bp, Enterovirus D
  source 1..698: mol_type = genomic DNA
ttaaaacagccttggggttgttcccactccaagggcccatgtggcggctagtactctggtacttcggtacctttgtacgcctgttttatctcccttcccaatgtaatttagaagctcttaaatcaaggctcaataggcggggcgcaacccagcgctctcatgagcaagcacttctgtctccccggtgtggttgtataaactgttcccacggttgaaaacaacctatccgttatccgctatagtacttcgagaaacctagtatcacctttggattgttgacgcgttgcgctcagcacactaacccgtgtgtagcttgggtcgatgagtctggacataccccactggcgacagtggtccaggctgcgttggcggcctactcatggtgaaaaccatgagacgctaaacatgaacaaggtgtgaagagtctattgagctactatagagtcctccggcccctgaatgcggctaatcctaaccatggagcaagcgctcacaagccagtgagttgcttgtcgtaatgcgcaagtccgtggcggaaccgactactttgggtgtccgtgtttcactttttacttttatgactgcttatggtgacaatttgatattgttaccatttagcttgtcaaattaattacaaaaggttctaaatcttacttaccaacctgcattttgataaccttgatttgaaaattttaata

SEQ ID NO: 841 - DNA, 699 bp, Enterovirus J
  source 1..699: mol_type = genomic DNA
ttaaaatagcctcagggttgttcccaccctgagggcccacgtggcgtagtactctggtatcaaggtacctttgtacgcctattttatttcccttcccccacagtaacttagaagcttatctcatagttcaacagtagggtcactaaccaagtggctcagcgaacaagcacttctgtttccccggtcctagtacctgtgaagctgtacccacggcggaaggggaaaaagatcgttatccggccccctacttcggaaagcctagtaacaccattgaagcaatcgagtgttgcgctcagcacagtaacccctgtgtagctttggttgatgagtctgggcactccccactggcgacagcggcccaggctgcgttggcggccaaccgactcgggcaaccgggtcggacgctcgtttgtggacatggtgtgaagagcctactgagctagagggtagtcctccggcccctgaatgcggataatcctaaccccggagcacccacactcaatccagagtgcaggatgtcgtaacgcgtaagtctgggacggaaccgactactttgggtgtccgtgtttcctgttttacttactttggctgcttatggtgacaatctagtgttgttaccatatagctattggattggccatccggtgttttgaattgtgtgtttatactaattcttttacatatcacagacaaccaaat

SEQ ID NO: 842 - DNA, 699 bp, unidentified
  source 1..699: mol_type = unassigned DNA; note = unclassified Enterovirus sequence
tagtactccggtatcgcggtacccttgtacgcctgttttatactcccttcccccgtaacttagaagcaatcaaaccaagttcaatagaagggggtacaaaccagtaccaccacgaacaagcacttctgtttccccggtgaggttgcatagactgtacccacggttgaaagcgactaatccgttatccgctcaagtacttcgggaagcctagtaccaccttcggatcttcgatgcgttgcgctcagcactcaaccccagagtgtagcttaggctgatgagtctggacattcctcactggcgacagtggtccaggctgcgttggcggcctacctgtggcccaaagccacaggacgctagttgtgaacaaggtgtgaagagcctactgagctacttgagattcctccggcccctgaatgcggctaatcccaaccacggagcaggtggtcataaaccaatggctggcctgtcgtaatgcgcaagtctgtggcggaaccgactactttgggtgtccgtgtttccttttatcttttcattggctgcttatggtgacaatcatagattgttatcataaagcaaattggattggccatccggtgaaaatcagagcgattatatatttgtttactggatttacatcactgacaccatactctccaatactcattaggttggttttattaataaggtattattaccata

SEQ ID NO: 843 - DNA, 700 bp, Enterovirus A
  source 1..700: mol_type = genomic DNA
ttaaaacagcctgtgggttgtacccacccgcagggcccactgggcgctagtacactgatatcacggtacctttgtacgcctgttttatctccctacccccatcgtaacttagaagcttaacaatacagatcaatagcctctgcaccaaaccaggtgtggaatgatcaagcatttctgttaccccggacctagtaccaataggctgtgtcaaacggctgaaggggaaaaagttcgttacccggccacctacttcgagaagcctagtagcatcactgaagctgtgaagcgttacgatcagcacaaccccagtgtagttcaggtcgatgagtcactgcattccccacaggcgactgtagcagtggctgcgttggcggcctgcccttggtctctgaccaagggacgctttggagtggatatggtgcgaagagcctattgagctaggtggtagtcctccggcccctgaatgcggctaatcctaaccccggagctggtgcacacaaaccagtgtgtggccagtcgtaatgagcaattctgggatggaaccgactactttgggtgtccgtgtttcctgtttcacttaccttggctgcttatggtgacaattgtatagttgtcatcatatagctattggattggccatccggatattattcttgtgtttatttgtgtaatttgatataatttagaaccctgtataaga

SEQ ID NO: 844 - DNA, 702 bp, Enterovirus A
  source 1..702: mol_type = genomic DNA
gcgttagcacactgattctacggaatctttgtgcgcctgttttataaccccttccccaagcagcaacttagaagcttcgcgccaccacgaccagtagtgggcgtgacacaccagtcacgttttggtcaagcacttctgtttccccggactgagtatcaatagactgctcacgcggttgaaggagaaaacgttcgttatccggccaactacttcgagaaacctagtagcatcgtggaagttgcggagtgtttcgctcagcacttcccccgtgtagatcaggtcgatgagtcactgtaaaccccacgggcgaccgtgacagtggctgcgttggcggcctgcccatggggcaacccatgggacgctctaatacagacacggtgtgaagagtctattgagctagttggtagtcctccggcccctgaatgcggctaatcctaactgcggagcgcgcaccctcaacccagggggcagtgcgtcgtaacgggtaactctgcagcggaaccgactactttgggtgtccgtgtttccttttattctctattggctgcttatggtgacaattgaaaagttgttaccatatagctattggattagccatccggtgaccaacagagctattatttacctgtttgttgggtatatccctctcactctcaaggccattcaaactcttaactatatattactccttaactgtaagag

SEQ ID NO: 845 - DNA, 704 bp, Cardiovirus A
  source 1..704: mol_type = genomic DNA
tgtgctcttccgatctgggagatccagattgccagtctgctcgatatcgcaggctgggtctgtgactacccactccctctttcaacgtgaaggctacgatagtgccagggcgggtactgccgaaagtgccaccccaaagtacacaaccccccccgtacattactggccgaagccgcttggaataaggccggtgtgtgtctgtctacatgttatttctactacattgtcgtctatggcaatgtaagggcccggaacctggccctgtcttcttgacgaatattcctaggggtctttcccctctcgacaaaggaatataaggtctgttgaatgtcgtgaaggaagcagttcctctggaggcttcttgaagacaaacagtgtctgtagcgaccctttgcaggcagcggaaacccccacctggtaacaggtgcctctgcggccaaaagccacgtgtataagatacacctgcaaaggcggcacaaccccagtgccacactgtgcgttggatagttgcggaaagagccaaatggctctccttaagcgtattcaacaaggggctgaaggatgcccagaaggtaccccactagttgggatctgatctggggcctcggtgcacgtgctctacacgtgttgagtcgaggttaaaaaacgtctaggccccccgaaccacggggacgtggttttcctttgaaaaccacgatgacaat

SEQ ID NO: 846 - DNA, 704 bp, Enterovirus C
  source 1..704: mol_type = genomic DNA
tagtactccggtatcacggtacccttgtacgcctgttttaaactcccttccctcgtaacttagaagcaaacaaaccaagttcaatagaaaggggtacaaaccagtaccaccacgaacaagcacttctgttgccccggtgatgtcgtatagattgtacccacggtcgaaaacgattgatccgttatccgcttttgtacttcgagaagcctagtaccaccttggaatcttcgatgcgttgcgctcggcactcaatcccagagtgtagcttaggtcgatgagtctggacataccccaccggtgacggtggtccaggctgcgttggcggcctacctgtggcccaaagccacaggacgctagttgtgaacaaggtgtgaagagcatattgagctacaaaagagtcctccggcccctgaatgcggctaatcctaaccacggagcaagggtgcacaaaccagtgtataccttgtcgtaacgcgtaagtctgtggcggaaccgactactttgggtgtccgtgtttcctgttattttttatcatggctgcttatggtgacaatcagagattgttatcataaagcaaattggattggccatccggtgagtgttgtgtcaagtatacaactgtttgttggaaccactgtgttagcttcacttctcatttaaccaattaatcaaaaacaatacgaggataaaacaataatactaca

SEQ ID NO: 847 - DNA, 704 bp, Enterovirus B
  source 1..704: mol_type = genomic DNA
atgggcgctagcacactggtatcccggtacctttgtgcgcctgttttatctacccctccccaaacgtaacttagaagcacatcacacatggtcaacaggtggcacagtacaccaactgggccgtgaccaagcacttctgttaccccggaccgagtatcaatagactgctcgcgcggttgaaggagaaaacgttcgttacccggccaattacttcgagaaacccagtaccaccgtgaaggttgcgcagcgtttcgctccgcacaaccccagtgtagatcaggtcgatgagccaccgcattccccacgggtgaccgtggcggtggctgcgttggcggcctgcccatggggcaacccatgggacgcttcaatactgacacggtgcgaagagtctattgagctaattggtattcctccggcccctgaatgcggctaatcctaactgcggagcagatacccacaagccagtgggcagtctgtcgtaacgggtaactctgcagcggaaccgactactttgggtgaccgtgtttccttttattcttatattggctgcttatggtgacaattgaaagattgttgccatatagctattggattggccacccagtgacaaacagagctattgtttacctatttgttggctttataccactgaatcttaaagttttagaaactctcaacctgatcttattactcaattcggtaaa

SEQ ID NO: 848 - DNA, 705 bp, Enterovirus B
  source 1..705: mol_type = genomic DNA
cacggggcgcaagcacactggtattacggtacctttgtgcgcctgttttacccacccttccccaatgaaatttagaagcttgacttaaacggtcagtagacaacccagtatgccaactgggtcccgaccaagcacttctgtctccccggactgagtatcaataggctgcttgcgcggctgaaggagaaaacgttcgttacccgaccaactacttcgagaaacctagtaccaccatgaacgttgcgcagcgtttcgctccacacaaccccggtgtagatcaggtcgatgagtcaccgcaatccccacgggcgaccgtggcggtggctgcgctggcggcctgcccatggggcaacccatgggacgcttcaacactgacatggtgcgaagagtctattgagctagttggtagtcctccggcccctgaatgcggctaatcctaactgcggggcagatacccacataccagtgggcagtctgtcgtaacgggcaactctgcagcggaaccgactactttgggtgtccgtgtttccttttatccttatattggctgcttatggtgacaattgaaagattgttaccatatagctattggattggccatccagtgagcaacagagcgatcatactcctctttgttgggtttataccacttgactacagcagttacaacaccttgttgtacatcgtttatttgaatacgagaaa

SEQ ID NO: 849 - DNA, 707 bp, unidentified
  source 1..707: mol_type = unassigned DNA; note = unclassified Enterovirus sequence
aggctagtacaccgggtaccgtgataccggtgtactagcctgttttatactcccttcccccgtaacttagaagtaaataacacaagttcaatagaagggggtacaaaccagtaccaccacgaacaagcacttctgttcccccggtgaggtcacatagactgtctccacggttgaaagtgactgatccgttatccgctcttgtacttcgggaagcctagtagcatcttcggatcttcgatgcgttgcgctcagcactcaatcccagagtgtagcttaggtcgatgagtctggacatccctcactggcgacagtggtccaggctgcgttggcggcctacctgtggcccaaagccacaggacgctagttgtgaacaaggtgtgaagagcctactgagctacttgagagtcctccggcccctgaatgcggctaatcccaaccacggagcaaatgactgcaatccagcagttagtttgtcgtaatgcgtaagtctgtggcggaaccgactactttgggtgtccgtgtttccttttatattttatattggctgcttatggtgacaatcactgattgttatcataaagcgacttggattggccatccggtgaaaataagagttattatctacttatttgttggatttactccactatcaacctacacaccagagctcatacgcattgttatagtactaagaaatatacatcaca

SEQ ID NO: 850 - DNA, 707 bp, Enterovirus C
  source 1..707: mol_type = genomic DNA
taaaacagctctggggttgttcccaccccagaggccacgtggcggccagtactctggtatcaaggtacctttgtacgcctgttttatatcccctcccccaagtaactttagaagcaattcaaacagttcaatagagggggtacaaaccagtaccaccacgaacaagcacttctgtttccccggtgaggctgtatagactgttcccacggttgaaaatggctgatccgttatccgctcatgtacttcgagaagcctagtatctccttggaatcttcgatgcgttgcgctcagcactctaccccgagtgtagcttaggctgatgagtctgggcataccccaccggtgacggtggcccaggctgcgttggcggcctacccatggctaacgccatgggacgctagttgtgaacaaggtgtgaagagcctattgagctacttgagagtcctccggcccctgaatgcggctaatcccaaccacggagcaagtgcctgcataccagcaggtagcttgtcgtaacgcgcaagtctgtggcggaaccgactactttgggtgtccgtgtttccttttattcttatcatggctgcttatggtgacaatctaagattgttatcatatagcttttggattggccatccggtgattgtttgatatttgaacacttgtttaccttatcttattacacaccaatttacatacctaacttcatt

SEQ ID NO: 851 - DNA, 708 bp, Enterovirus B
  source 1..708: mol_type = genomic DNA
cccactgggcgctagcacactggtattacggtacctttgtgcgcctgttttatctaccctccccccaacgcaacttagaagcataacttaaatggtcaacagataactcagtatgccaactgagccctgaccaagcacttctgttatcccggactgagtaccaataggctgctcacgcggccgaaggggaaaccgttcgttacccggccaattacttcgagaaacctagtaccaccatgaaagttgcgcagtgtttcgctccgcacaaccccagtgtagatcaggtcgatgagtcaccgcaaaccccacgggcgaccgtggcggtggctgcgttggcggcctgcccatggggcaacccatgggacgcttcaatactgacatggtgcgaagagtctattgagctaattggtagtcctccggcccctgaatgcggctaatcccaactgcggagcagatacccacacaccagcgggcagtctgtcgtaatgggcaactctgcagcggaaccgactactttgggtgtccgtgtttccttttattctcatactggctgcttatggtgacaattgagagattgttaccatatagctattggattggccatccggttacaaacagagcaattatttacttatttgttggttttgtaccactgaactacagagtcctgaaaaccctcaatctcattataacactcaatacgttaaa

SEQ ID NO: 852 - DNA, 708 bp, Enterovirus B
  source 1..708: mol_type = genomic DNA
gcccactgggcgttagcactctggtattaaggtacctttgtgcgcctgttttataatcccttcccaacttgcaacttagaagtaacacactatgaccaatagggggcgtggcaaaccagccatgccttggtcaagcacttctgtttccccggactgagtatcaataagctgtccacacggctgaaggagaaaacgtccgttacccggccagttacttcgagaaacctagtaccaccatgaaagttgcgtagcgtttcgctccgcacatccccagtgtagatcaggtcgatgagtcaccgcaatccccacgggcgaccgtggcggtggctgcgctggcggcctgcccatggggcaacccatgggacgctacaatactgacatggtgtgaagagtctattgagctaactggtagtcctccggcccctgaatgcggctaatcctaactgcggagcagatacccacacgccagtgggcagtctgtcgtaacgggcaactctgcagcggaaccgactactttgggtgtccgtgtttccttttattcatattttggctgcttatggtgacaattgagagattgttaccatatagctattggattggccatccggtgacaaacagagctatcatctatcttttcatcggcttcgtaccgctgaaccacaaagtatttaacaccctcaatttagtattggccttcaatatagcaaa

SEQ ID NO: 853 - DNA, 708 bp, unidentified
  source 1..708: mol_type = unassigned DNA; note = unclassified Enterovirus sequence
ccactgggcgttagcacactggtatcacggtacccttgtgcgcctgttttatatacccttccccgtagagtaacttagaagcttgactacgacggtcaataggaaacccagtgcaccaactggggcgcgaccaagcactcctgtaaccccggactgagtatcaataagctgcttgcgtggctgaaggagaaaacgttcgttacccggccaattacttcgagaaacctagtaccaccatgaaagttgcgcagcgtttcgctccgcacaaccccagtgtagatcaggccgatgagtcaccgcattccccacgggcgaccgtggcggtggctgcgttggcggcctgcccatgggataacccatgggacgcttcaatactgacatggtgcgaagagtctattgagctaattggtagtcctccggcccctgaatgcggctaatcctaactgcggagcagacacccacaagccagtgggcagtctgtcgtaacgggtaactctgcagcggaaccgactactttgggtgtccgtgtttccttttatttctatactggctgcttatggtgacaattgaaaggttgttaccatatagctattggattggccatccggtgtctaacagagcaatcatttatttatttgttggattcgtacccctaaatcctaaagtctttaacactctcaacttcatattacgattaaatacagcaag

SEQ ID NO: 854 - DNA, 709 bp, Enterovirus B
  source 1..709: mol_type = genomic DNA
gggcccactgggcgctagcactctggtattacggtacctttgtgcgcctgttttacgctccttcccccaagtgcaacttagaagccaaacaccacgaccaatagtaggcaaggcgcaccagccgtgtctcggtcaagcacttctgtctccccggactgagtatcaataaactgctcacgtggttgaaggagaaaacgttcgttacccggctaattacttcgagaagcctagtaacaccatggaggttgcgaggcgtttcactcagcacgcccccggtgtagttcaggtcgatgagtcaccgcgttccccacaggcgactgtggcggtggctgcgttggcggcctgcccatggggcaacccatgggacgcttcaatgtcgacatggtgtgaagagcctattgagctagttagcagtcctccggcccctgaatgcggctaatcctaactgcggagcacgcgcccccaacccagagggtagcgtgtcgtaacgggtaactctgcagcggaaccgactactttgggtgtccgtgtttctttttatcttttattggctgcttatggtgacaattgagagattgttaccatatagctattggattggccatccggtgacgaacagagctataatttaccaatttgtaggatttattccattaagtttgaaagccttaaagacccttagtttaatactattgctcaatagtgtaaa

SEQ ID NO: 855 - DNA, 709 bp, Enterovirus B
  source 1..709: mol_type = genomic DNA
ggcccactgggcgccagcacactggtatcacggtacccttgtgcgcctgttttatttacccccccccaacgtaacttagaagcacaacctaatcggtcaatagataactcagtacaccaactgagtccagaccaagcacttctgttaccccggaccgagtatcaataagctgctcgcgcggctgaaggagaaaaggttcgttacccgaccaattacttcgagaaacccagtaccaccatggaagttgcgcagtgtttcgctccgcacaaccccagtgtagatcaggtcgatgagtcaccgcgttccccacgggcgaccgtggtggtggctgcgttggcggcctgcccatgaggtaacccatgggacgcttcaatactgacatggtgcgaagagtctattgagctaattggtagtcctccggcccctgaatgcggctaatcctaactgcggagcagatacctacacgccagtaggcagtctgtcgtaatgggcaactctgcagcggaaccgactactttgggtgtccgtgtttccttttattcttacattggctgcttatggtgacaattgagagattgttaccatatagctattggattggccatccagtgacaaacagagcgatcatctacttgtttgttggttttataccactaaattacaaagtcttaaacacactcaatttcattctgtcacttaatacattgag

SEQ ID NO: 856 - DNA, 710 bp, Cardiovirus A
  source 1..710: mol_type = genomic DNA
ttgaaagccgggggtgggagatccggattgccagtctgctcgatatcgcaggctgggtccgtgactacccactccccctttcaacgtgaaggctacgatagtgccagggcgggtactgccgtaagtgccaccccaaaataacaacagaccccccccctaacgttactggccgaagccgcttggaataaggccggtgtgcgtttgtctatatgttattttccaccatattgccgtcttttggcaatgtgagggcccggaaacctggccctgtcttcttgacgagcattcctaggggtctttcccctctcgccaaaggaatgcaaggtctgttgaatgtcgtgaaggaagcagttcctctggaagcttcttgaagacaaacaacgtctgtagcgaccctttgcaggcagcggaaccccccacctggcgacaggtgcctctgcggccaaaagccacgtgtataagatacacctgcaaaggcggcacaaccccagtgccacgttgtgagttggatagttgtggaaagagtcaaatggctctcctcaagcgtattcaacaaggggctgaaggatgcccagaaggtaccccattgtatgggatctgatctggggcctcggtgcacatgctttacatgtgtttagtcgaggttaaaaaacgtctaggccccccgaaccacggggacgtggttttcctttgaaaaacacgatgataat

SEQ ID NO: 857 - DNA, 710 bp, Enterovirus C
  source 1..710: mol_type = genomic DNA
ttaaaacagctctggggttgttcccaccccagaggcccacgtggcggctagtactctggtattgcggtacctttgtacgcctgttttatacccccttccccagtaactttagaagcaattcattcagttcaatagagggggtacaaaccagtaccaccacgaacaagcacttctgtttccccggtgaagccgtatagactgtacccacggttgaaaatggcagatccgttatccgctcatgtacttcgagaagcctagtatcatcttggaatcttcgatgcgttgcgctcagcactctaccccgagtgtagcttaggctgatgagtctgggcataccccaccggcgacggtggcccaggctgcgttggcggcctacccatggctaacgccatgggacgctagatgtgaacaaggtgtgaagagcctattgagctacttgagagtcctccggcccctgaatgcggctaatcctaaccacggagcaagcgcttacaaaccagtaagtagcttgtcgtaacgcgcaagtctgtggcggaaccgactactttgggtgtccgtgtttccctttatttttattgtggctgcttatggtgacaatctaagattgttatcatatagctattggattggccatccggtgatttgtcgagtttcaaacgcttgtttatttctccacaacacttgcctactcaatacatttacaaaccata

SEQ ID NO: 858 - DNA, 710 bp, Enterovirus D
  source 1..710: mol_type = genomic DNA
tttaaacgcttctaaggttgtttacattgggggaggggagataaaaaccgtatttctgggtcttcggtacctttgtacgcctgttttatctccctccccaatgtaacttagaagctttcaaatcaaagctcaataggtggagcgcaaaccagcgctttcgtgagcaagcactcctgtttccccggtgcggttgtatagactgttcccacggttgaaaacaacctatccgttatccgctatagtacttcgagaaacctagtatcacctttggattgttgatgcgttgcgctcaacacactaacccgtgtgtagcttgggtcgatgagtctggacataccccactggtaacagtggtccaggctgcgttggcggcctactcatggtgaaaaccatgagacgctagacatgaacaaggtgtgaagagtctattgagctactatagagtcctccggcccctgaatgcggctaatcttaaccatggagcaagtgctcacaaaccagtgagttgcttgtcgtaatgcgcaagtccgtggcggaaccgactactttgggtgtccgtgtttcactttttacttttatgactgcttatggtgacaatttaatattgttaccattcagctagtcgaaataatcgcataaaactttaaatcctatctaacaattcacatttggatagtttcattttgaggactttaaacctacttacaaag

SEQ ID NO: 859 - DNA, 711 bp, Hepatovirus D
  source 1..711: mol_type = genomic DNA
ttcaaagggtggtgggcggtttccccgccctcccctctttggatgcccatagtgcgggggtataaataccgcactccctttagctgttccgagggtatcggaacctatatgtttgttttctgtctgtctgtcagctttatgtgtgctcgtcccctttagggcactcatttcagcttgctttcattcttttcttccccggttctcaccttaccggaggcactggccgttgcgcccggcggggtcaacctagtgattagcactaggctgtaggtgtctaaagtggtgacattaagacttggtaactgatttcagcactgttaactgatgttggggatgacttgattgatcttctggaaggggtaggctacgggtgaaaccccttatcttaataccactatgtagagatagattcagtaggttaagggcagtggataaggttgagttcattttggacaataaaccttcaacactggtggacccaatctcactgaccagatgctttcttgactgatccttcagaggggtgattcttctgaataggttgccttgacactgatgcctgagacccattgggtcgggccttaaatcatggaactccactggactttcatggcctagcttctgccttagacagactctggggccccacgaccctctgggcccttcggggtactcaggggcatttaggtttttccacaattaaaagagtta

SEQ ID NO: 860 - DNA, 711 bp, Hepatovirus F
  source 1..711: mol_type = genomic DNA
ttcaaagggtggctgggattttgtcccagcctccctttggagttccttggctctggggaactaaattaccaggcccgcgtttacctagcgcttaggttaaaacccccatcccttatttgtaaatattgatttctgcaggttcagagtttcttaatcatgttccctttaggacactcactccacttgctttcattcttgtttccgtggttctcccatcaccacaagcactgaccattgcgcccggtggggttaaccatatgattagcatatggctgtaggtgtttaagggtgggacaataatggaaggtcaaatagcaggcttgtttaacttccttttgtttcatctcatgtatctttctgaaggggtaggctacgggtgaaaccccttaggttaatactcatattgagagatacctgtggtaggttaattgccctggataaacttgagttgttagacaataaagtttcaacaggggtggacaagatctcaccaccagactggcatgttgtgggacatctgggaggcaagtttcttcctgtgatgttggcctttacatattgcctgggtgttaagaaggagcccttaaattcacttttctgtgagcctagcttccgctggacggactttgggggcagcatccttcttgatgcttctggggtactcaggggcatttaggtttttccacattataaatatatagatgaatagag

SEQ ID NO: 861 - DNA, 711 bp, Enterovirus C
  source 1..711: mol_type = genomic DNA
ttaaaacagctctggggttgttcccaccccagaggcccacgtggcggctagtactctggtatcgaggtacctttgtacgcctgttttacaccccttcccctgtgcaactttagaagcaaatcacaaagttcaatagagggggtgcaaaccagcaccaccacgaacaagcacttctgtttccccggtgatgctgtatagactgttcccacggtcaaaaatggcagatccgttatccgcttgagtacttcgagaagcctagtaccaccttggaatcttcgatgtgttgcgctcagcactctaccccgagtgtagcttaggctgatgagtctgggcataccccaccggcgacggtggcccaggctgcgttggcggcctacccatggctaacgccatgggacgctagttgtgaacaaggtgtgaagagcctattgagctactcaagagtcctccggcccctgaatgcggctaatcctaaccacggagcaagtactcacaaaccagtgagcggcttgtcgtaacgcgtaagtctgtggcggaaccgactactttgggtgtccgtgtttccttttatttttattgtggctgcttatggtgacaatctaagattgttatcatatagcttttggattggccatccggtgattgttgagattatattactcatttgttttactacggttcttgcccaattgttacatttgcactaacata

SEQ ID NO: 862 - DNA, 711 bp, Enterovirus C
  source 1..711: mol_type = genomic DNA
ttaaaacagctctggggttgttcccaccccagaggcccacgtggcggctagtacactggtatcacggtacctttgtacgcctgttttatatcccctcccccatgcaactttagaagtaattcaaatagttcaatagagggggtacaaaccagtaccaccacgaacaagcacttctgtttccccggtgaggctatatagactgttcccacggtcgaaggtggctgatccgttatccgcttgagtacttcgagaagcctagtaccacctttggatcttcgatgcgttgcgctcagcactctaccccgagtgtagcttaggctgatgagtctgggcataccccaccggcgacggtggcccaggctgcgttggcggcctacccgtggctaacgccatgggacgctagttgtgaacaaggtgtgaagagcctattgagctacttaagagtcctccggcccctgaatgcggctaatcccaaccacggagcaagtgctcacaaaccagtgggtggcttgtcgtaacgcgcaagtctgtggcggaaccgactactttgggtgtccgtgtttccttttatttttatcatggctgcttatggtgacaatctaagattgttgtcatatagcgtttggattggccatccggtgacttcgaaagcgatatatttgactcattgtcttactgaatttacctatttattacacttgtataacaata

SEQ ID NO: 863 - DNA, 711 bp, Enterovirus C
  source 1..711: mol_type = genomic DNA
ttaaaacagctctggggttgttcccaccccagaggcccacgtggcggccagtactctggtattgcggtacctttgtacgcctgttttatatcccctccccaagtaactttagaagcaattcacaaagttcaatagagggggtacaaaccagtaccaccatgaacaagcacttctgtttccccggtgaagctgtatagactgttcccacggtcgaaaatggcagatccgttatccgctcacgtacttcgagaagcctagtatcatcttggaatcttcgacgcgttgcgctcagcactctaccccgagtgtagcttaggccgatgagtctgggcataccccaccggcgacggtggcccaggctgcgttggcggcctacccatggctaatgtcatgggacgctagttgtgaacaaggtgtgaagagcctattgagctacttgagagtcctccggcccctgaatgcggctaatcctaaccatggagcaagtgcccacaagccagtgggtggcttgtcgtaatgcgcaagtctatggcggaaccgactactttgggtgtccgtgtttccttttattcttattatggctgcttatggtgacaacctaagattgttgtcatatagcttttggattggccatccggtgatctttgagattaatataccttccttattacttcatagtactcatttattcattacactactgtagttaca

SEQ ID NO: 864 - DNA, 711 bp, Enterovirus D
  source 1..711: mol_type = genomic DNA
ttaaaacagccttggggttgttcccacctcaagggcccacgtggcggctagtactctggtatttcggtacccttgtacgcctgttttatctccctccccaatgtaacttagaagctttcaaatcaaagctcaataggtggagcgcaagccagcgcttccgtgagcaagcactcctgtttccccggtgcggttgtatagactgttcccacggttgaaaacaacctatccgttatccgctatagtacttcgagaaacctagtatcacctttggattgttgatgcgttgcgctcagcacactaacccgtgtgtagcttgggtcgatgagtctggacataccccactggtgacagtggtccaggctgcgttggcggcctactcatggtgaaaaccatgagacgctagacatgaacaaggtgtgaagagtctattgagctactatagagtcctccggcccctgaatgcggctaatcttaaccatggagcaagtgctcacaaaccagtgagttgcttgtcgtaatgcgcaagtccgtggcggaaccgactactttgggtgtccgtgtttcactttttacttttatgactgcttatggtgacaatttaatattgttaccatttagctagtcaaattaatcacataaaaactttaaatcctatctaacaattcacatttggatagcttcattttgaggactttaaacctatttacaaag

SEQ ID NO: 865 - DNA, 711 bp, Enterovirus B
  source 1..711: mol_type = genomic DNA
agggcccactgggcgctagcacactggtatcacggtacctttgtgcgcctgttttatttccccatccccgccgtaacttagaagtctcacttaagcggtcaatagatagcccagtaaaccaactgggttccgaccaggcacttctgttaccccggaccgagtatcaataggctactcacgtggccgaaggagaaaacgttcgttacccggccaattacttcgagaaacttagtaacaccatggaagttgcgcagtgtttcgctccgcacaaccccagtgtagatcaggtcgatgagtcaccgcgtaccccacgggcgaccgtggcggtggctgcgttggcggcctgcccatggggcaacccatgggacgcttcaataccgacatggtgcgaagagtctattgagctaattggtagtcctccggcccctgaatgcggctaatcctaactgcggagcagacgcctacgaaccagtgggtagtctgtcgtaacgggcaactctgcagcggaaccgactactttgggtgtccgtgtttccttttattcttacactggctgcttatggtgacaattgagagattgttaccatatagctattggattggccatccggtgacaaacagagctattgtttatctatttattggtttcataccactaaacttcaaggtcctaggaaccctcaatttaatattactacttaatagtgcaaa

SEQ ID NO: 866 - DNA, 712 bp, Aichivirus A
  source 1..712: mol_type = genomic DNA
tcaccctcttttccggtggtccggacccagaccaccgttactccattcagcttcttcggaacctgttcggaggaattaaacgggcacccactcaccctctcccccctctcgtaaccaagtgtgtgcccaatctcttcactcctgctggcttcaccgaccagcagtgtccaaaatgctaggtgaacctcctccctcccccactgggctcttgcccagtttcctccccccagcctgacgtgtcacaggctgtacaaagaccccgcgaaagctgccaaaagtggcaattgtgggtcccccctttgtgaaggcgtcgagtctttctcccttaaggctagacccgccagtgaattctgtcgggcaactagtgacgccactgcatgcctccgacctcggccgcggagtgctgccccccaagtcgagcccctaagccacaagttgtgctgtctggcaaacactgtctgtgagaatgttccgctgcggctgccaagcctggcaacaggctgccccagtgtgcgtagttctcatccagacctcggtctggcaacttgctgttaagacacggcgtaaggggcgtgtgccaacgccctggaacgagtgtccactctaataccccgaggaatgctacgcaggtacccctggcccgccagggatctgagcgtaggctaattgtctaagggtattttcatttcccactctttttctcttgttcata

SEQ ID NO: 867 - DNA, 712 bp, Aichivirus A
  source 1..712: mol_type = genomic DNA
tcacgcacttttccggtggtccggacccagaccaccgtcactccattcagcttcttcggaacctgttcggaggaattaaatgggcacccactcacccttcccctcttctcgtaactaagtgtgtgcccaatctcttgactcctactggctccaccgaccggtagtgtccaaaatgctaggtggacttcctcccttcccttctgggcatcttgcccagcttcctccccccagcctgacgtgtcacaggctgtgcaaagaccccgcgaaagctgccaaaagtggcaattgtgggtcccccctttgtcaaggcgtcgagtctttctcccttaaggctagtcccatcagtgaattctgatgggcaactagtgacgccactgcatgcctccgacctcggccgcggagtgctgccccccaagtcgtgcccctgaccacaagttgtgctgtctggcaaacattgtctgtgagaatgttccgctgtggctgccaagcctggtaacaggctgccccagtgtgcgtagttctcatccagacttcggtctggcaacttgttgttaagacacggcgtaaggggcgtgtgccaacgcccaggaacgagtgtccactctaataccccgaggaatgctacgcaggtacccctggtccaccagggatctgagcgtaggctaactgtctaagggtattttcatttcccactctctctttctcgttcata

SEQ ID NO: 868 - DNA, 712 bp, Limnipivirus A
  source 1..712: mol_type = genomic DNA
tttaaatggtgaccttaaacgggaaatgcgttttccgttctttggatatccatttaacgtgtaccctatacgataattggggtggattctggatgcctagttccagtgattggttaagaactcgtttactacgtatagtatgattagcaaagtgctcgattgatcacgtaatgatctatgtggttaaaaacccagtagtatggtatatactcagtagtgtacactgtgagtacaactcttggcgtagagagaacaattcacccgaatccgtggcgtatccatggaaataagtttacctaattgtatgttacaaggcatatgagacatttatgagatatggtttattttgactaaacgagtgtagaggtggtggagtctatccaacttcaagccatgcaattgttgtgttgattgatatcattgaccatttttgtggattgtgtacacatacaatttgaaaattaaccccctcaagaataagacatgggaccattcgtggtagataccgtgctcggatgcttgagattagatgggttagactagttttggaatgagattgccgagaaagtcccgctagacatgttttacaagtcgtggtattccgctagactttttcgcagacacatggaagggtccatgtgttgtgcaattgcagggtgacagcccaactgcagagttttccttactagaataaaaatctgttgtcaatttt

SEQ ID NO: 869 - DNA, 712 bp, Enterovirus C
  source 1..712: mol_type = genomic DNA
ttaaaacagctctggggttgatcccaccccagaggcccacgtggcggctagtactctggtattacggtacctttgtacgcctgttttatatcccctcccccaagtaactttagaagcaattcaaacagttcaatagagggggtacaaaccagtaccaccacgaacaagcacttctgtttccccggtgaagctgtatagactgttcccacggttgaaaatggcagatccgttatccgcttgagtacttcgagaagcctagtatcaccttggaatcttcgacgcgttgcgctcagcactctaccccgagtgtagcttaggtcgatgagtctgggcataccccaccggcgacggtggcccaggctgcgttggcggcctacccatggccaacgccatgggacgctagttgtgaacaaggtgagaagagcctattgagctacttaagagtcctccggcccctgaatgcggctaatcccaaccacggagcaagtgctcacaaaccagtgagtagcttgtcgtaacgcgcaagtctgtggcggaaccgactactttgggtgtccgtgtttccttttatttttactatggctgcttatggtgacaatctaagattgttatcatatagctgttggattggccatccggtgatttattgagatttaacgttcgcctgtttttcttactacatctacccaccagtttcactcatataacaaca

SEQ ID NO: 870 - DNA, 712 bp, Enterovirus C
  source 1..712: mol_type = genomic DNA
cccacgtggcggccagtactccggtatcacggtacccttgtacgcctgttttatactcccttcccccgtaacttagaagcaatgaaaccaagttcaatagaagggggtacaaaccagtaccaccacgaacaagcacttctgtttccccggtgacgttgcatagactgtccccacggttgaaggcggctgatccgttatccgcttgtgtacttcgagaagcctagtaccatcttggaatctccgatgcgttgcgctcagcactcaaccccagagtgtagcttaggctgatgagtctggacattccccaccggcgacggtggtccaggctgcgttggcggcctacctgtggtccaaaaccacaggacgctagttgtgaacaaggtgtgaagagcctattgagctacatgagagtcctccggcccctgaatgcggctaatcccaaccacggagcaggtgtttgcaatccagcaaatagcctgtcgtaacgcgcaagtctgtggcggaaccgactactttgggtgtccgtgtttccttttattttcatactggctgcttatggtgacaatctcggattgttatcatagagcaaattggattggccatccggtgaaaatcagattgattatttaactttttgttggatttacatctttgacatcacatactccgaatctcattaagatagtgctcttgatacgacatcatcgtcatt

SEQ ID NO: 871 - DNA, 713 bp, unidentified
  source 1..713: mol_type = unassigned DNA; note = unclassified Kobuvirus sequence
tcacgcacttttccggtggtccggtctcagaccaccgttactccattcagcttcttcggaacctgttcggaggaattaaacgggcacccactaaccccaacccccttctcgtaactaagtgtgtgcccaatctcttgactcctgctggaaccaccgaccagtagtgtccaaaatgccaggtggaaaatcctcccttcccctctgggctacatgcccagcatcctccccccagcctgacgtgccacaggctgtgcaaagaccccgcgaaagctgccaaaagtggcaattgtgggtcccccctttgtcaaggcgtcgagtctttctcccttaaggctagccccgtcagtgaactctgtcgggcaactagtgacgccactgcatgcctccgacctcggccgcggagtgctgccccccaagtcatgcccctgaccacaagttgtgctgcctggcaagcactgcccgtgagaatgttccgctgtggctgccaagcctggtaacaggctgccccagtgtgcgtagttctcatccagacctcggtctggcaacttgctgttaagacatggcgtaaggggcgtgtgtcaacgccctggaacgagtgtccactctaataccccgaggaatgctacgcaggtacccctggctcgccagggatctgagcgtaggctaattgtctaagggtattttcatttcccactctctctttcttgttcata

SEQ ID NO: 872 - DNA, 713 bp, unidentified
  source 1..713: mol_type = unassigned DNA; note = unclassified Hepatovirus sequence
atttaaaccctctcccttttggacttctctagtctggggaagtaaaataccagactcccgtttgcctagggtataggctattatttatgtttgttttgttatgtttgtcttttaatgttttgtaaatattaattccagcaggttctggtttctgaatttgtcctctttaaggcactcataatgctttctttcatcttcatttccctggctctcaccttgccagatggactgacccatgcgcccgtgggggttaaccacaggactagcctgtggctgtaggttctgaaagaggtgacattaagactatggttgtgattccacatgttttaactggtatgatgtagtagcaattgatctttggtatggggtaggctacgggtgaaaccccataggttaatactaatatttagagatacctccagtaggtgaagtgcacaggataagattgagttattttgacaaaagatcttcaactgtggtggacaccatctcactgggccaatgcttttgttatgaaaccatattgggcatgtctcttggatgagcattcatggacactgatgcctagactagggtgaatattgccttaaatcatagagttctttgggattttatggccttgcttctgttgaacagacactggggcttatggtattcaccctggcctctggggtaatcaggggcatttaggttttccacatttatataatgct

SEQ ID NO: 873 - DNA, 713 bp, unidentified
  source 1..713: mol_type = unassigned DNA; note = unclassified Senecavirus sequence
gctcctctgtgcctctagcaaacacagccggtttaccccccggaaggggaaaggaaggactgggcatgagggcccggccccccctttccccttccggggggtaaaccggctgtgtttgctagaggcacagaggagcaacatccaacctgcttttgtggggaacggtgcggctccaattcctgcgtcgccaaaggtgttagcgcacccaaacggcgcatctaccaatgctattggtgtggcctgcgagttctagcctactcgtttctcccctattcactcactcacgcacaaaaagtgtgttgtaactacaagatttagccctcgcacgggatgtgcgataaccgcaagattgactcaagcgcggaaagcgctgtaaccacatgctgttagtccctttatggctgcgagatggctatccacctcggatcactgaactggagctcgaccctccttagtaagggaaccgagaggccttcttgcaacaagctccgacacagagtccacgtgattgctaccaccatgagtacatggttctcccctctcgacccaggacttctttttgaatatccacggctcgatccagagggtggggcatgatccccctagcatagcgagctacagcgggaactgtagctaggccttagcgtgccttggatactgcctgatagggcgacggcctagtcgtgtcggttctataggtagcacatacaaat

SEQ ID NO: 874 - DNA, 713 bp, Enterovirus B
  source 1..713: mol_type = genomic DNA
acagggcccactgggcgtcagcactctggtattgaggtacctttgtgcgcctgttttataaccctctccccatttgaaaattagaagcaatacacaatggtcagtagctggcatggcaaaccagtcatgttttgaccaagcacttctgtttccccggaccgagtatcaatagactgctcacgcggttgaaggagaaagcgttcgttacccgaccaactacttcgagaaacctagtaacgccatgaaagttgcagagcgtttcgctcagcacatccccagtgtagatcaggccgatgagtcaccgcattccccacgggcgaccgtggcggtggctgcgctggcggcctgcttgtggggcgacccacaagacgctccaaaacagacatggtgtgaagagtctattgagctagttggtagtcctccggcccctgaatgcggctaatcctaactgcggagcacgtgcctccaacccaggaggtggcgtgtcgtaacgggtaactctgcagcggaaccgactactttgggtgaccgtgtttccttttattcttatattggctgcttatggtgacaattgaaaggttgttaccatatagctattggattggccatccggtgacaaacagagcaattatatatctctttgttgggtatattccactcgattacaaggaattcagaactctcaattatatactgtctttaaactccgcaag

SEQ ID NO: 875 - DNA, 714 bp, Enterovirus C
  source 1..714: mol_type = genomic DNA
ttaaaacagcctgtgggttgttcccaccccagaggcccacgtggcggctagtactctggtatcacggtacctttgtacgcctgttttatatcccttcccccgcaactttagaagcttaacaaaagttcaacagcaggggtacaaaccagtgcctctacgaacaagcacttctgtttccccggtgaaatcacatagactgtacccacggtcaaaagtgattgatccgttatccgcttgagtacttcgagaagcctagtatcaccttggaatcttcgacgcgttgcgctcaacactctaccccgggtgtagcttaggctgatgagtctgggtactccccaccggtgacggtgacccaggctgcgttggcggcctacccatggctaatgccatgggacgctagttgtgaacaaggtgtgaagagcctattgagctactcaagaatcctccggcccctgaatgcggctaatcctaaccacggagcaatcgctcacgacccagtgagtaggttgtcgtaatgcgtaagtccgtggcggaaccgactactttgggtgtccgtgtttcccttttttattcatattggctgcttatggtgacaatttacagattgttaccatatagctattggattggccatccagtattgtgtcatacatattaaaatacttttctacaagcaataacaacattgtatttgaaccacaatagccattacaa

SEQ ID NO: 876 - DNA, 714 bp, Enterovirus D
  source 1..714: mol_type = genomic DNA
ttaaaacagcctgtgggttgttcccaccccagaggcccacgtggcggccagtactctggtatcacggtacctttgtacgcctgttttatatccccttcccccgcaacttagaagaaaacaaatcaagttcactaggagggggtacaaaccagtaccaccacgaacaagcacttctgtttccccggtgatgtcgtatagactgtaaccacggttgaaaacgattgatccgttatccgctcttgtacttcgaaaagcccagtatcaccttggaatcttcgatgcgttgcgctcagcactcaaccccagagtgtagcttaggtcgatgagtctggacactcctcaccggcgacggtggtccaggctgcgttggcggcctacctgtggtccaaagccacaggacgctagttgtgaacaaggtgtgaagagcctattgagctacaagagaatcctccggcccctgaatgcggctaatcctaaccacggagcaagggtacacaaaccagtgtatatcttgtcgtaacgcgcaagtctgtggcggaaccgactactttgggtgtccgtgtttccttttgtttttatcatggctgcttatggtgacaatctaagattgttatcatatagctgttggattggccatccggtaatttattgagatttgagcatttgcttgtttcttcaacaatttcacctattcattgcatttcagcagtcaaa

SEQ ID NO: 877 - DNA, 714 bp, Enterovirus B
  source 1..714: mol_type = genomic DNA
cacagggcccactgggcgctagcactctggtattgcggtacctttgtgcgcctgttttatggcccccccccagttggaacttagaagtgaagcctctcgaccaatagtgggcgtggcacaccagccacgtcttggtcaagcacatctgtttccccggactgagtatcaataaactgctcgcgcggttgaaggagaaaacgttcgttacccggctaactacttcgggaaacccagtagtatcatggaaattgcgaggcgtttcgctcagcactccccccgtgtagatcaggtcgatgagtcactgcaccccccacgggtgaccgtggcagtggctgcgttggcggcctgcctatggggtgacccataggacgcttcaaaatggacatggtgcgaagagtctactgagctagttagtagtcctccggcccctgaatgcggctaatcctaaccgcggagcaagtgtccacaaaccagtgggttgcttgtcgtaatgggtaactctgcggcggaaccgactactttgggtgtccgtgtttccttttatcttttattatggctgcttatggtgacaattgagagattgttaccatatagctattggattggccatccggtgaacaacagagcgatcatttacctctttgttggtttcgttccattgagtcccaaagtttttacgacactcaaatttattctcctacttaacaaagcaaa

SEQ ID NO: 878 - DNA, 714 bp, Enterovirus B
  source 1..714: mol_type = genomic DNA
cagggcccactgggcgccagcacactggtatcaaggtacctttgtgcgcctgttttgcttccctttttccccagaggcaacttagaagcaatactccacgaccaatagcaggcgtggcacaccagccatgtctcggtcaagcacttctgtggccccggactgagtatcaataaactgctcacgcggtcgaaggagaaaacgtccgttacccggctagctacttcgagaaacctagtaacgccatgaaaattgcgaggcgtttcgctcagcacatccccagtgtagatcaggtcgatgagtcaccgcattccccacaggtgactgtggcggtggctgcgttggcggcctgcccatggggtaactcatgggacgcttcaatacggacatggtgtgaagagtctattgagctagttagtattcctccggcccctgaatgcggctaatcctaactgtggagcatgcgcccccattccagagggtagcatgtcgtaacgggtaactccgcagcggaaccgactactttgggtgtccgtgtttccttttattttatcattggctgcttatggtgacaattgaaagattgttaccatatagctattggattggccatccggtgacgaacagagctataatttaccaatttgtgggatttgttcctataagtttgaaagtcttaaagacccttaatttaatattactactcaatagtgcaag

SEQ ID NO: 879 - DNA, 714 bp, Enterovirus C
  source 1..714: mol_type = genomic DNA
tattaaaacagctctggggttgttcccaccccagaggcccacgtggcggccagtacactggtattacggtacctttgtacgcctgttttatatccccttacccagtaactttagaagtaattcacacagttcaatagagagggggtacaaaccagtaccaccacgaacaagcacttctgtttccccggtgaagctacatagactgtccccacggttgaaagtggcagatccgttatccgcttaagtacttcgagaagcctagtatcaccttggaatcttcgacgcgttgcgctcagcactctaccccgagtgtagcttaggctgatgagtctgggcataccccaccggcgacggtggcccaggctgcgttggcggcctacccatggctaacgccatgggacgctagttgtgaacaaggtgtgaagagcctattgagctacttaagagtcctccggcccctgaatgcggctaatcctaaccacggagcaagtgcccacaaaccagtgggtggcttgtcgtaacgcgtaagtctgtggcggaaccgactactttgggtgtccgtgtttccttttatttttatcatggctgcttatggtgacaatctaagattgttatcatatagctattggattggccatccggtgattcacagagacttgaaagctaactcaccttcctataacactcatttgtttatcaatcttatagcacaca

SEQ ID NO: 880 - DNA, 714 bp, Enterovirus B
  source 1..714: mol_type = genomic DNA
ggcttaccaactatgcttacaccaggcagcacgcagtttttgacgtcagatgattttcaatcaccatcagctatgccacagtttgatgtgaccccagagatgaacattccagggcaagtgaggaacctgatggaaattgcggaagttgattctgtggtaccaatcaataacttgaaagctaatctgatgacgatggaggcttaccgggtgcaggttaggtccactgacgagatgggaggacagatatttggcttccccttacagccaggggcatcaagcgtgttacaaagaacactactgggagagatattaaattactacactcattggtcagggagcctcaagttaacatttgtgttctgtgggtcggcaatggcaactggcaaattcttactagcatactcaccacctggagcaggggcaccagacagcaggaagaacgctatgttagggacccacgtcatatgggacgttggactgcaatccagctgtgtgctctgtgtaccgtggatcagccagacgcactacaggtatgttgttgatgacaagtacacggctagtggtttcatttcgtgctggtaccaaactaatgtcatagtcccagctgaagctcagaaatcgtgctacataatgtgctttgtgtcagcatgcaacgatttctctgtacgcatgttgagggacacgcaattcattaagcaaacaaacttttatcag

SEQ ID NO: 881 - DNA, 715 bp, Hunnivirus A
  source 1..715: mol_type = genomic DNA
tctttcccccctcccctttccctttacctcttgcaacgaaacagtttttgacaaggaccctcacctgtcaatcgggaccaccactttcagtgaccccgtgcgaagtgttgagagaaagtgagctttcttacccttcatttgtgaacccttcagtcgaagccgcttggaataagatggaaggaaatgttcattctaaatggagtgaaacatatacttaatttccagtgtttagtggtctttccactagacaacggcactgtcttgccggaactctacacaccaacattccacgcttgtgggactcaaatgttggatgacacagttgtagctggaactgagtgtttagtgcactctgtgtaacagtgaaaacaatgtgatcacttcggtgggctagtagcctgtggactaacaactggtaacagttgcctcaggggccaaaagccacggtgttaacagcaccctactagtttgattggagcaatccatgatgttacagagttagtaactgccaaacagattgtactggtatcttggcataccgtgcaacttaggatagtgaaggatgccctggcggtacccataggtaacaagtgacactatggatctaaacaggggctcactctacgttgctttacaactagctgtgagttaaaaaacgtctaactatccacaacctaggggactaggttttcctttttatttttatacacaacta

SEQ ID NO: 882 - DNA, 715 bp, Enterovirus C
  source 1..715: mol_type = genomic DNA
ttaaaacagctctggggttgttcccaccccagaggcccacgtggcggctagtactctggtattacggtacctttgtacgcctgttttacactcccttccctacgcaactttagaagtttaacataaagttcaatagagggggtacaaaccagcaccaccacgaacaagcacttctgtttccccggtgaaactgcatagactgtaaccacggttgaaagcggttgatccgttatccgcttgagtacttcgagaagcctagtaccaccttggaatctccgatgcgttgcgctccacactctaccccgagtgtagcttaggccgatgagtctgggcgttccccaccggcgacggtggcccaggctgcgttggcggcctacccatggttaacgccatgggacgctagttgtgaacaaggtgtgaagagcctattgagctactcaagagtcctccggcccctgaatgcggctaatcccaaccacggagcgagtgctcacaatccagtgagtggcttgtcgtaacgcgcaagtctgtggcggaaccgactactttgggtgtccgtgtttccttttatttttactatggctgcttatggtgacaatctaggattgttatcatatagcttttggattggccatccggtgacttctaacgttcaagtagtttactcgcttaattttctaaacacattctcagttgttgaattataaacttcaca

SEQ ID NO: 883 - DNA, 715 bp, Enterovirus C
  source 1..715: mol_type = genomic DNA
ttaaaacagcctggggttgttcccaccccagaggcccacgtggcggccagtactctggtattacggtacctttgtacgcctgttttatatcccctcccctgagtaactttagaagcaattcaaaaggttcaatagagggggtacaatccagtaccaccatgaacaagcacttctgtttccccggtgaggctacataaactgtacccacggttgaaagtggctaatccgttatccgctcaagtacttcgagaagcctagtaataccttggaatcttcgacgcgttgcgctcagcactctaacccgggtgtagcttaggtcgatgagtctgggcataccccaccggtgacggtggcccaggctgcgttggcggcctacccatggctaacgccatgggacgctagttgtgaacaaggtgtgaagagcctattgagctacttgagagtcctccggcccctgaatgcggctaatcctaaccacggagcaagtgctctcaaaccagagagtggcttgtcgtaacgcgtaagtctgtggcggaaccgactactttgggtgtccgtgtttccttttatttttatcatggctgcttatggtgacaatctaagattgttatcatatagcttttggattggccatccggttgttgtttagagcgtttcatctgtgctttgtttgtttgaccagatcaatataaacactacatcctatttgttcata

SEQ ID NO: 884 - DNA, 715 bp, Enterovirus B
  source 1..715: mol_type = genomic DNA
acagggcccactgggcgttagcacactggtatctcggtacccttgtgcgcctgttttatacacccttcccccaaaagaaacttagaagcttgactataacggtcaataggaaacccagtataccagctgggttacgaccaagcacttctgtaaccccggactgagtatcaataggctgctcacgcggctgaaggagaaaacgttcgttacccggccaattacttcgagaaacctagtaccaccatgaaagttgcgcggcgtttcgctccgcacaatcccagtgtagatcaggtcgatgagccaccgcgttccccacgggtgaccgtggcggtggctgcgttggcggcctgcccatggggcaacccatgggacgcttcaatactgacatggtgcgaagagtctattgagctaattggtagtcctccggcccctgaatgcggctaatcctaactgcggagcagatacccacataccagtgggctgtctgtcgtaacgggtaactccgcagcggaaccgactactttgggtgtccgtgtttccttttattcttatactggctgcttatggtgacaattgagagattgttaccatatagctattggattggccatccggtgtctaacagagcgatcatctatctgtttgttggtttcatacccttgaattttaaagtcctcaacactcttaaccttgtgctacaactaaactcggtaaa

SEQ ID NO: 885 - DNA, 715 bp, Enterovirus C
  source 1..715: mol_type = genomic DNA
tgttcccaccccagaggcccacgtggcggctagtactctggtatcacggtacctttgtacgcctgttttatacccccttcccccgcaacttagaagcatgaaatcttaagctcaacaggaggggtgcaaaccagcacctctacgagcaagcactactgtctccccggtgaggttacatagactgttcccacggttgaaagtagccgatccgttatccgctcatgtacttcgagaagcctagtattgctctggaatcttcgatgcgttgcgctcaacactcgaccccggagtgtagcttaggccgatgagtctggacattccccactggcgacagtggtccaggctgcgttggcggcctacctgtggtccaaagccacaggacgctagttgtgaacagggtgtgaagagcctattgagctacatgagagtcctccggcccctgaatgcggctaatcccaaccatggagcaggcaactgcaacccagcagtcagcctgtcgtaacgcgcaagtccgtggcggaaccgactactttgggtgtccgtgtttccttttatcttttgaatggctgcttatggtgacaatcatagattgttatcataaagcgaattggattggccatccagagaattactaccgtgtttattgagtctactcttgaaaaacctaactcctcaacgtactagaattatttgaagacaggatatcgacacgaca

SEQ ID NO: 886 - DNA, 716 bp, unidentified
  source 1..716: mol_type = unassigned DNA; note = unclassified Hepatovirus sequence
ttcaagaggggtctccggagatttcctgagtccctcttgggagtccatggtgaggggacttgatacctcaccgccgtttgcctaggctataggctaaacttccctttcccctttccctttattgttgtaaatattaattcctgcaggttcaggtctcttggatttgttccactttatggacactcatttcacgctttctgtctgcttttcttccagggctctccccttgccctaggctctggccgttgcgcccggcggggtcaactccatgattagcatggagctgtaggagtctaaattggggacacagatgttgggaacgtcaccttgcagtgttaacttggctttcatgaagctttttgatcttccacaagaggtaggctacgggtgaaacctcttaagctaatacttctatgaagagatgctttggatagggtaacagcggcggatattggtgagttgtttgacaaaaaccattcaacgccggaggactggctctcatccagtggatgcattaagtggattgtctgtcagggctgtctctaggtttaattcctggcctctctgtgcttagggcaaacaaaacttggccttaaatgaggtcctgtgagaggggacctcgccattgaatgctggacatttctttggggccttatgttttgtttgcctctgaggtactcaggggcatttaggtttttcctcatcaataaataatt

SEQ ID NO: 887 - DNA, 716 bp, unidentified
  source 1..716: mol_type = unassigned DNA; note = unclassified Hepatovirus sequence
ttcaagaggggtctccgggtttttccggagcccctcttgggagtccatggtgaggggacttgatacctcaccgccgtttgcctaggctataggctaattttcccttttccttttccctgtgttattgtaaatattaattcctgcaggttcagggttcttgaatttgttctgctgtacggacactcttttcacgctctctgtctgcttttcttccagggctctccccttgccctaggctctggccgttgcgcccggcggggtcaactccatgattagcatggagctgtaggagtctaaattggggacacagatgttgggaacgtcaccttgcagtgttaacttggctttcatgaaactccttgatcttccacaagaggtaggctacgggtgaaacctcttaagctaatacttctatgaagagatgctttggatagggtaacagcggcggatattggtgagttgtatgacaaaaaccattcaacgccggaggactggctctcatccagtggatgcattgagtgaattgactgtcagggctgtctttaggcttaattcctgacctctctgtgcttagggcaaacaaaatttggccttaaatgaggctctgtgagagggggcctcgccattgaatgctggacatttctttggggccttatgttttgtttgccgctgaggtactcaggggcatttaggtttttcctcatcaataaataaat

SEQ ID NO: 888 - DNA, 716 bp, Enterovirus J
  source 1..716: mol_type = genomic DNA
aaaatagcctcagggttgttcccaccctgagggcccacgtggcgtagtactctggtatcacggtacctttgtacgcctattttacatcccttccccgtaacttagaagctttcaactataagttcactagcagggctaccaaccaggtagttcatcgaacaagcacttctgttaccccggtcctagtacctgagaagctgtacccacggcggaaggggaaaaagatcgttacccggctatctacttcgagaagcctagtaacgtcattgaaactcttgagcgttgcgttcagcacagtaccccctgtgtagctttggctgatgagtctgggcattccccactggcgacagtggcccaggctgcgttggcggccaaccgatccgggcaaccgggtcggacgctcatttgtggacatggtgtgaagagcctattgagctaggtagtagtcctccggcccctgaatgcggctaatcccaactccggagcaagtgcgcacaatccagtgtgtggcttgtcgtaatgcgtaagtctggagcggaaccgactactttgggtgtccgtgtttcctgtttttccttatttggctgcttatggtgacaatctagtgttgttaccatatagcgattggattggccatccggtgaatagctttgtgacaattccctacgttatttttcataactcaacttcacgagagtcattgagtttgactaatt

SEQ ID NO: 889 - DNA, 716 bp, Enterovirus B
  source 1..716: mol_type = genomic DNA
cacagggcccactgggcgctagcacactggtatcccggtacctttgtgcgcctgttttataccccctttcccgctttgtaacttagaagtaacacaacttcggtcaatagtcgacgcaacaacccagttgcgttttgatcaagcacctctgtgaccccggactgagtatcaataggctgctcgcgcggctgaaggagaaaccgttcgttacccggctaactacttcgagaagcctagtagcatcatgaacgttgcggagtgtttcgctcagcacttcccccgtgtagatcaggtcgatgagtcaccgcgttccccacgggtgaccgtggcggtggctgcgttggcggcctgcctgtggggcaacccacaggacgctctaatacagacatggtgcgaagagtctattgagctagttagtagtcctccggcccctgaatgcggctaatcctaactgcggagcacattctcacaagccagtgagcggtgtgtcgtaacgggcaactctgcagcggaaccgactactttgggtgtccgtgtttccttttattctaatactggctgcttatggtgacaattgagagattgttaccatatagctattggattggccatccggtgtctaacagagcaattatttacctgtttgttggtttcacacccctaaatctcaaggttttaaataccctcaatttcgtactgaaactaaactcagtaaa

SEQ ID NO: 890 - DNA, 716 bp, Enterovirus D
  source 1..716: mol_type = genomic DNA
cagccttggggttgttcccactccaagggcccacgtggcggctagtactctggtacttcggtacctttgtacgcctgttttatctcccttcccaatgtaacttagaagttcttaaatcaatgctcaataggtggggcgcaaaccagcgctctcatgagcaagcactcctgtctccccggtgaggttgtataaactgttcccacggttgaaaacaacctatccgttatccgctatagtacttcgagaaacctagtaccacctttggattgttgacgcgttgcgctcagcacactaacccgtgtgtagcttgggtcgatgagtctggacatacctcactggcgacagtggtccaggctgcgttggcggcctactcatggtgaaagccatgagacgctagacatgaacaaggtgtgaagagtctattgagctactatagagtcctccggcccctgaatgcggctaatcctaaccatggagcaagtgctcacaggccagtgagttgcttgtcgtaatgcgcaagtccgtggcggaaccgactactttgggtgtccgtgtttcactttttacttttatgactgcttatggtgacaatttgatattgttaccatttagcttgtcaaatcaattgcaaaagatcctaactcttatttatcaacttgcatctcgataactctaatttgaaaatatcatctctaaccaatttgaaaattttaaca

SEQ ID NO: 891 - DNA, 717 bp, Enterovirus A
  source 1..717: mol_type = genomic DNA
acagggcccactgggcgctagcactccgattctgcggaatctttgtgcgcctgttttataaccctcccccgaaacttgcaacttagaagttatgtacgttactgatcaacagcaggcgtggcacaccagccatgtcttgatcaagcacttctgtaaccccggactgagtatcaatagactgctcacgtggtcgaaagagaaaacgttcgttatccggctaactacttcgagaaacttagtagcaccactgaaactgcggagtgtttcgctcagcacttcccccgtgtagatcaggtcgatgagtcactgcttaccccacgggtgaccgtggcagtggctgcgttggcggcctgcctatggggcaacccataggacgctctaaagtggacatggtgtgaagagtctattgagctagttagtagtcctccggcccctgaatgcggctaatcctaactgcggagcacatgccctcaatccagggggtggtgtgtcgtaacgggcaactctgcagcggaaccgactactttgggtgtccgtgtttcttttattctcataatggctgcttatggtgacaattgaggaattgttgccatatagctattggattggccatccagtgacaaacagagctttgatatacttgttcgtgggtttcgttccactcaccagtcgtacagttcatactctaaagtacattctgattctgaacaatagaaa

SEQ ID NO: 892 - DNA, 717 bp, Enterovirus C
  source 1..717: mol_type = genomic DNA
ttaaaacagcttgggggttgttcccacccccagggtccaatggacgctagtacaccggtatcacggtacccttgtacgcctgttttataatccccttcccccgtaacattagaagcacaaaagcaaccgctcaatagacaccatacatccagtgtggttacgagcaagcacttctgtctccccggttgcgccctatatgctgtgcgaacggcaaaaaggggcaatatcgttacccgcttgactactacgggaaacccagtatcatcttcgattgatttgagagttgcgttcagcgccttacccccggcgtagctcaggctgatgaggctccgaacaccccacaggcgactgtgtcggagcctgcgttggcggcctgcccataccctgcggtatgggacgctcacttcatgacatggtgcgaagagtctactgtgctagtcaagattcctccggcccctgaatgtggataatcccaaccactgatcctacgttcgcaatccagcgttcagtaggtcgtaacgcgcaagtcggtggcggaaccaactactttgggtgtccgtgtttcctttatttcctactgaatgcttatggtgacaattgttttgatcagttgttgccaatactcgcgttcagtgtgtaattacaaaaacaagattatcagttattacaatccctcacgttcagtgcacaattacgaaaacgagattttctgtcata

SEQ ID NO: 893 - DNA, 719 bp, Enterovirus A
  source 1..719: mol_type = genomic DNA
acagggcctactgggcgctagcactctgattctacggaacctttgtgcgcctgttttataacccctcccccaaactatgtaacttagaagttatgcactctaccgatcaacagcaggcatggcgctccagccatgtctcgatcaagcacttctgtttccccggactgagtatcaatagactgctcacgtggtcgaaggagaaaacgttcgttatccgactaactacttcgagaagcctagtagcaccatcgagactgcggagcgtttcgttcagcactccccccgtgtagatcaggtcgatgagtcactgcataccccacgggcgaccgtggcagtggctgcgttggcggcctgcctatggggtgacccataggacgctctaaagtggacatggtgtgaagagcctattgagctagttagtagtcctccggcccctgaatgcggctaatcctaactgcggagcgcatgccctcgaaccagagggtagtgcgtcgtaacgggcaactctgcagcggaaccgactactttgggtgtccgtgtttctttttattcacttattggctgcttatggtgacaatcaaggaattgttaccatatagctgttggattggccatccggtgtgtaatagagcaattatctatttgtttgttggttacattccattaacatttaagtccctcaatacattacactacattttaaccctaaacgcaagaag

SEQ ID NO: 894 - DNA, 719 bp, Enterovirus C
  source 1..719: mol_type = genomic DNA
ccagaggcccacgtggcggctagtactccggtattacggtacccttgtacgcctgttttatactcccttccccgtaacttagaagaaccaaaccaagttcaatagaagggggtacaaaccagtaccaccacgaacaagtacttctgtttccccggtgaagttgtatagactgtacccacggttgaaaacgactgatccgttatccgctttcatacttcgagaagcctagtatcatcttggaatcttcgatgcgttgcgctcaacactcaaccccagagtgtagcttaggctgatgagtctggacgtccctcaccggcgacggtggtccaggctgcgttggcggcctacctgtggcccaaagcctcaggacgctagttgtgaacaaggtgtgaagagcctattgagctatgaaagagtcctccggcccctgaatgcggctaatcccaaccacggagcgagagtgtgcaaaccagcgcatttatcgtcgtaacgcgcaagtctgtggcggaaccgactactttgggtgtccgtgtttccttttatttttctacattggctgcttatggtgacaatcatagattgttatcataaagcgaattggattggccatccggtgaaagtgaaacatattattcacctccttgttggatttactccaatcaacctctccacttataagattatcatcacagtcttaccaaatagaagcatattcaaca

SEQ ID NO: 895 - DNA, 720 bp, unidentified
  source 1..720: mol_type = unassigned DNA; note = Chicken picornavirus 1 isolate 55C, complete genome.1 sequence
ctgcttaaggacgttcccggtgctgttgatgctttccgtcaggcagtggccgacttgcagaacttcctaccgaaccaccacctcacccccataactccttccctctacaccttccgctatggtggttaccactgctttattgccttgactgagaatggccaccccctcgacacctgccccctactgccccaccgcgcaaccttttgcttgtccactcggttggagaggcatgggggccccgttcatatccccagtccagttggtgaccttccccctccccgtccggtagatggtccagagggctttgccgacgccctctatgatgcttgcttgtctttcctccgtcagcgcgagcatgcacttgtcgagcccacggaaacacagcctagcttttgcttctctcaccctgcgtaccctgggcgccttccgctcgagattcgctttgttcgacaccctggcgtccccccaccgctacgtgattttactcgtggcatacaccgccctggcgttcagtacattccactgcctaatttgggtggcctccctcaatctcccgcaccccccattgcgcacgtcatcaccgccgccgctaacgcgatccggcgcggttctcactggcactgtcccctcgtccgccgggtttccactcatggttggcttttcacttattctggttactggtgttccatcctacttcatgatggtcgccatgaccatgac

SEQ ID NO: 896 - DNA, 721 bp, unidentified
  source 1..721: mol_type = unassigned DNA; note = unclassified Rosavirus sequence
gggatgggtctggtgctgcgccgcgtgtgtcttgacaccgcgctgctcaggatgcttctgccccgtgctttggacgcctaccagggcgttaaactggtcccccccttaccctttccccgtaactaagtttgtacctcccccatataggctgctaagacgcttgttgctacagcatatgtggatcagggagttctccatgagtaatcttttccaccctctctagtgtctatgctattgaggacgggttggagccccgttgacctagtgtcagagtgtgtcggtagcaggctttctgctctcgccccatgccggccacacctcccgtcagtaatgtgaagactgcaagttgcatgtgaaaaggtttctaatatttgagctgaatgtagcgattacccaaggtgagcggacttccccacgtggtaacacgtgcctctcaggccaaaagccaaggtgttaaaagcaccccttgggtagaccactaccccgtggtctcagttctcttagaagattcacttagtaatgtgtatactggcagctcccaagcagagctggcgagcgggctaaggatgccctgaaggtacccgcaggtaacgttaagacactgtggatctgatcaggggctcgagtgctgaagctttacagaggtagctcgagttaaaaaacgtctatgcccctcccccacgggagtgggggttcccccacaccaattttagattgcact

SEQ ID NO: 897 - DNA, 721 bp, unidentified
  source 1..721: mol_type = unassigned DNA; note = unclassified Picornaviridae sequence
aaactattgggtgtcaattcagaaactgcagccaaagctgaggtggtaactgactcctcaagagcagcagctgttgcagcagcattctgggcaatttgatccaaaccagtcactctatcagttgccatttttcacaccatacataaaattttcaatggaataaaagggaaaatgctcaaacatgtttttcataattttaaacccataacctggtaaagccaaactatgggtcccagatcagattcataaaatgagtaccttttggagcttggaaactccttgggaaagatgctaaaggagtatctgttacaaggttggtaacctgtcctcttttataggcaaacaactcatacataaatgaccaagacaagatctcctttgacagaacttggatgagttacttttgttccctctgtgcccagggccttaggtatggtaacatacaccctgggggccaaaagcctagtgagtcgaaactcacctggaggtgggcctttacggccacttgtccattagtatgcattggatgctgtcctgtctgaactcatttatgtgtgcaagtcttgaacatgttgagtagacccccagaaggtactcattttatgaatctgatctgggacccatagtttggctttaccaggttatgggtttaaaattatgaaaaacatgtttgagcattttcccttttattccattgaaaattttatgtatggtgtgaaaa

SEQ ID NO: 898 - DNA, 721 bp, Enterovirus A
  source 1..721: mol_type = genomic DNA
ccacccacagggcccactgggcgctagcacactgattctacggaaactttgtgcgcctgttttatacccctccccaaatgagtaacttagaagtttaatatgttcatgaccaatagcaggcgtgacacaccagtcacgtcttggtcaagcactcctgtttccccggactgagtatcaataagctgctcacgcggctgaaagagaaaacgttcgttacccggctaactacttcgagaaacctagtaacaccatgaaagttgcagagtgtttcgttcagcacttcccccgtgtagatcaggtcgatgagtcactgcaaaccccacgggtgaccgtggcagtggctgcgttggcggcctgcccatggggtaacccatgggacgctctaatacagacatggtgcgaagagtctattgagctagttagtagtcctccggcccctgaatgcggctaatcctaactgcggagcacataccctcaatccagagggcagtgtgtcgtaacgggcaactctgcagcggaaccgactactttgggtgtccgtgtttccttttatctcattatggctgcttatggtgacaattgaagaattgttaccatatagctattggattggccatccggtgtctaacagagcaattgtatttctatttgttggatttgttcctttgtcgcacacatctctcaatactttatactacattataaagttaaatacaggaag

SEQ ID NO: 899 - DNA, 721 bp, Enterovirus B
  source 1..721: mol_type = genomic DNA
cccacccatagggcccactgggcgctagcacactggtatcacggtacctttgtgcgcctgttttatttaccctcccccaactgaaaattagaagccaaactcaaacggtcaataggaaacccagtgaaccaactgggctgcgaccaagcacttctgttaccccggactgagtatcaataggctgctcgcgcggctgaaggagaaaacgttcgttacccggccaattacttcgagaaacctagtaccaccatgaaagttgcgaaacgtttcactccgcacaaccccagtgtagatcgggtcgatgagtcaccgcattccccacgggtgaccgtggcggtggctgcgttggcggcccgcccatggggcaacccatgggacgcttcaatactgacatggtgtgaagagtctattgagctaattggtagtcctccggcccctgaatgcggctaatcctaactgcggatcagacacccacacgccagtgggcagtctgtcgtaatgggcaactctgcagcggaaccgactactttgggtgtccgtgtttctttttatccttatactggctgcttatggtgacaattgaaagattgttaccatatagctattggattggccatccggtatctaacagagctattatttacttatttgttggtttcgtacctctcagtatcagagttttgagaacacttaacttcatactactgctaaacactgcaag

SEQ ID NO: 900 - DNA, 722 bp, Enterovirus B
  source 1..722: mol_type = genomic DNA
ttaaaatagcctgtgggttgctcccacccacagggcccaagtggcgtagtacttggtattccggtacctttgtacacctatttacaaaccctaccccttgtaaccttagaagcaattatttaaccgctcactagggggtgtgctatccaagcacatcaagagcaagcacttctgtctccccgggaggggctaatggtacgctgtgcccacggcggaaatgagccctaccgttaaccggcagtctacttcgggaagcccagtaactacattgaaactttgaggcgttacactcagcacataaccccaatgtgtagttctggtcgatgagccttggcatcccccacaggcgactgtggccaaggctgcgttggcggccagcctgcggaccaaaagtccgtaggacgcctaattgtggacatggtgtgaagagcctactgagctagactgtagtcctccggcccctgaatgcggctaatcctaaccctggagcatccgcgtgcaacccagtacgtagggtgtcgtaatgcgtaagtctgggatggaaccgactactttgggtgtccgtgtttcttgtttttcatactgggtcgcttatggttacaactaattgttgtaatcattggcagtgcgcgctgaccacgcgattattgatatttccatttgttggatactccaatagtgtcaactcatatacacaacttttaccactgatcaagataaaa

SEQ ID NO: 901 - DNA, 723 bp, Hepatovirus G
  source 1..723: mol_type = genomic DNA
ttcaaaagtccctccgggaatttcccggaggacttttgggccaccattgcaaggggtggttttaaccttgcacgcgtttaccgtgcgttaacggttttccatgtttgtatgtcttgtttgtattatgtgttttgtaaatattaattcctgcaggttcagggttctttaatcatgttgggctgtacccacactcaacttttggccataagtgagtttcttaacgaaccttttaacacaggatgttattagggcccaatattttccctgaggccttctttggcctctattttttccccttttctatctccttgtattccgggctcacgtgatgccaatggactgacccatgcgcccgtgggggttaactactggagtagccagtagctgtaggtgctaaaagtcacgtacgtgtaagactggacgagacctctcagctataactgaaagtagtaagtatgtctgaacttcttgaaggggtaggctacgggtgaaaccccttaggttaatactcatattgagagatacctctgataggtgaaggtttccggtagaggtgagtttaacgacaaagcctctcaacggatgtgggcccacctcatcagcaagatgctttcatacccaataccgtaggggctgggttgttgagttcagtcccaagcgtccctcccgcaaggttgtaggggtactcaggggcatttaggtttccacaattaaacaaataca

SEQ ID NO: 902 - DNA, 723 bp, Enterovirus A
  source 1..723: mol_type = genomic DNA
ccacccacagggcccactgggcgttagcactctggtaccacggtacctttgtgcgcctgttttatccccccaaacccccgtaacactacactagaagatagacaatgcgaccaatagccagtggggcaacccagcctcaccttggtcaagcacctctgttttcccgggcttagtaccaataagctgctcgcgtggctgaaggggaacgcgctcgttatccggctaactacttcgagaaacctagtatcaccatggaagttgcagagtgtttcgatcagcacaaccccagtgtagatcaggccgatgagtcaccgtgtaccccacgggcgaccgtgacggtggctgcgttggcggcctgcccatggagtacaccatgggacgctctaatacagacatggtgcgaagagtctattgagctagttagtagtcctccggcccctgaatgcggctaatcctaactgcggagcacgcgctctcaacccagagagtagcgtgtcgtaacgggcaactctgcagcggaaccgactactttgggtgtccgtgtttctctttattcttacattggctgcttatggtgacaattgaaagattgttaccatatagctattggattggccatccggtgtgcaacagagctatcatatattcttttgttggctttgtgccactagattatactgcaattattactttaaggtatatcttgcttttgaacacagcaaa

SEQ ID NO: 903 - DNA, 723 bp, Enterovirus B
  source 1..723: mol_type = genomic DNA
ggttgcccacccacagggcccactgggcgctagcacactggtatcacggtacctttgtgcgcctgttttatccaccctccccaacgtaacttagaagcttatttaaaccgaccaacagacggtccagcataccagctgggttacggtcaagcacttctgttaccccggactgagtatcaataggccgctcgcgcggctgaaggagaaaacgttcgttacccggccaattacttcgagaaacctagtaccaccgtggaggtcgcgaagtgtttcgctccgcacaaccccagtgtagatcaggtcgatgagtcaccgcattccccactggcgacagtggcggtggctgcgtggcggcctgcccatggggtaacccatgggacgcttcaatactgacacggtgtgaagagtctattgagctaattggtagtcctccggcccctgaatgcggctaatcctaactgcggagcagatatccacgagccagtggacagtctgtcgtaatgggtaactctgcagcggaaccgactactttgggtgtccgtgtttccatttattcctatactggctgcttatggtgacaattgagagattgttaccatatagctattggattggccatccggtgacaaacagagcaattatatatctctttgttggttatattccactcaacattaaggttttaagaacgcttaattacatcctattgttaaacacattaag

SEQ ID NO: 904 - DNA, 723 bp, Enterovirus B
  source 1..723: mol_type = genomic DNA
ttcccactcacagggcccactgggcgctagcacactggtatcccggtacctttgtgcgcctgttttataccccctcctccaaccgtaacctagaagcagcaccatatggccaatagtagacgtggcgcaccagccacgttttggtcaagcacttctgtttccccgggccgagtatcaataggctgctcacgcggctgaaggagaaagcgtccgttacccggccaattacttcgagaaacctagtaccaccatggaagttgcgcggcgtttcgctccacacaaccccagtgtagatcgggtcgatgagtcaccgcatttccccacgggtgaccgtggcggtggctgcgttggcggcctgcccatgaggaaactcatgggacgcttcaatactgacatggtgtgaagagtctattgagctaattggtagtcctccggcccctgaatgcggctaatcctaactgcggagcagatgctcacaaaccagtgggtggtctgtcgtaatgggcaactctgcagcggaaccgactactttgggtgtccgtgtttccttttattttcacactggctgcttatggtgacaattgaaggattgttaccatatagctattggattggccatccggtgacaaacagagcgattgtctatctatttgttggttttgtaccattagatttcaaagtcctgaaaaccctcaatttcgtcttaacactcaattcggcaag

SEQ ID NO: 905 - DNA, 723 bp, unidentified
  source 1..723: mol_type = unassigned DNA; note = unclassified Enterovirus sequence
tgatcccacccatagggcccactgggcgccagcacactggtattacggtacctttgtgcgcctgttttatctaccccccccaacgcaactcagaagctcaactgaaccgaccaatagatgacccggcaagccagcagggccctggtcaagcacttctgttaccccggactgagtatcaataagctgctcgcgcggctaaaggagaaaacgttcgttacccggccaattacttcgagaaacccagtaccaccgtgaaagttgcgcagtgtttcgctccgcacaaccccagtgtagatcaggccgatgagtcaccgcattccccactggtgacagtggcggtggctgcgttggcggcctgcccatggggcaacccatgggacgcttcaatactgacacggtgcgaagagtctattgagctaattggtagacctccggcccctgaatgcggctaatcctaactgcggagcagatacccacgcgccagtgggcagtctgtcgtaatgggcaactctgcagcggaaccgactactttgggtgtccgtgtttccttttattcttatactggctgcttatggtgacaattgaaagattgttgccatatagctattggattggccatccagtgactaacaaagcaattgtctatctatttgttggttttataccattaaactacaaagctataagcacactcaaatttatattggtactcaactcagcaaa

SEQ ID NO: 906 - DNA, 724 bp, Enterovirus A
  source 1..724: mol_type = genomic DNA
ccacccgcagggcccactgggcgccagcactctgattctgcggaatctttgtgcgcctgttttataaccccttccccaaatttgcaatttagaagcaaagcacactaacgatcaacagcaggcgtggcataccagctacgtcacgatcaagcacttctgtttccccggactgagtatcaataagctgcttgcgcggctgaaggagaaaatgtccgttatccggctaactacttcgagaaacctagtagcaccattgaagctgcagagtgtttcgctcggcacttcccccgtgtagatcaggtcgatgagtcactgcactccccacgggcgaccgtggcagtggctgcgttggcggcctgcctatggggcaacccataggacgctctaatgtggacatggtgtgaagagtctattgagctagttagtagtcctccggcccctgaatgcggctaatcctaactgcggagcgcatgcccccaaaccagggggaggtgcgtcgtaatgggcaactctgcagcggaaccgactactttgggtgtccgtgtttccttttatctttatattggctgcttatggtgacaattgagagattgttaccatatagctattggattggccatccggtgagcaatagagcaattatttattcctttattggatttgtaccgttgaattatactgcttttattacactgaaacacatcctattgttgaacacaataaa

SEQ ID NO: 907 - DNA, 724 bp, Enterovirus C
  source 1..724: mol_type = genomic DNA
ggggttgttcccaccccagaggcccacgtggcggccagtacaccggtatcacggtacccttgtacgcctgttttatactcccttccccgtaacttagaagtaacaaacctatgttcaatagaagggggtacaaaccagtaccaccacgaacaagcacttctgtttccccggtgagatcacatagactgttcccacggttgaaagtgatcgatccgttatccgctcttgtacttcgagaagcctagtattatcttgggaccaacgatgcgttgcgatcagcactcgaccccagagtgtagcttaggtcgatgagtctggacattcctcaccggtgacggtggtccaggctgcgttggcggcctacctgtggcccaaagccacaggacgctagttgtgaacaaggtgtgaagagcctattgagctacatgagagtcctccggcccctgaatgcggctaatcctaaccacggagcaggcgattgcaaaccagcaattagcttgtcgtaatgcgtaagtctgtggcggaaccgactactttgggtgtccgtgtttccttttattttatcaatggctgcttatggtgacaatcatagattgttgtcataaagcgaattggattggccatccggtgacgttcagagttatttgtttgtgaaattcattctctcaatcctgtccacatttgacatacttccttaaatctttatacagaacaccttaacaca

SEQ ID NO: 908 - DNA, 724 bp, Enterovirus C
  source 1..724: mol_type = genomic DNA
caccccagaggcccacgtggcggctagtactccggtatcacggtacccttgtacgcctgttttatgctcccttccccttgtaacttagaagcaaacaacactagttcaataggagggggtacaaaccagtaccaccacgaacacgcacttctgtttccccggtgaagctgcataagctgttcccacggctgaaagcgactgatccgtcatccgctcaggtacttcgggaagcctagtaccatcttggaatcttcgatgcgttgcgctcagcactcaaccccagagtgtagcttaggctgatgagtctggatgtgcctcactggtgacagtggtccaggctgcgttggcggcctacccatggcccaaagccatgggacgctagttgtgaacaaggtgtgaagagcctactgagctacctgagagtcctccggcccctgaatgcggctaatcccaaccacggagcgagtgcccacaatccagtgagtggctcgtcgtaatgcgcaagtctgtggcggaaccgactactttgggtgtccgtgtttccttttaaccttattatggctgcttatggtgacaatcatagattgttatcataaagcgaattggattggccatccggtgaaagtcagaacgctaatttatctgtttgttggatacaccaaagttaactgcaatacactaaccttgattcgcatagtgttgttaattagatatcattaccaca

SEQ ID NO: 909 - DNA, 725 bp, unidentified
  source 1..725: mol_type = unassigned DNA; note = unclassified Sapelovirus sequence
tggggaggtgcctcctccccattgcagagtgctttgtcctacgggtcaagtacctgccgttgttggtgttcccacgggtgcagtcagcaaagcccccttttcgccccttccccctcacctaacctttttcccctctctttggcaagcgatgaaaggattacgagcaaggtttgcggaagaattgttatggcgattgcggaagaatatggattaaggattttccacgtaccttagatgatcataggtggctttcacctctggaccagtgatcaaacgtggaccatagtttaagtgaagtaagcatgttccaggtgaaaacgcatattgaaatgaacgtgtctgtagcgacctccaagtgcgcatggcctcccatgatggtgacatcatccatgcggaccaaaagtcaagtgtgcagtgacgtgcgaataatagactgtacccacggttgaagattcgcacggcatgagttcaccacttggagcggccgaccccgggccacacgggattggagatgtgcttgagtaatctggaagaggcttatataaacactctatgggggctgtgaagaatgccatgcaggtaccctcacacagaggatctgagcattgggccacggagacgatctataaactcgaagtggttgaaaagtatctaagcagcccgcaaggggcccatggttgggcccctctattttccccttattattttatcagtggtgacaatag

SEQ ID NO: 910 - DNA, 725 bp, Enterovirus A
  source 1..725: mol_type = genomic DNA
ttcccacccacagggcccactgggcgctagcacactgattctacggaaactttgtgcgcctgttttatacctcctccccgaagagtaacttagaagcttaacatacccatggccagcagcaggcgtgacataccagtcatgccccggtcaagcacttctgtctccccggactgagtatcaatagactgctcgcgcggttgaaggagaaaacgttcgttatccggctaactacttcgagaaacctagtaacaccatgaaagttgcagagtgtttcgttcagcacttcccccgtgtagatcaggtcgatgagtcactgcaaaccccacgggcgaccgtggcagtggctgcgttggcggcctgcccatgggaccacccatgggacgctctaatacagacatggtgtgaagagtctattgagctagttagtagtcctccggcccctgaatgcggctaatcctaactgtggagcacacgccctcaacccagggggtagtgtgtcgtaatgggcaactctacagcggaaccgactactttgggtgtccgtgtttccttttatctttatattggctgcttatggtgacaattgaagaattgttaccatatagctattggattggccatccggtgtctaatagagcaattgtatacctatttgttggatttgtccccttgtcatacacatctataaacaccctacaatatattgtaaaattgaatacaggaaa

SEQ ID NO: 911 - DNA, 725 bp, Enterovirus A
  source 1..725: mol_type = genomic DNA
ccacccacagggcccactgggcgttagcacactgattctaaggaatctttgtgcgcctgttttatatccctcccccccaaaagtgtaacgtagaagtttaatacactcacgaccaatagcaggcgtgacgcaccagtcacgtcttggtcaagtacttctgtctccccgggccaagtatcaatagactgcttacgcggttgaaggagaaaacgctcgttacccggctaactacttcgagaaacccagtagcaccatgaaagttgcagggtgtttcgttcagcacttcccccgtgtagaccaggtcgatgagtcactgcaaaccccacgggcgaccgtggcagtggctgcgttggcggcctgcccatggggtaacccatgggacgctctaatacagacatggtgtgaagagtctattgagctagttagtagtcctccggcccctgaatgcggctaatcctaactgcggagcacacaccctcaacccagggggcggtgtgtcgtaacgggtaactctgcagcggaaccgactactttgggtgtccgtgtttccttttatatttattatggctgcttatggtgacaattgaagaattgttaccatatagctattggattggccatccggtgtctaacagagcaattgtatacctatttgttggatttgtccctctgtcacacacacctctcaataccctatactatattatagagttgaatacaggaag

SEQ ID NO: 912 - DNA, 725 bp, Enterovirus A
  source 1..725: mol_type = genomic DNA
ttgctcccacccacagggcccactgggcgctagcaccctggtgccacggcacctttgtgcgcctgttttatcaccctaccccatatgaaacttagaagtaatacatagccgaccaatagcaggtgtggcgtgccagccacatcttggtcaagcacttctgtttccccgggtcgagtatcaataagctgttcacacggctgaaggagaaaacacccgttatccggccaactacttcgagaaacctagtaccaccatgaacgttgcaaggtgtttcgctcagcacttcccccgtgtagatcaggccgatgagtcaccgcataccccacgggtgaccgtggcggtggctgcgttggcggcctgcctatgggttaacccataggacgccttaatactgacatggtgcgaagagtctattgagctagttggtagtcctccggcccctgaatgcggctaatcctaactgcggagcacacactcacaaaccagtgagcggtgtgtcgtaacgggcaactctgcagcggaaccgactactttgggtgtccgtgtttccttttacctttatattggctgcttatggtgacaatcagagaattgttaccatatagctattggattggccatccggtgtctaatagagctattgtatatctgtttgttggattcactccgctgacctacaaatctctaaacaccttgtgctatattttgaatctaaatacacgaaa

SEQ ID NO: 913 - DNA, 725 bp, unidentified
  source 1..725: mol_type = unassigned DNA; note = unclassified Enterovirus sequence
ttaaaatagcctgagggttgttcccacccacagggcccacgtggcgcagtactctggtatcacggtacctttgcacgcctattttataccccttccccatcgtaacttagaagcaacaaacaaactgcccaatagcagcacaacacccagttgtgttaggggcaagcacttctgtttccccggaagggtctgacggtatgctgtacccacggcagaagtatgacctaccgttaaccggccatgtacttcgagaagcctagtaccattatgaaggttgattgatgttacgctccccagcaaccccagctggtagttctggtcgatgagtctcggcattccccacgggcgaccgtggccgaggctgcgttggcggccagcctacaccatacggtgtaggacgtcaagatactgacatggtgtgaagagcctattgagctacgtggtagtcctccggcccctgaatgcggctaatcctaactccggagcatccgccagtaagcccactggaagggtgtcgtaatgcgaaagtctggagcggaaccgactactttgggtgtccgtgtttcctgttttacttattgtttggctgcttatggtgacaacttatagttatcatcataagctacttggtcttgccaaccggagaattatttggttatttgttggtttcataaacctacagtcgtattttcctgtcttattaattgttctcaaaattaacaaca

SEQ ID NO: 914 - DNA, 725 bp, unidentified
  source 1..725: mol_type = unassigned DNA; note = unclassified Enterovirus sequence
ttcccaccctagaggcccacgtggcggctagtactctggtattacggtacctttgtacgcctgttttatattccttcccctatcgtaacttagaagtttcaaacacagctcaacagacagtagtacataccagtactgctacgagcaagcacttctgttaccccggtgaagtcacatagactgtgcccacggttgaaagtgactgatccgttacccgctttagtacttcgagaagcctagtaatatcttggaatcttcgatgcgttgcgctcaacactcaaccccagagtgtagcttaggtcgatgagtctggacactccccaccggcgacggtggtccaggctgcgttggcggcctacctgtggcccaaagccacaggacgctagttgtgaacaaggtgtgaagagcctattgagctactaaagagtcctccggcccctgaatgcggctaatcccaaccacggagcaagtgctcacaatccagtgagtggcttgtcgtaacgagcaattctgtggcggaaccgactactttgggtgtccgtgtttccttttatttttatcattggctgcttatggtgacaatctaagattgccatcatatagcttttggattggccatccggtgatattttgaattactcagcttgctgttcacagcactcttcaaatagtaattatttattaccacctgcagtttgttcttaaattgtctccagacagtcaaa

SEQ ID NO: 915 - DNA, 725 bp, unidentified
  source 1..725: mol_type = unassigned DNA; note = unclassified Enterovirus sequence
atcccacccacagggcccattgggcgctagcacaccggtattacggtacccttgtgcgcctgttttatacaccctacccccaaaacgtaatttagaagcaagtcaacaaagaccaatagcaagcacggcacaccagctgtgttttggtcaagcacttctgttaccccggactgagtatcaataggctactcacgtggctgaaggagaaaacgttcgttatccgtccaattacttcgagaagcctagtaacaccatagaggttgcgcagcgtttcgctccgcactaccccagtgtagatcaggtcgatgagtcaccgcattccccacgggtgaccgtggcggtggctgcgttggcggcctgcccatggggcaacccatgggacgcttcaatactgacatggtgcgaagagcctattgagctaattggaagtcctccggcccctgaatgcggctaatcctaactgcggagctggtacccacaaaccagtgggtggccagtcgtaacgggcaactctgcagcggaaccgactactttgggtgtccgtgtttcattttattcctatactggctgcttatggtgacaattgaaagattgttgccatatagctattggattggccatccggtgacaaataaagcgattgtttatcagttcattggtttcgtaccgctaaactacacaacattaaacaccctcaactttatcctattgctcaacacaacaag

SEQ ID NO: 916 - DNA, 726 bp, Enterovirus A
  source 1..726: mol_type = genomic DNA
gtacccaccctcagggcccactgggcgctagcactctgattctgcggaatccttgtgcgcctgttttataaccctcccccgattcgtaacttagaagcaatgagcctcactgatcaacagtaggcgcggcgcaccagccgtgtcttgatcaagcactcctgtttccccgggctgagtatcaatagactgcttgcgcggttgaaggagaaaacgctcgttacccggctaactacttcgagaaacctagtagcaccatcgaaattgcagagtgtttcgctcagcacttcccccgtgtagatcaggtcgatgagtcactgcaacccccacgggcgaccgtggcagtggctgcgttggcggcctgcctatggggcaacccataggacgctctaaaatggacatggtgtgaagagtctattgagctagttagtagtcctccggcccctgaatgcggctaatcctaactgcggagcgcatgcccccaaaccagagggtggtgcgtcgtaacgggcaactctgcagcggaaccgactactttgggtgtccgtgtttccttttattcttactatggctgcttatggtgacaattgaagaattgttaccatatagctattggattggccatccggtgtctaatagagctattgtatatttatttgttggatttgttccattgacatatacatcacttaatacattaaacttcattgtgagattaaacacaagaaa

SEQ ID NO: 917 - DNA, 726 bp, Enterovirus C
  source 1..726: mol_type = genomic DNA
ttaaaacagctctggggttgttcccaccccagaggcccacgtggcggccagtacaccggtatcacggtacccttgtacgcctgttttatactccctaccccgtaacttagaagcattgactcaagttcaatagtaggggtacaaaccagtaccaccacgaacaagcacttctgtttccccggtgatgtcgtatagactgtacccacggttgaaagtgacagatccgttacccgcttttgtacttcgagaagcccagtaccaccttggaatcttcgatgcgttgcgctcagcactcaatcccagagtgtagcttaggtcgatgagtctggacgttcctcaccggcgacggtggtccaggctgcgttggcggcctacctgtggcccaaagccacaggacgctagttgtgaacaaggtgtgaagagcctattgagctacaaaagagtcctccggcccctgaatgcggctaatcctaaccacggagcaggtgatcacaagccagtgattagcctgtcgtaatgcgcaagtctgtggcggaaccgactactttgggtgtccgtgtttccttttatttcatttatggctgcttatggtgacaatcatagattgttgtcataaagcgaattggattggccatccggtgagagtttagcgctttatttgtctgctcatcgaacttgcacttttgaattcttaccccttgcaccttattagacagtggtatcatc

SEQ ID NO: 918 - DNA, 726 bp, Enterovirus C
  source 1..726: mol_type = genomic DNA
gttcccaccccagaggcccacgtggcggccagtacaccggtattacggtacccttgtacgcctgttttatactccctaccccgtaacttagaagcaaaaactcaagttcaatagcaggggggtacaaaccagtaccaccacgaacaagcacttctgtttccccggtgacttcgcataaactgtacccacggttgaaagcgatagatccgttatccgcttttgtacttcgagaagcctagtaccatcttggaatcttcgatgcgttgcgatcagcactcaaacccagagtgtagcttaggtcgatgagtctggacgatcctcaccggcgacggtggtccaggctgcgttggcggcctacctgtggtccaaagccacaggacgctagttgtgaacaaggtgtgaagagcctattgagctacaaaagagtcctccggcccctgaatgcggctaatcccaaccacggagcaggcgatcacaacccagtgactagcctgtcgtaatgcgcaagtctgtggcggaaccgactactttgggtgtccgtgtttctctttattccattaatggctgcttatggtgacaatcatagattgttatcataaagcgattcggattggccatccagtgaaaatcaagtgtactactcacttatttattgagtttacaactctaacccatcactcactacaacccattttattgtgtcactatccagacagtggtatcatc

SEQ ID NO: 919 - DNA, 726 bp, Enterovirus B
  source 1..726: mol_type = genomic DNA
ttcccacccacaaggcccaccgggcgttggcacactggtatcacggtacctttgtgcgcctgttttaaaacccctacccccaaacgcaacttagaagataagcacacagtccaatagagggcgtggcactccagccatgtcttggacaggcactcctgttaccccggactaagtaccaataaactgctcacgcggttgaaggggaaaacgttcgttatccggctaactacttcgaggaacctagtaacaccgtgaaagttgcagagtgtttcgctcagcacaaccccagtgtagatcaggtcgatgagtcaccacgttccccacgggcgaccgtggtggtggctgcgctggcggcctgcctatgggtcaacccataggacgctctaacacagacacggtgtgaagagtcgattgagctagttagtagtcctccggcccctgaatgcggctaatcctaactgcggagcgtgcgtccccaaaccaggagatagcgcgtcgtaacgggcaactctgcagcggaaccgactactttgggtgtccgtgtttccttttttttacctctatttggctgcttatggtgacaattgaagaattgttaccatatagctattggattggccatccggtgactaatagagctattgtttacctctttgttggttttgtaccactgaacctcatagttctaaatacccttaatttgattttagtgcttaacacatcaaa

SEQ ID NO: 920 - DNA, 727 bp, Enterovirus D
  source 1..727: mol_type = genomic DNA
ttaaaacagctctggggttgttcccaccccagaggcccacgtggcggctagtactccggtaccccggtacccttgtacgcctgttttatactccctttcccaagtaactttagaagaaataaactaatgttcaacaggagggggtacaaaccagtaccaccacgaacacacacttctgtttccccggtgaagttgcatagactgtacccacggttgaaagcgatgaatccgttacccgcttaggtacttcgagaagcctagtatcatcttggaatcttcgatgcgttgcgatcagcactctaccccgagtgtagcttgggtcgatgagtctggacaccccacaccggcgacggtggtccaggctgcgttggcggcctacccatggctagcaccatgggacgctagttgtgaacaaggtgcgaagagcctattgagctacctgagagtcctccggcccctgaatgcggctaatcccaaccacggagcaaatgctcacaatccagtgagtggtttgtcgtaatgcgcaagtctgtggcggaaccgactactttgggcgtccgtgtttccttttatttttattatggctgcttatggtgacaatctgagattgttatcatatagctattggattagccatccggtgatatcttgaaattttgccataactttttcacaaatcctacaacattacactacactttctcttgaataattgagacaactcata

SEQ ID NO: 921 - DNA, 728 bp, unidentified
  source 1..728: mol_type = unassigned DNA; note = unclassified Enterovirus sequence
ttcccaccctagaggcccacgtggcggctagtactctggtattacggtacctttgtacgcctgttttatatccctttccccattgtaacttagaagtttcaaagtacagttcaatagacagtagtacaaaccagtactgctacgaacaagcacttctgttgccccggtgtagttgcatagactgtacccacggttgaaagcaactgatccgttatccgctttagtacttcgagaagcctagtagcaccttgggatcttcgatgcgttgcgctcagcactcaaccccagagtgtagcttgggtcgatgagtctggacattcctcaccggcgacggtggtccaggctgcgttggcggcctacctgtggcccaaagccacaggacgctagttgtgaacaaggtgtgaagagcctattgagctactaaagagtcctccggcccctgaatgcggctaatcctaaccacggagcaagtgctcacagtccagtgagtagcttgtcgtaatgagcaattctgtggcggaaccgactactttgggtgtccgtgtttccttttatttttatcattggctgcttatggtgacaatctaaggttgccatcatatagcttttggattggccatcccggtgatatttcgaattattcaatttgctgtttgcagctccttttaaacagtattcactcaccagcattcatattttactcttgagttattaacaaatagtcaaaa

SEQ ID NO: 922 - DNA, 729 bp, Aichivirus B
  source 1..729: mol_type = genomic DNA
attcccaaggcccactcggttcaacttcggtttccggacaaatataaagaacctcagtcctcttggtactttctcgcctgagtcaacaaagcgagaaacctgcccctccagcgccagacgagcggcataaaacttgaacttctggcatgctccaccacccttttccccattccaacccccattgcgctctcaaggtcgcgctttttcgagactagctcggattcaaaagttcctggcaccctttgccccttcaggcccttaaggtaggaactgaccttgtgctgtgccctcggtgcggaagtgctactgcgtagcgattgtaagatccctttgtggttctgccctggcaaggttatagagtactgtgatccgctgcggatgccatcctggtaacaggacccccagtgtgcgcaacagtatgttcacggtcttccgtgtccaccacattcggaacactgctctcgtgaaacagtgtgtgtccaatccctgcaatcagtatcaactacaccacctaggaatgctaggaaggtaccccggtccgccgggatctgatcctaggctaattgtctacggtggtgctcctttttattttccacttcaattcattggttacaactgctcgatccctgtgtttgctgcccttctctgctctcatcgccattctcaagtgttcacactgtccaagttcctttggttgttcgcttccacttgccactgtcaactcttgtc

SEQ ID NO: 923 - DNA, 729 bp, Enterovirus A
  source 1..729: mol_type = genomic DNA
gttgcacccacccacagggcccaccgggcgctagcactctgattttacgaaatctttgtgcgcctgttttatatccccttccctattcgtaacttagaagtaatgagcaacaacgatcaatagcaggcgtggcgcaccagccatgtcttgatcaagcacttctgttaccccggactgagtatcaatagactgctcacgcggttgaaggagaaaacgttcgttacccggctaaccacttcggaaaacctagtagcaccattgaagctgcagagtgtttcgctcagcacttcccccgtgtagatcaggtcgatgagtcactgcaacccccacgggcgaccgtggcagtggctgcgttggcggcctgcctatggggtaacccataggacgctctaatgtggacatggtgtgaagagtctactgagctggttagtagtcctccggcccctgaatgcggctaatcctaactgtggagcgcacactctcaaaccagggagcagtgcgtcgtaacgggcaactccgcagcggaaccgactactttgggtgtccgtgtttccttttatccttatattggctgcttatggtgacaatcacggaattgttgccatatagctattggattggccatccggtgtctaatagagctattgtgtacctatttgttggatttactccactgtcatataaatctctgaacactttgtgctttatattgaacttaaacacacgaaa

SEQ ID NO: 924 - DNA, 729 bp, Enterovirus C
  source 1..729: mol_type = genomic DNA
ttaaaaacagctctggggttgttcccaccccagaggcccacgtggcggctagtactctggtattacggtacctttgtacgcctgttttatatcccctttcccctgtaactcagaagcatgaagtttaagctcaacaggaggggtgcaaaccagcacctctacgagcaagcactactgtttccccggtgaagttacatagactgttcccacggttgaaagtgattgatccgttatccgctcatgtacttcgagaagcctagtatcgctctggaatcttcgatgcgttgcgctcaacactcgaccccggagtgtagcttaggccgatgagtctggacattccccactggcgacagtggtccaggctgcgttggcggcctacctgtggtccaaagccacaggacgctagttgtgaacagggtgtgaagagcctattgagctgcatgagagtcctccggcccctgaatgcggataatcctaaccatggagcaggcaactgcaacccagcagtcagcctgtcgtaacgcgtaagtccgtggcggaaccgactactttgggtgtccgtgtttccttttatttttgaatggctgcttatggtgacaatcacagattgttatcataaagcaaattggattggccatccagtgaatcactaccgagtttgttaaatctatttcagagacacacaactcctcaacgcactatacctaaacagaggattatactacagcg

SEQ ID NO: 925 - DNA, 729 bp, Enterovirus B
  source 1..729: mol_type = genomic DNA
catgctcccacccatagggcccactgggcgtcagcacactggtattgcggtacctttgtgcgcctgttttatccaccccaccccctcaacgtaacttagaagcacatcccacacggtcaatagttggctcgataagccaatcgagtctggatcaagcacttctgttaccccggactgagtatcagtaagctgcttgcgcggctgatggagaaaacgttcgttacccggccatttacttcgggaaacctagtaccaccatgaatgttgcgcagcgtttcgctccacactaccccagtgtagatcaggtcgatgagtcactgcataccccacgggcgaccgtggcagtggctgcgctggcggcctgcccatggggcaacccatgggacgcttcaatactgacatggtgcgaagagtctactgagctaagtggtagtcctccggcccctgaatgcggctaatcctaactgcggagcagatacccacgaaccagtgggcagtctgtcgtaatgggcaactctgcagcggaaccgactactttgggtgtccgtgtttccttttattctaatactggctgcttatggtgacaattgaacgattgttaccatatagctattggattggccatccggtgacaaacagagcgattatatactcatttgttgggttcgtaccacttaattacaaagttctaaacacccttaactatatactagcactcaacacatcaaa

SEQ ID NO: 926 - DNA, 730 bp, unidentified
  source 1..730: mol_type = unassigned DNA; note = unclassified Hepatovirus sequence
ttcaaaggcggtgtcccggattgtttccgggccgcctttgggcaaccatgatgaggggttgtaaatcacctcatccccgtttgcctagggtgataggctttttatgttttatgtttgttggtctagttcgtcaattgtaaatattgatttctgcaggttcagagttcttaattatgttcctctataaggacactctctttaagtctaggccataagtgatcctagagataggtgaacctttcatatctggtctatgttagggcctttatatccctaggggcaatctttgtgccccttatttctcctatctttcttcttttcttccgggctctcacggtgccaatggaacgaccggtgcgcccgccggggttaactccaagattagcttggagctgtagttgctaaaagccgtgatgaaggaagcagactatcaagttagttaggtgttaactgaaacatgaattctattatgatctttgtgagtgggtaggctacgggtgaaacccactaggttaatactcatattgagagatacctccattaggctaaggttggcggtaaaggtgagtttaacgacgtatcctttcaacgcctgtgggccggtctcaatggcacaatgcgtagtagatgaagtgtgtagggcctactaaggagatgctctgtggaattcaccctcccgaaaggtcgtaggggtactcaggggcatttaggtttccacattttaaatttc

SEQ ID NO: 927 - DNA, 730 bp, Enterovirus A
  source 1..730: mol_type = genomic DNA
tttaaaacagcctgtgggttgtacccactcacagggcccacgtggcgttagtactctggtatcacggtacctttgtatgcctgttttatctcccttcccccgtaacgttagaagaataaacaaatgacaactagcaaatccaccaacccaggtgggttttcgtcaagcacttctgtttccccggacttagtaccaataggctgtacccacggctgaaggggaaaatgttcgttacccggctacctacttcgaaaagcctagtaccaccaatgattgtctcaagtgttacgttcagcacaaccccagtgtagttcaggccgatgagtcaccgaattccccacgggcgaccgtgtcggtggctgcgttggcggcctgcctgcgggtttcacccgcaggacgcttgattcatgacatggtgcgaagagcctattgagctaggtagtagtcctccggcccctgaatgcggctaatcctaaccacggagcattcactggcaaaccagccagcagaatgtcgtaatgggtaactctgtggcggaaccgactactttgggtgtccgtgtttcctgttttacttattttggctgcttatggtgacaatttacggattgttaccatatagctattggattggccatccggattattgcaatactactatttgtgggatttctccctttgtgttataataactaccccattctaacattagctctcaagtttaatacact

SEQ ID NO: 928 - DNA, 730 bp, Enterovirus A
  source 1..730: mol_type = genomic DNA
tgcacccacccacggggcccactgggcgccagcactctgattctacggaatccttgtgcgcctgttttataaccccccccctcaattaggtaacatagaagttagaaacatatatggccaatagcaggcgtggcgcaccagtcgcgtctcggtcaagcacttctgtttccccggactgagtatcaataagctgctcgcgcggctgaaggagaaaacgttcgttatccggctaactacttcgagaaacctagtagcaccatgaaagttgcggagtgtttcgctcagcacttcccccgtgtagatcaggtcgatgagtcactgcattccccacgggcgaccgtggcagtggctgcgttggcggcctgcctatggggtaacccataggacgctctaatacggacatggtgcgaagagtcaattgagctagttagtagtcctccggcccctgaatgcggctaatcctaactgcggagcacataccctcaatccagggggcggtgtgtcgtaatgggcaactctgcagcggaaccgactactttgggtgtccgtgtttccttttattcttatattggctgcttatggtgacaattgagagattgttaccatatagctattggattggccatccggtgtccaacagagctctggtttacttgttcgttggctttatacctctgtcacccacagtttattcaactctagtgttcttaatacgccttaacagtaagag

SEQ ID NO: 929 - DNA, 730 bp, Enterovirus A
  source 1..730: mol_type = genomic DNA
gttgcacccacctacagggcctactgggtgctagcactctgattctacggaatctttgtgcgcctgttttataaccccctccccaatttgtaacttagaagcaatgaaccccatcgatcaatagcaggcataacgcaccagttatgtctcgatcaagcacttctgttttcccggactgagtatcaatagactgcttgcgcggtcgaaggagaaaacgttcgttacccggctaactacctcgagaagcctagtagcaccactgaaactgcagagtgtttcgttcaacacttcccccgtgtagatcaggtcgatgagtcactgctctccccacgggtgaccgtggcagtggctgcgttggcggcctgcctatggggtaacccataggacgctctgaagtggacatggtgtgaagagcctattgagctagttagtagtcctccggcccctgaatgcggctaatcctaactgtggagcgcatgccctcaaaccagggggtggtgcgtcgtaacgggtaactccgcagcggaaccgactactttgggtgtccgtgtttccttttattatcctattggctgcttatggtgacaattaaagaattgttaccatatagctattggattggccatccggtgtgtaatagagcgattatctacctatttgttggatacattccgttaacattcaaatctctcaacacattatactacattctgaccttgaacacaagaaa

SEQ ID NO: 930 - DNA, 730 bp, unidentified
  source 1..730: mol_type = unassigned DNA; note = unclassified Enterovirus sequence
ggggttgttcccaccccagaggcccacgtggcggctagtacactggtatcacggtacctttgtacgcctgttttatactccttcccccgcaatttagaagcatacaattcaagctcaataggagggggtgcaagccagcgcctccgtgggcaagcactactgtttccccggtgaggccacatagactgttcccacggttgaaagtgtccgatccgttatccgctcatgtacttcgagaagcctagtatcgctctggaatcttcgacgcgttgcgctccacactcagtcccagagtgtagcttaggctgatgagtctggacattcctcaccggcgacggtggtccaggctgcgttggcggcctacctgtggcccaaagccacaggacgctagatgtgaacaaggtgtgaagagcctattgagctataagagagtcctccggcccctgaatgcggctaatcccaaccatggagcaggcagccgcaatccagcagccagcctgtcgtaacgcgcaagtctgtggcggaaccgactactttgggtgaccgtgtttccttttattatttcaatggctgcttatggtgacaatcatagattgttatcataaagcgagttggattggccatccagtgtgaatcggattatttactcccttgtttgttggattcactcccgaaacgttttaccccttaacttattgaaattgtttgaagacaggatttcagtgtcaca

SEQ ID NO: 931 - DNA, 731 bp, unidentified
  source 1..731: mol_type = unassigned DNA; note = unclassified Salivirus sequence
gtgtttctcccccctttcgaccgccctatggcaggcgggcttgtggacggcttcggcccacccacagcaagaatgccatcatctgtcctcacccccatcttcccctttcttcccctgcaaccgtcacgcttactcacatgtgcattgagtggtgcacgtgttgaacaaacagctacactcacatggggcgggttttcccgccttgcggcctctcgcgaggcccacccctccctctcctcccataactacagtgctttggtaggtaagcatcctgatcccccgcggaagctgctcacgtggcaactgtggggacccagacaggttatcaaaggcacccggtctttccgccttcaggagtatccctgctagtgaattctagtagggctctgcttggtgccaacctcccccaaatgcgcgctgcaggagtgctcttccccaactcaccctagtatcctctcatgtgtgtgcttggtcagcatatctgagacgatgttccgctgtcccagaccagtccagtaatggacgggccagtgtgcgtagtcgtcttccggcttgcccggcgcatgtttggtgaaccggtggggtaaggttggtgtgcccaacgcccgtactttggtgatacctcaagaccacccaggaatgccagggaggtaccccgcttcacagcgggatctgaccctgggctaattgtctacggtggttcttcttgcttccacttctttctactgttt

SEQ ID NO: 932 - DNA, 731 bp, unidentified
  source 1..731: mol_type = unassigned DNA; note = unclassified Enterovirus sequence
ttaaaatagcctgagggttgctcccacccacggggtccacgtgacgtagtactctggtatctcggtacctttgtacgcctattttatatccccttccccctttgtaacttagaagaaataagcaaactgcccaatagcggcacaatacccaattgtgttacgggcaagcactcctgtttccccggaagggtctatcggtatgctgtacccacggcagaagtatgacctaccgttaaccggccatgtacttcgagaagcctagtaccaccatgaaggttgattgatgttacgttccccagcaaccccagctggtagttctggtcgatgagtctcggcatcccccacgggcgaccgtggccgaggctgcgctggcggccagcctacacctctttggtgtaggacgtcaagatattgacatggtgtgaagagcctattgagctacgtggtagtcctccggcccctgaatgcggctaatcctaactccggatcgtccgctggcaatcccgccagaagggcgtcgtaatgcgcaagtctggagcggaaccgactactttgggtgtccgtgtttcctgttttatttactgtttggctgcttatggtgacaacttatagttatcatcataagctacttggtcttgccaaccggagaataatttggttatttgttggttttacaaacctacaagagtcagtactcatcctattaattgttctaagaataaacacacaag

SEQ ID NO: 933 - DNA, 732 bp, Hunnivirus A
  source 1..732: mol_type = genomic DNA
tcgcccctcctttccccccttattttcccttttccctctctccctccctttgtaacttaacgtttggcaagaaccctcacctgtcaattgggaccaccactttcagtgaccccatgcgaagtagtgagagagaataagctttcttacccttcatttgtgaacccttcagtcgaagccgcttggaataagataggaggaaaagttcattctaaatggagtgaaacatgtacttcagaatttctagcacgcgctgggctttcttgcgtgtgacggcactgtcttgccggagctctccacactgacaccccacgcttgtggaccttggtggcagatgacaacactgcagctggaattgagtgtctggtacactctgtgtaacagtgaaaacaatgtgatcacttcggtgagctagtagcctgtggaccaacaactggtaacagttgcctcaggggccaaaagccacggtgtttacagcaccctactggtttgattggagcaatccaagatgtcacagagttagtaattgccaagcagtccgtactggtatcttgacataccgtgcagttttggatagtgaaggatgccctgacggtacccataggtaacaagtgacactatggatctaagcaggggctcactctacgctgctttacagctggctgtgagttaaaaaacgtctagctatccacaacctaggggactaggttttccttttatttagattacaattat

SEQ ID NO: 934 - DNA, 732 bp, Enterovirus C
  source 1..732: mol_type = genomic DNA
ttaaaacagctctggggttgttcccaccccagaggcccacgtggcggctagtacaccggtattgcggtacccttgtacgcctgttttatactcccttttccctgtaacttagaagaaacaaaccaagttcaatagaagggggtacaaaccagtaccaccacgaacaagcacttctgtttccccggtgatgttgcatagactgtacccacggttgaaagcgattgatccgttacccgctcttgtacttcgagaagcctagtatcatcttggaatcttcgatgcgttgcgctcagcactcaaccccagagtgtagcttaggtcgatgagtctggacattcctcaccggcgacggtggtccaggctgcgttggcggcctacctgtggcccaaagccacaggacgctagttttgaacaaggtgtgaagagcctattgagctacatgagagtcctccggcccctgaatgcggctaatcccaaccacggagcaagggtgcacatgccagtgtataccttgtcgtaacgcgcaagtctgtggcggaaccgactactttgggtgtccgtgtttccttttatttttacattggctgcttatggtgacaatcgaagattgttatcataaagcgagttggattggccatccggtgaaagtaaagcatattatttacttggttgttgggattataccactcaatccttttactaacaatacgaggataaaacaacaatactaca

SEQ ID NO: 935 - DNA, 732 bp, Enterovirus B
  source 1..732: mol_type = genomic DNA
tgtgggttgttcccacccacagggcccactgggcgctagtacactggtaccaaggtacctttgtacgcctgttttataccccctccccgatccgaaacttagaagtaaagcaaacccgatcaatagtaggtgcgacactccagtcgtatctcgatcaagcacttctgtttccccggactgagtatcaatagactgcccacgcggttgaaggagaaaacgtccgtcatccggctaactacttcgagaaacccagtagcaccatggaagttgcagagtgtttcgctcagcactaaccccgtgtagatcaggctgatgagtcaccgcattccccacgggtgaccgtggcggtggctgcgttggcggcctgcctatggggcaacccataggacgctctaatacggacatggtgtgaagagtctattgagctagttagtaatcctccggcccctgaatgcggctaatcctaactgcggagcacatactcctactccaaggagcagtgtgtcgtaacgggcaactctgcagcggaaccgactactttgggtgtccgtgtttcctattaacatatcactggctgcttatggtgacaattgaaagattgttaccatatagctattggattggccatccggtgtcaaacagagcaatagtgtacctattcgctgggtttatcccattgactgttaaagatatacaaactctctacttgataatacaactaaacactgtaaa

SEQ ID NO: 936 - DNA, 732 bp, unidentified
  source 1..732: mol_type = unassigned DNA; note = unclassified Enterovirus sequence
ctgtgggttgttcccactcacagggcccactgggcgttagcacactggtattgcggtacctttgtgcgcctgttttatccaccctttccccatagtaacttagaagtacgttcaaatggtcaataggcggctcagtataccaactgagtctcgaccaagcacttctgttaccccggaccgagtatcaataagctactcacgtggctgaaggagaaaacgttcgttacccggccaactacttcgagaaacctagtaccaccatggatgttgcgcggcgtttcgctccgcactaccccagtgtagatcaggtcgatgagtcaccgcattcctcacgggcgaccgtggtggtggctgcgctggcggcctgcccatggggcaacccatgggacgcttcaatacagacatggtgtgaagagtctattgagctagttggtagtcctccggcccctgaatgcggctaatcctaactgcggagcagatccccacacaccagtgggcagtctgtcgtaatgggtaactctgcagcggaaccgactactttgggtgtccgtgtttccttttattcttatactggctgcttatggtgacaattgaaagattgttaccatatagctattggattggccatccagtgtctaacagagcaataatctatctttttgttggattcgtcccacttgactacagagcacttgcaacgctcaattacattatagatctcaacacaacgaa

SEQ ID NO: 937 - DNA, 733 bp, unidentified
  source 1..733: mol_type = unassigned DNA; note = unclassified Enterovirus sequence
cttgtacccactcacagggcccactgggcgctagcactctgattccacggaatctttgtgcgcctgttttataaccccttccccaacttgaaacgtagaagcaatacacataaccgatcaatagcaggcgtgacgcaccagtctcgtctcgatcaagcacttctgtttccccggaccgagtaacaatagactgctaacgcggttgaaggtgaaaacgttcgttatccggctaactacttcgagaagcccagtaacactatgaaagctgcggagcgttacgttcagcactcccccccgtgtagttcaggccgatgagtcactgcgatccctacgggcgaccgtagcagtggctgcgctggcggcctgcctatggggcaacccataggacgctctaaagtggacatggtgcgaagagctaattgagctagttagtagtcctccggcccctgaatgcggctaatcctaactgcggagcgcacgcctccaacccagggggtggtgcgtcgtaacgggcaactctgcagcggaaccgactactttgggtgtccgtgtttccttttattcttatattggctgcttatggtgacaatcacagagttgttaccatatagctattggattggccatccggtgtgcaacagagctatcatttatctatttataggttttgtaccattaactttgagatctacgaccaccctagagtacatattggttttaaattcaattagac

SEQ ID NO: 938 - DNA, 733 bp, Enterovirus B
  source 1..733: mol_type = genomic DNA
ctgtgggttgttcccacccacagggcccactgggcgccagcactctgattccacggaatctttgtgcgcctgttttacaaccctccccaatttgtaacgtagaagcaatacacactactgatcaatagtaggcatggcgcgccagtcatgtcatgatcaagcacttctgttccccggactgagtatcaatagactgctcacgcggttgaaggagaaaacgttcgttacccggctaactacttcaagaaacctagtagcaccatggaagctgcggagtgtttcgctcagcacttcccccgtgtagatcaggtcgatgagtcactgcaatccccacgggcgaccgtggcagtggctgcgttggcggcctgcctatggggtaacccataggacgctctaatgtggacatggtgcgaagagtctattgagctagttagtagtcctccggcccctgaatgcggctaatcctaactgcggagcacatgccttcaacccaggaggtggtgtgtcgtaacgggtaactctgcagcggaaccgactactttgggtgtccgtgtttccttttatccttatattggctgcttatggtgacaatcacggaattgttgccatatagctattggattggccatccggtgtctaacagagctattgtatacctatttgttggatttgtaccactaaattacaaggttttaaacactctcaaccttataatactactcaactcagcaaa

SEQ ID NO: 939 - DNA, 733 bp, Enterovirus D
  source 1..733: mol_type = genomic DNA
ttaaaacagccttggggttgttcccacctcaagggcccacgtggcggccagtactctggtatctcggtacctttgtacgcctgttttaattccctccccaacgtaacttagaagcttttaaaccaaagctcaataggcggagcgcaaaccagcgctcttatgagcaagcacttctgtctccccggtgtggttgtatagactgtccccacggttgaaaacaacttatccgttaaccgctatagtacttcgagaaacctagtattgccttcggagtgtcgatgcgttgcgctcagcacactaacccgtgtgtagcttgggtcgatgagtctggacgtaccccactggcgacagtggtccaggctgcgttggcggcctactcgtggtgaaaaccatgagacgctagacatgaacaaggtgtgaagagtctattgagctactatagagtcctccggcccctgaatgcggctaatcctaaccatggagcaagtgctcacaaaccagtgggttacttgtcgtaatgcgcaagtccgtggcggaaccgactactttgggtgtccgtgtttcactttttacttttatgactgctaatggtgacaatttaatattgttaccatttggcttgtcgaattgatcacataagatctatagttttgttcactgatttgctttcaaataatctcacctcaaaacctccagtacataacatttaaagagtttaaacttatttataaca

SEQ ID NO: 940 - DNA, 734 bp, unidentified
  source 1..734: mol_type = unassigned DNA; note = unclassified Picornaviridae sequence
ctccagcacatgtctattggtgcacttgagctgatccaagcaacggatgtacacacccggttcactaacactttcgcgacagctacccctcactgggaccggttcacaacaacgggccacggggttgcccccggtggtacggcacgtctggaataccggcaatgtgtaccacacactcaggtgagactgccactacttgagttagctactaggagtagccgcacccgccgaatgtcacaacccgcgcagttctgcattcccccgcacctggcggggagctggatggtgttgtaatgctcaccaccgctaatccgggaatcctaggactgacctgttgtgttttagacctcaagaagttaatcactacgagatcgcctagtgcccagttcgcgcgctggagcaggacccaccacggcctttgtgatgggggaatgcagaactgcgcgggttgtgacattcggcgggtgcggctactcctagtagctaactcaagtagtggcagtctcacctgagtgtgtggtacacattgccggtattccagacgtgccgtaccaccgggggcaaccccgtggcccgttgttgtgaaccggtcccagtgaggggtagctgtcgcgaaagtgttagtgaaccgggtgtgtacatccgttgcttggatcagctcaagtgcaccaatagacatgtgctggaggtacccgtaaggatctgaccagtagctaattagtccctgttggtgt

SEQ ID NO: 941 - DNA, 734 bp, unidentified
  source 1..734: mol_type = unassigned DNA; note = unclassified Orivirus sequence
ttctctcccccctctgggccgccatccttggccagaaaccctcacgagtgcttgtggtaggtcccaggccaatattcttcgtaaggcttggttccaattttccaccactcgtgtttgggttctggcctatggtacccagaggggcggtttgggggaattaactccccctcccctgtggtcctataccaccccacacctctgtgggctttctttactatcttcttgttttccgacttttaaacactaggcaggcgcgcctagtcatacaccgcccggctggtctttccagctcttgtgggcggtgcgcgctggtccatcgtgcccagcgacatagcaccttgtggacacctccgaacgccctcccctgtatggggtggtgcccaggggtttcagtgtggtgacacactccctggggcccgaaaggctagtgtgcaacaggtgaggtacagccagctgcccccgtggctggagggaccaagcttgtgaagcacacctcaccttcttgggggtgggctagtaagtggtgaaagcatagtgtccgtgtcgctggccaacactttgggtcaagtccagccactcagtgagtagatgcccaggaggtacccctagtggatctgacttggggcctgttacttaatgcaggttaaaaactatgaaagctgagtagtgtagcccggctggtggcttctcttccttattcattctattttatggtgacaaacgcaactgaagcc

SEQ ID NO: 942 - DNA, 734 bp, Enterovirus A
  source 1..734: mol_type = genomic DNA
gcctgtgggttgtacccacccacagggcccactgggcgctagcactctggcaccacggtacctttgtgcgcctgttttatcaccctaccccattcggaacttagaagcaatacacaaccgaccaatagtgggtgtggcacaccagccgcatcttggtcaagtacttctgtttccccgggttgagtatcaataagctgctcacacggctgaaggagaaaacacccgtcacccggccaactacttcgagaaacctagtaccactatgaatgttgcaaggcgtttcgctcagcacttcccccgtgtagatcaggtcgatgagtcaccgcattccccacgggcgaccgtggcggtggctgcgttggcggcctgcctatgggttaacccatgggacgccttaatactgacatggtgcgaagagtctattgagctagttggtagtcctccggcccctgaatgcggctaatcctaactgcggagcacatactcacaagccagtgagcggtgtgtcgtaacgggtaactctgcagcggaaccgactactttgggagtccgtgtttccttttatccttatattggctgcttatggtgacaattggagaattgttaccatatagctattggattggccatccggtgtctaatagagctattatatacctatttgttggatttactccactaacacacaaatccctaaacactttgtgctttatcttaaacttaaatacacgaaa

SEQ ID NO: 943 - DNA, 734 bp, Enterovirus C
  source 1..734: mol_type = genomic DNA
gggggttgttcccaccccagaggcccacgtggcggctagtactccggtatcacggtacccttgtacgcctgttttatacccccttcccccgtaacttagaagcaataatccaagttcaatagaagggggtacaaaccagtaccaccacgaacaagcacttctgttaccccggtgaagttgtatagactgtgcccacggttgaaagcgaccgatccgttatccgctcttgtacttcgagaagcccagtatcatcttggaatcttcgatgcgttgcgctcagcactcaaccccagagtgtagcttaggtcgatgagtctggacggtcctcaccggtgacggtggtccaggctgcgttggcggcctacctgtggtccaaagccacaggacgctagttgtgaacaaggtgtgaagagcctattgagctacatgagagtcctccggcccctgaatgcggctaatcctaaccacggagcaagtgctcacaacccagtgagtggcttgtcgtaacgagcaattctgtggcggaaccgactactttgggtgtccgtgtttcctttattttattatatggctgcttatggtgacaatcattgattgttatcataaagcgagttggattggccatccggtgaaagtaaagcacattatttatctttttgttggatttactccattgagtgtttttactccagacgtgattcgagcagtcttattgattagaagcatctgccaca

SEQ ID NO: 944 - DNA, 734 bp, Enterovirus C
  source 1..734: mol_type = genomic DNA
ttaaaacagctctggggttgttcccaccccagaggcccacgtggcggctagtacaccggtattacggtacccttgtacgcctgttttatactccctcccccccgtaacttagaagtacaaaactcaagttcaataggagggggtacaaaccagtaccaccacgaacgagcacttctgtctccccggtgaggttacatagactgtccccgcggttgaaagtaaccgatccgttatccgctcttgtccttcgagaagcccagtaccatcttggaatcttcgatgcgttgcgctcaacactcaaccccagagtgtagcttaggtcgatgagtctggacactccccaccggcgacggtggtccaggctgcgttggcggcctacctgtggcccaaagccacaggacgctagttgtgaacaaggtgtgaagagcctattgagctacaagagagtcctccggcccctgaatgcggctaatcccaaccacggagcaggtgacttcaagccagaagttggcctgtcgtaacgcgtaagtctgtggcggaaccgactactttgggtgtccgtgtttccctttattcttacaatggctgcttatggtgacaatcatagattgttatcataagccgaattggattggccatcgggtgagaatcagatcagttacttacctgtttgttggattcactccgttgacactttacatactaacccttgtcaatacacctgtattatcata

SEQ ID NO: 945 - DNA, 734 bp, Enterovirus B
  source 1..734: mol_type = genomic DNA
gcctgtgggttgttcccacccacagggcccactgggcgttagcacactggtattccggtacctttgtgcgcctgttttatccaccctccccaatgtaacgtagaagctacgctcaaacggtcaacagatagtccagtaatccagctgggccacgaccaagcacttctgtttccccggacagagtaccaataagctgctcgcgcggctgaaggggaaaacgttcgttacccggccaattacttcgagaaacctagtaccgccatggacgttgcgcagcgtttcgctccacacaaccccagtgtagatcaggtcgatgagccaccgcattccccacgggcgaccgtggcggtggctgcgttggcggcctgcccatggggtaacccatgggacgcttcaatacagacatggtgcgaagagtctattgagctaattggtagtcctccggcccctgaatgcggctaatcctaactgcggagcaggtacccacaacccagtgggtcacctgtcgtaatgggcaactctgcagcggaaccgactactttgggtgtccgtgtttccttttaacctttacactggctgcttatggtgacaattgaaagattgttaccatatagctattggattggccatcctgtgagtaatagagcgattgtatacttatttgttggctttataccactcaatttgaaagctttacagacactgaattatattgtggcattaaacacagcaaa

SEQ ID NO: 946 - DNA, 734 bp, Enterovirus B
  source 1..734: mol_type = genomic DNA
cctgtgggttgtccccactcacagggcccactgggcgccagcacactggtatcaaggtacctttgtgcgcctgttttatagccccttccccgaatgtaacgtagaagctgaacccaagcggtcaacaggcggctcagaacaccatctgggtcttgaccaagcacttctgttaccccggactgagtatcaataagctgctcacgcggctgaaggagaaaatgttcgttatccggccaattacttcgagaaacctagtaccaccatgaaggttgcgcagtgtttcgctccgcacaatcccagtgtagatcaggtcgatgagtcaccgcgttcctcacgggcgaccgtggcggtggctgcgctggcggcctgcccatggggcaacccatgggacgcttcaatactgacatggtgcgaagagtcaattgagctaattggtagtcctccggcccctgaatgcggctaatcctaactgcggagcagatgcccaagctccagtgggtagtctgtcgtaacgggtaactctgcagcggaaccgactactttgggtgtccgtgtttccttttattcttacattggctgcttatggtgacaattgagaaattgttgccatatagctattggattggccatccggtgacgaatagagcaattgtgtatctttttgttggattcataccactagataatacaaacttcaaaaccttgtgttacatcattaggttaaacacagcaag

SEQ ID NO: 947 - DNA, 735 bp, Aichivirus A
  source 1..735: mol_type = genomic DNA
ggggggcctcggccccctcaccctcttttccggtggtctggtcccggaccaccgttactccattcagcttcttcggaacctgttcggaggaattaaacgggcacccactcacccccatctccccctgtaacttgaagtgtgtgctcgtgaccttgactcctgcgggcttcaccgacccgtccagtgaacaaactgctaggtgatttcttcccctcccctagcctggatgttccacatccaggtcttcttcccccagcccgacatgtcatgggctgtttggaatccccgcgaaagctgctaacgtggcaattgtgggtcccccttccaacaagacaccgagtctttctcccttaaggctagccccgtgtggtgaattccaccgggcaactagtggtgtcaatgcatgcctccgacctcggccgcggagtgctgccccccaagttgcgaaactgaccaaggattgtgctgcctggcaagcatagtctgaggagatgttccgctgtggttgccaaacctggtaacaggtgccccagtgcgcgtagtctccttccggttcgtccggctgtcctttggtaaagacacaatgtaaggggcgtgtgccaacgccctggaaagagtgaacttctactgccctaggaatgccacgcaggtacccctggtttcttaccagggatctgagcgtgggctaattgtctaacgggtagtttcatttccctcccttcttttgttgacatc

SEQ ID NO: 948 - DNA, 735 bp, unidentified
  source 1..735: mol_type = unassigned DNA; note = unclassified Kobuvirus sequence
gggtgggggggtgtcggccccctcaccctcttttccggtggtctggacccggaccaccgttactccattcagcttcttcggaacctgttcggaggaattaaacgggcacccactttcctgtcctctccccttttctgtaactccaagtgtgtgctcgtaatcttgactcccgcggattgaccgctccgctggtgaacaaactgctaggtcatctcctccccacccttgggcgtccttccgggcgtccacaccctccccccagcctgacgtgtcacaggctgtacaaagaccccgcgaaagctgctaacgtggcaattgtgggtcccccctttgtaaaggaaccgagtctttctcccttaaggctagacccctgtgtgaattcacaggtggcaactagtggttccactgcatgctcccgacctcggccgcggagtgctgttccccaagtcgtaacactgaccttcacttatgtgcctggcaagcatatctgagaagatgttccgctgtggctgccaaacctggtaacaggtgccccagtgtgcgtagtcttcttccgtcttcggacggtaggtgttaggtaaagatgcggcgtaaggttcaagtgccaacgccctggaagggatgacccttctactgccctaggaatgccgcgcaggtaccccaggttcgcctgggatctgagcgcgggctaattgtctacgggtagtttcatttccctcttcttccactggcatc

SEQ ID NO: 949 - DNA, 735 bp, Enterovirus B
  source 1..735: mol_type = genomic DNA
cttgtgggttgttcccacccacaaggcccactgggcgctagcacactggtattacggtacccttgtgcgcctgttttattcaccccctccccctacgtaacttagaagcgatacctacatggtcaacaggtgccccagcataccagctgggtcatgaccaagcaattctgttaccccggactgagtatcaataagctgctcgcgcggctgaaggagaaaacgttcgttacccggccagttacttcgagaaacccagtaccaccatgaaggttgcgcagtgtttcgctccgcacaaccccagtgtagatcaggtcgatgagtcaccgcgttccccacgggtgaccgtggcggtggctgcgttggcggcctgcccatggggcaacccgtgggacgcttcaatactgacatggtgtgaagagtctattgagctaactggtagtcctccggcccctgaatgcggctaatcctaactgcggagcagatgcccacatgccagtgggtggtctgtcgtaacgggcaactctgcagcggaaccgactactttgggtgtccgtgtttccttttattcctaaactggctgcttatggtgacaattgagagattgttaccatatagctattggattggccatccggtgacgaacagagctatcatttatttatttgttggttttgtgccgttgaaccgcaaagttctacacaccatcaatttcatcctactgcttaactcgacaaa

SEQ ID NO: 950 - DNA, 735 bp, Enterovirus B
  source 1..735: mol_type = genomic DNA
agcctgtgggttgcacccacccacagggcccactgggcgccagcactctggtactgcggtacctttgtgcgcctgttttatcaccccaccccatccggaacgtagaagctagacttaaatggtcaatagacggcccagtatgccaattgggtctcgaccaagcactcctgtttccccgggtttagtatcaataagctgctcacgtggctgaaggagaaaacacccgttatccggccaactacttcgagaaacttagtaccgctatgaacgttgcaaggcgtttcgctcagcacttcccccgtgtagatcaggccgatgagtcaccgcattcctcacgggcgaccgtggcggtggctgcgctggcggcctgcctatgggcttgcccataggacgccttaatactgacatggtgcgaagagtctattgagctagttggtagtcctccggcccctgaatgcggctaatcctaactgcggagcacatactcacaaaccagtgagcagtgtgtcgtaacgggcaactctgcagcggaaccgactactttgggtgtccgtgtttccttttattcctacactggctgcttatggtgacaattaaagaattgttaccatatagctattggattggccatccggtgtctaacagagctattatatacttgtttgttggattcataccacttgattccaatagctataacaccctactttacatcgttcatttgaacacgagaaa

SEQ ID NO: 951 - DNA, 736 bp, unidentified
  source 1..736: mol_type = unassigned DNA; note = unclassified Kobuvirus sequence
gggtgggggggcctcggccccctcaccctcttttccggtggtctggacccggaccaccgttactccattcagcttcttcggaacctgttcggaggaattaaacgggcacccactttcctgtcctctccccctttctgcaactcaagtgtgtgctcgtaatcctgactcccacgggttgaccgccccgttggtgaacaaacagctaggtcattccctccctacccctgggcgccatttcagtggcgttcatatcctccccccagcctgacgtgtcacaggctgtgcaaagtccccgcgaaagctgctcacgtggcaattgtgggtcccccctttgtgaaggaaccgagtctttctcccttaaggctagacccctgtgtgaactcacaggtggcaactagtggttccactgcatgctcccgacctcggccgcggagtgctgttccccaagtcgtgacactgacctccacttatgtgcctggcaagcatatctgagaagatgttccgctgtggctgccaaacctggtaacaggtgccccagtgcgtgtagtcttcttccgtctccggacggtaagtgtgtggtaaagatgcggcgtaaggttcaagtgccaacgccctggaagggatgacccttctactgccctaggaatgccgcgcaggtaccccaggttcgcctgggatctgagcgcgggctaattgtctacgggtagtttcatttccctctcttttcactggcatc

SEQ ID NO: 952 - DNA, 736 bp, Enterovirus C
  source 1..736: mol_type = genomic DNA
cccactggaggatattcactatatcctccagtgtttcccactggaggatatggtactgcggtatcacggtacccttgtacgcctgttttatactccccttccctgcaacttagaagattgtgaaaacctgtgttcaataggaagggggtacaaaccagtaccaccacgaacaagcacttctgtttccccggtgaagttgtataaactgtatccacggttgaaaacgactgatccgttacccgctctagtacttcgagaagcctagtatcatcttggaatcatcgatgcgttgcgttcatcactcaaccccagagtgtagcttaggctgatgagtctggacaatcctcaccggtgacggtggtccaggctgcgttggcggcctacctgtggcccaaagccacaggacgctagatgtgaacaaggtgtgaagagcctattgagctactagagagtcctccggcccctgaatgcggctaatcccaaccacgaagcaagtgctcacaacccagtgagtagcttgtcgtaatgcgcaagtttgtggcggaaccgactactttgggtgtccgtgtttcctttttacttttgtatggctgcttatggtgacaatcattgattgttatcataaagcgaattggattggccatccggtgagagcgagcacaatcacttatttgttcgttggattcactcctttaacaaaattttattgttctcttaattagaaaacatcatcaca

SEQ ID NO: 953 - DNA, 736 bp, Enterovirus C
  source 1..736: mol_type = genomic DNA
ccggggttgttcccaccccggaggcccacgtggcggctagtactctggtaccacggtacccttgtacgcctgttttatatcccctccccacgcaactttagaagaaattcaccaagttcaatagggggggtacgaaccagtaccaccacgaacaagcacttctgtttccccggtgattttacataggctgtacccacggctgaaagtgaatgatccgttacccgcttgagtacttcgagaagcctagtaccaccttggaatctccgatgcgttgcgttcagcactctaacccgagtgtagcttaggctgatgagtctgggcgatccccaccggcgacggtggcccaggctgcgttggcggcctacccgtggctaacgctacgggacgctagttttgaacaaggtgtgaagagcctattgagctacccaagaatcctccggcccctgaatgcggctaatcccaaccatggagcaagtgccctcaagccagggggtggcttgtcgtaacgcgtaagtctgtggcggaaccgactactttgggtgtccgtgtttccttttatttcatatttggctgcttatggtgacaatcacagattgttatcataaagcgaattggattggccatccagtgaaatataagctcattgtttatctccttgttggatttgttctgttaggaaattcctcaataaagttgactcgggtaatcttagtgattagaagtcatcatttcaaca

SEQ ID NO: 954 - DNA, 736 bp, Enterovirus B
  source 1..736: mol_type = genomic DNA
agcctgtgggttgttcccacccacagggcccaccgggcgctagcacactggtatcccggtacctttgtgcgcctgttttacacaccctcccccgatggcaacttagaagatttccacacacggtcaataggcggctcagtataccaactgggtcatgaccaagcacttctgttcccccggactgagtatcaataagctgctcacgtggctgaaggagaaaacgttcgttatccggccaattacttcgagaagcttagtaccaccatagaggttgcgcagtgtttcgctccgcacaaccccagtgtagatcaggtcgatgagtcaccgcactcctcacgggcgaccgtggcggtggctgcgctggcggcctgcccatggggcaacccatgggacgcttcaatactgacatggtgcgaagagcctattgagctaattggtattcctccggcccctgaatgcggctaatcctaactgcggagcagatacccacgagccagtgggcagtctgtcgtaatgggtaactctgcagcggaaccgactactttgggtgtccgtgtttccttttattcctatattggctgctaatggtgacaattgagagattgttgccatatagctattggattggccatccggtgacaaacagagcgattatctatctatttgttggcttcataccattaaaccttagagtcctaaagaccctcaacttaattatacaatttaactctgcgaa

SEQ ID NO: 955 - DNA, 737 bp, unidentified
  source 1..737: mol_type = unassigned DNA; note = unclassified Kobuvirus sequence
ggggcttcggccctcacaccctcttttccgatggtctggtcccggaccaccgtcactccattcagcttcttcggaacctgttcggaggaattaaacgggcaccccacttcccccccccaccctcgcaacttcaagtgtgtgtgcccataaccttgacccctgccggtatgccgcccggttcagtggacaaactgctaggcaaattcccccctccccctgtggctggtccttcaaccagccactctcttccccccagccggacgtgctacaggctgtgcaaagcccccgcgaaagctgctcacgtggcaattgtgggtcccccctttgtcaaggcttcgagtctttctcccttaaggctagtcccgtactgtgaaatcagtgtgggcaactagtgaagccactgcacgctcccgaccacggacgcggagtgctgtcccccaagtcatgacactaacaccaagctgtgctgcctggcaagcatagcctgggaaggtgttccgctgtggctgccaaacctggtaacaggtgccccagtgtgtgtaaccttcctccagtcttcggactggcagctttgtgtgaagacgtgacgtaaggttcaagtgccaactccctggaagggatgacccctctactgccctaggaatgctacgcaggtacccctggttcgccagggatctgagcgtaggctaattgtctacgggtagtttcatttcccacctttttatttctttagcatc

SEQ ID NO: 956 - DNA, 737 bp, Enterovirus A
  source 1..737: mol_type = genomic DNA
ccgatctgttgtacccacccacagggcccactgggcgctagcactccgattctgcggaatctttgtgcgcctgttttatgaccctcccccgaaacttgtaacttagaagttatgtacatcaccgatcaatagcaggcgtggcgcaccagccatgtcttgatcaagcacttctgtacccccggactgagtatcaatagactgctcacgcggttgaaggagaaaatgttcgttacccggctaactacttcgagaaacctagtaacaccattgaaactgcggagtgtttcgctcagcattccccccatgtagatcaggtcgatgagtcactgcttaccccacgggcgaccgtggcagtggctgcgttggcggcctgcctatggggcaacccataggacgctctaaagtggacatggtgcgaagagtctattgagctagttagtagtcctccggcccctgaatgcggctaatcctaactgcggagcgcatgtcctcaaaccagagggtggtgcgtcgtaatgggtaactctgcagcggaaccgactactttgggtgtccgtgtttcttttgttcttaaaatggctgcttatggtgacaatcgaggaattgttaccatatagctattggattggccatccggtgtgcaacagagctattatctacttgtttgtcggatacatccccttaacacctaaatcctttaatacattgcattatattttaacattgaacgcgagaaa

SEQ ID NO: 957 - DNA, 737 bp, Enterovirus C
  source 1..737: mol_type = genomic DNA
ctgggggttgttcccaccccagaggcccacgtggcggctagtactccggtattacggtacccttgtacgcctgttttatactccctttccccgtaacttagaagcaacaatccaagttcaatagaagggggtacaaaccagtaccaccacgaacaagcacttctgtttccccggtgaagttgcatagactgtacccacggttgaaagcgactgatccgttatccgctcttgtacttcgagaagcctagtatcactttggaatcttcgatgcgttgcgctcagcacccaaccccggggtgtagcttaggtcgatgagtctggacgttcctcaccggcgacggtggtccaggctgcgttggcggcctacctgtggcccaaagccacaggacgctagttgtgaacaaggtgtgaagagcctattgagctacatgagattcctccggcccctgaatgcggctaatcccaaccacggagcaaatgcccacaacccagtgggtggtttgtcgtaacgagcaattctgtggcggaaccgactactttgggtgtccgtgtttccctttttattattatgtggctgcttatggtgacaatcattggttgttatcataaagcgaattggattggccatccggtaagagtaaaacatatcatttacctttttgttggatttactccattgagtgttttcaccccagacgtaattcgtgtggttctgctgattagaagtttctatcaca

SEQ ID NO: 958 - DNA, 737 bp, Enterovirus J
  source 1..737: mol_type = genomic DNA
ttaaaatagcctcagggttgttcccaccctgagggcccacgtggcgtagtactctggtattacggtacctttgtacgcctattttacccccttccccttgtaacttagaagcaaagcaaaccagttcaatagtaagcaacacaacccagtgttgtgacgaacaagtacttctgtttccccgggagggtctgacggtaagctgtacccacggctgaagtatgacctaccgttaaccggctacctacttcgagaagtctagtaataccattgaagttttgttggcgttacgctcaacacactaccccgtgtgtagttttggctgatgagtcacggcattccccacgggcgaccgtggccgtggctgcgttgcggccaaccaaggggcgcaagctccttggacgtcacttaacagacatggtgtgaagaacctattgagctaggtagtagtcctccggcccctgaatgcggctaatcctaactccggagcacatcagtgcaacccagcatttggtgtgttgtaatacgcaagtctggagcggaaccgactactttgggtgtccgtgtttcctgttttaccttatttggctgcttatggtgacaatttgatattgttaccatatagctgttggattggccatccggatttttgaaagagacccaaaactttcttctctacttcagattcaagtgcgaagttttccttttcatatattacttactaatttgaagtaccaaag

SEQ ID NO: 959 - DNA, 737 bp, unidentified
  source 1..737: mol_type = unassigned DNA; note = unclassified Enterovirus sequence
ttaaaatagcctcagggttgttcccaccctgagggcccacgtggtgtagtactctggtattacggtacctttgtacgcctattttatacccccttccccaagtaatttagaagcaagcacaaaccagttcagtagtaagcagtacaatccagtactgtaatgaacaagtacttctgttaccccggaagggtctatcggtaagctgtacccacggctgaagaatgacctaccgttaaccggctacctacttcgagaagcctagtaatgccgttgaagttttattgacgttacgctcagcacactaccccgtgtgtagttttggctgatgagtcacggcactccccacgggcgaccgtggccgtggctgcgttggcggccaaccaaggagtgcaagctccttggacgtcatattacagacatggtgtgaagagcctattgagctaggtggtagtcctccggcccctgaatgcggctaatcctaactccggagcatatcggtgcgaaccagcacttggtgtgttgtaatacgtaagtctggagcggaaccgactactttgggtgtccgtgtttcctgttttaacttttatggctgcttatggtgacaatttaacattgttaccatatagctgttgggttggccatccggattttgttataaaaccatttcctcgtgccttgacctttaacacatttgtgaacttctttaaatcccttttattagtccttaaatactaaga

SEQ ID NO: 960 - DNA, 738 bp, Enterovirus C
  source 1..738: mol_type = genomic DNA
ttaaaacagctctggggttgttcccaccccggaggcccacgtggcggctagtactctggtatcacggtacccttgtacgcctgttttatactcccctccccgtaatttagaagttcaaaacttaagttcaatagaagggggtacaaaccagtaccaccacgaacaagcacttctgtttccccggtgaggttgcatagactgtacccacggttgaaggcgactgatccgttatccgctcttgtacttcgggaagcccagtatcatcttcggatcttcgatgcgttgcgctcagcactcaaccccagagtgtagcttaggctgatgagtctggacaatcctcactggtgacagtggtccaggctgcgttggcggcctacctgtggcccaaagccacaggacgctagatgtgaacaaggtgtgaagagcccactgagctacaagagagtcctccggcccctgaatgcggctaatcccaaccacggagcaggtagttgcaaaccagcagccggcctgtcgtaacgcgcaagtctgtggcggaaccgactactttgggtgaccgtgtttccttttatcttttcaatggctgcttatggtgacaatcattgattgttatcataaagcgacttggattggccatccggtgaaatttaagtgcgtcagctatccatttattggatttaccccactaaaaccacatacgcctggccttagtgttgttggtgagacgctaccatcaaa

SEQ ID NO: 961 - DNA, 738 bp, Enterovirus B
  source 1..738: mol_type = genomic DNA
cagcctgtgggttgtacccacccacagggcccacgtggcgctagcacactggtattccggtacctttgtgcgcctgttttatccaccccgtcccccactgtaacttagaagatatgcaaccctgatcaacagcaggtgtgacactccagtcacatcacgatcaagcacttctgttgccccggaccgagtatcaataagccactcgcgtggctgaaggagaaaacgttcgttatccgaccaactacttcgagaaacctagtaccaccctggaagttgcgtagcgtttcgctccacacaaccccagtgtagatcgggtcgatgagtcaccgcgttcctcacgggcgaccgtggcggtggctgcgttggcggcctgcccatggggcaacccatgggacgcttcaatactgacatggtgcgaagagtctattgagctagttggtggtcctccggcccctgaatgcggctaatcctaactgcggagcagatacccacatgccagtgggcgatctgtcgtaatgggtaactctgcagcggaaccgactactttgggtgtccgtgtttccttttattcttatattggctgcttatggtgacaattgagaagttgttaccatatagctattggattggccatccggtgacaaatagagcgattgtttatttgtttgttggatttataccactgaacttcaaggttttaaacaccctcaattttgtactagttcttaatacatcaaa

SEQ ID NO: 962 - DNA, 739 bp, unidentified
  source 1..739: mol_type = unassigned DNA; note = unclassified Enterovirus sequence
acagctctggggttgtacccaccccagaggcccacgtggcggctagtactctggtgtcacggtacctttgtacgcctgttttataccccctcccccgtaacttagaagctataaaccaagttcaatagaagggggtacaagccagtaccaccacgaacaagtacttctgttaccccggtgacgttgtatagactgctcgcgcggtcgaaagcgacagatccgttacccgcttgtgtacttcgagaagtctagtaccaccttggaatcttcgatgcgttgcgctcagcactttaccccagagtgtagcttaggctgatgagtctgggcgctccccatcggcgacgatggcccaggctgcgttggcggcctacctatggctaacgccataggacgctagtagtgaacaaggtgtgaagaacctattgagctacacaagagtcctccggcccctgaatgcggctaatcctaaccatggagcaagtgatcacaatccagtgatattcttgtcgtaacgcgcaagtccgtggcggaaccgactactttgggtgtccgtgtttccctttatttttattatggctgcttatggtgacaatcattgattgttatcatagagcgaattggattggccatccggtgaaagtgaaactcattatctacttatttgttggattcactccatcaaacacattcacttatagtatcatcttgacagtgattagaattagacagtcgtatcaca

SEQ ID NO: 963 - DNA, 739 bp, Enterovirus B
  source 1..739: mol_type = genomic DNA
ttaaaacagcctgtgggttgtacccacccacagggcccactgggcgccagcactctggtatcgcggtacctttgtgcgcctgttttgtttccctttaccccgaatggaacttagaagtaatgcacactgatcaatagcaggcgtggcaccagccacgtgatgatcaagcactactgtttccccggaccgagtatcaatagactgcttgcgcggttgaaggagaaaacgttcgttatccggctaactacttcgagaaacccagtaacaccatgaaggttgcaggcgatttcgctcagcacatccccagtgtagatcaggtcgatgagtcaccgcgttcccacgggcgaccgtggcggtggctgcgttggcggcctgcctatggggtaacccataggacgctctaatacggacatggtgcgaagagtctattgagctagttagtgttctccggcccctgaatgcggctaatcctaactgtggagcacatgcccctaatccaaggggtagtgtgtcgtaacgggcaactccgcagcggaaccgactactttgggtgtccgtgtttccttttattcttacattggctgcttatggtgacaattgagagattgttgccatatagctattggattggccatccggtgtctaatagagcgataatctaccagtttgttggatttgtaccactcaacttttcaacactcaagacactcaactacatactagcactcaacacagtaaa

SEQ ID NO: 964 - DNA, 739 bp, Enterovirus B
  source 1..739: mol_type = genomic DNA
ttaaaacagcctgtgggttgtacccacccacagggcccattgggcgcttgcacactggtattccggtacctttgtgcgcctgttttatacatcctacccccgtaacttagaagcaagatcacccgatcaccaggaaatgtggcaaaccagtcacattctgatcaagcacttctgtttccccggactgagtatcaataggctgttcacacggctgaaggagaaaacgttcgttacccggccaactacttcgaaaaacctagtatcaccgtgaacgttgcagagtgtttcgctcagcactttccccgtgtagatcaggtcgatgagtcaccgcattccccacgggcgaccgtggcggtggctgcgttggcggcctgcctgcggggcaacccgtaggacgctctaatacagacacggtgtgaagagtctattgagctagttggtagtcctccggcccctgaatgcggctaatcctaactgcggagcgagcgcttgtaatccaacaggtagctcgtcgtaacgggtaactctgcagcggaaccgactactttgggtgaccgtgtttccttttatttcattactggctgcttatggtgacaatcacagagttgttaccatatagctattggattggccatccggtgtcaaatagagcaattgtgtttctttttgttgggtttgtaccacttgacttgaccagctacaacactctgtgctacattgttagattgaacacagcaaa

SEQ ID NO: 965 - DNA, 740 bp, Enterovirus A
  source 1..740: mol_type = genomic DNA
ttaaaacagcctgtgggttgcacccactcacagggcccactgggcgtcagcactctggtacctcggtacctttgtgcgcctgttttatatcccccccccattgaaacttagaagcaatgcacttcgatcaatagcgggcgcggcgcaccagccacgtcatgatcaagcacttctgtttccccggaccgagtatcaatagactgctaacgcggttgagggagaaaacgtccgttacccggccaactgcttcgagaaatccagtaacatcatgaaaattgcagagtgtttcgctcagcacttccccagtgtagatcaggtcgatgagtcaccgcgttcctcacgggcgaccgtggcggtggctgcgttggcggcctgcctgtggggcaacccgcaggacgctctaatatggacatggtgtgaagaatctattgagccagttggtagtcctccggcccctgaatgcggctaatcctaactgcggagcacgcgccctcaatccagtgggtagcgtgtcgtaatgggtaactctgcagcggaaccgactactttgggtgtccgtgtttccttttattcttacattggctgcttatggtgacaattgagagattgttaccatatagctattggattggccatccggtatcgaatagagcggttatctatcaatttattggatttactccgttgagtgtgcagcagtatcgcactttgcttttaatagtgagactgaatagtgcaaa

SEQ ID NO: 966 - DNA, 740 bp, Enterovirus A
  source 1..740: mol_type = genomic DNA
tgtgggttgttcccacccacagggcccactgggcgccagcactctgattccatggaatctttgtgcgcctgttttataacccttccccaatttgcaacttagaagtaatacacactacagatcaatagtaggcatggcgcgccagtcatgtctcgatcaagcacttctgtttccccggactgagtatcaatagactgcccacgcggttgaaggagaaaacgtccgttacccggctaactacttcgagaaacctagtagcaccaaataagctgcagagcgtttcgctcagcacctcccccgtgtagatcaggctgatgagtcactgcaatccccacgggcgaccgtggcagtggctgcgctggcggcctgcctatggggcaacccataggacgctctaatgtggacatggtgcgaagagtctattgagctagttagtagtcctccggcccctgaatgcggctaatcctaactgcggagcacataccttcaatccaggaggtggtgtgtcgtaacgggtaactctgcagcggaaccgactactttgggtgtccgtgtttccttttatccttatattggctgcttatggtgacaatcacggaattgttgccatatagctattggattggccatccggtgtctaatagagctattgtatacctatttgttggatttaccaagttaaatatcaccaactacaccacccttctttatattatattactgaatattagaaagagaaa

SEQ ID NO: 967 - DNA, 740 bp, Enterovirus B
  source 1..740: mol_type = genomic DNA
ttaaaacagcctgtgggttgtacccacccacagggcccactgggcgctagcactctggtattacggtacctttgtgcgcctgttttacatcccttcccaatcgtaatttagaagccaaacactacgatcaatagtgggcgtggcacgccagccatgtctcgatcaagcactcctgtttccccgggccgagtatcaatagactgctcacgtggttgaaggagaaaacgctcgttatccggctaactacttcgagaaacctagtaacaccatggaagttgcagagtgtttcgttcagcacttccccagtgtagatcaggccgatgagtcaccgcgttccccacgggtgaccgtggcggtggctgcgttggcggcctgcccatggggtaacccatgggacgctctaatatggacatggtgtgaagagtctattgagctagttggtagtcctccggcccctgaatgcggctaatcctaactgcggagcatgtacctccaatccaggaggtggcgtgtcgtaatgggcaactctgcagcggaaccgactactttgggagtccgtgtttccttttattcttacactggctgcttatggtgacaattgagagattgttaccatatagctattggattggccatccggtgactaacagagcagttatctaccagttcgttggtttcattccattgtgtactcgcgaatacaacactcttcttttaatactagatttaaacaaagcaaa

SEQ ID NO: 968 - DNA, 741 bp, Sapelovirus B
  source 1..741: mol_type = genomic DNA
ctcacactcatttcccccctcgcctgtcacaggcaacccccaccccttctcttacgggagttagggccaaggatctgttgcataggcgttgtatcccctaaccttttacctacccatcccaataggactggtatttcggttttgattgagtaatggatactgattctatacctgttacccattcaggggaaaaatggagtttctttcatggatctgacttgatatgaccaagagtcaacactttgcgtgttggccgtatggaatgctttaaggtttattctttggattatgacttcagggttggccgcccaggataaaaggcaattgtggtaagtgatgttagtcattggtggttgaaacctgcctaagacgtcctaggtctacgctgtgcgggccgaagtaagcttaggaataacagggagtatgccattttctgctttcacccaacacgaccgtacacgaaagagctagaggcactttggggcaaagggaaaagctttgcttagcccgaatgttcatttgagtccttgacgaatgcgtcccgtctgtcccgacggtgaggcgtatggcgcatgctcatggcattacccaatggtgtatctgtgaggggggggctcctcacacttagtctagtgctacctgacagggccgcggctggtcgtttgtgtatggtataaccagtagtaatcccccatggattgctttaacttcccctcctcccttaccaagacattctctaag

SEQ ID NO: 969 - DNA, 741 bp, Enterovirus A
  source 1..741: mol_type = genomic DNA
ccgatgtgtgggttgtacccacccacagggcccactgggcgctagcactctaatcctacgggattcttgtgcgcctgttttataaccccttccccgatttgtaacttagaagcaatttacattagcgatcaatagacgacatggcacgccagccatgtcttgatcaagcacttctgtttccccgggctgagtatcaatagactgcttacgcggttgaaggagaaaacgctcgttacccggctaactacttcgagaaacctagtagcatcatgaaaactgcagagcgtttcgttcagcactccccccgtgtagatcaggtcgatgagtcactgcaatccccacgggtgaccgtggcagtggctgcgttggcggcctgcctatggggcaacccataggacgctctaatgtggacatggtgcgaagagtctattgagctagttagtagtcctccggcccctgaatgcggctaatcctaactgcggagcgcatactcccaacccagggggtggtgcgtcgtaatgggcaactctgcagcggaaccgactactttgggtgtccgtgtttccttttatccttttattggctgcttatggtgacaattagagaattgttaccatatagctattggattggccatccggtgagcaacagagcaattgtgtatctttttgttggatacgtccccttgacacttagaacctacaacacgctacactatattctaatcttgaactcgagacg

SEQ ID NO: 970 - DNA, 741 bp, Enterovirus A
  source 1..741: mol_type = genomic DNA
ttaaaacagcctgtgggttgcacccacccacagggcccactgggcgccagcactctggtatcgcggtacctttgtgcgcctgttttatgacccctccccaaccgaaacttagaagttacacataccgatcaatagtgggcatagcacgccagctgtgtcttgatcaagcacttctgtttccccggaccgagtatcaatagactgctcacgcggttgaaggagaaagcgttcgttatccggctaactacttcgagaaacctagtaacaccatgaaagttgcggagtgtttcgctcagcacttccccagtgtagatcaggtcgatgagtcaccgcgttccccacgggcgaccgtggcggtggctgcgctggcggcctgcctatgggatgacccataggacgcttcaacacagacatggtgtgaagagtctattgagctagttagtagtcctccggcccctgaatgcggctaatcctaactgcggagcacgtgccctcaagccagagggtggcgtgtcgtaacgggcaactctgcagcggaaccgactactttgggagtccgtgtttccttttattcttacactggctgcttatggtgacaattgagagattgttaccatatagctattggattggccatccggtgagcaacagagcgattgtatactcttttgtgggttttgtgccattaaatcttactgtgattaccacactgaaactcatcttgcagtttaatacagcaaa

SEQ ID NO: 971 - DNA, 741 bp, Enterovirus A
  source 1..741: mol_type = genomic DNA
gcattggaggctagcccccattggggcgtagcacttccactgggggctagcactccgattctgcggaatctttgtgcgcctgttttataaccctcccccaacttgcaacttagaagttatgtacgttgatcaatagcaggcgtggcacaccagccatgtcttgatcaagcacttctgtaaccccggactgagtatcaatagactgctcacgtggtcgaaagagaaaatgttcgttatccggctaactacttcgagaaacctagtagcaccactgaaactgcggagtgtttcgctcagcacttcccccgtgtagatcaggtcgatgagtcactgcttaccccacgggtgaccgtggcagtggctgcgttggcggcctgcctatggggcaacccataggacgctctaaagtggacatggtgtgaagagtctattgagctagttagtagtcctccggcccctgaatgcggctaatcctaactgcggagcgcatgcccccaaaccagagggtggtgcgtcgtaacgggtaactctgcagcggaaccgactactttgggtgtccgtgtttcttttattctcataatggctgcttatggtgacaattgaggaattgttaccatatagctattggattggccatccggtgtgcaacagagctattatctacttgtttgttggatacattccattgacacctaaatccttcaatacattgcactatattctaacgttgaacgcaagaaa

SEQ ID NO: 972 - DNA, 741 bp, Enterovirus B
  source 1..741: mol_type = genomic DNA
taaaacagcctgtgggttgttcccacccacagggcccactgggcgctagcacactggtatcacggtacccttgtgcgcctgttttatccacccgccccctatgtaacttagaagcacatcacaaacggtcaacaggcagctcagtaaaccaactgagccacgaccaggtacttctgttaccccggaccgagtatcaatagactgctgacgcggtcgaaggagaaaacgttcgttacccggccaactacttcgagaaacccagtaccaccatggaggttgcgtggcgtttcgctccacacaaccccagtgtagatcaggtcgatgagtcaccgcattccccacgggcgaccgtggcggtggctgcgttggcggcctgcccatgaggtaactcatgggacgctacaataccgacatggtgcgaagagtctattgagctagttggtagtcctccggcccctgaatgcggctaatcctaactgcagagcggacacctacaaaccagtgggcagtccgtcgtaacgggcaactctgcagcggaaccgactactttgggtgtccgtgtttccttttattctcatattggctgcttatggtgacaattgagagattgttgccatatagctattggattggccatccggtgactaacagagctattgtctacttatttgttggttacgcaccgctcaatttcaaagtcttaaacacgattaatttcatattatcactcaacacaacaaa

SEQ ID NO: 973 - DNA, 741 bp, Enterovirus B
  source 1..741: mol_type = genomic DNA
ttaaaacagcctgtgggttgttcccacccacagggcccatgggcgctagcacactggtatcgtggtacctttgtgcgcctgttttatacaccctccccatttgtaacttagaagtaaagcaatattgatcaatagcaagcatggcacaccagccgtgttcagatcaagcacttctgtaaccccggactgagtatcaataggctgccaaagcggctgaaggagaaaacgttcgttaaccggccaactacttcgagaagcccagtatcaccatgaaagttgcagagcgtttcgctcagcactccccccgtgtagattaggtcgatgagtcaccgcatcccccacaggcgactgtggcggtggctgcgttggcggcctacctacggggcaacccgtaggacgctctaatacagacatggtgagaagagcctattgagctagttggtagtcctccggcccctgaatgcggataatcctaactgcggagcatgtgctcgcaatccagcgagaggcatgtcgtaacgggcaactctgcagcggaaccgactactttgggtgtccgtgtttccttttattccttgtttggctgcttatggtgacaattgaaagattgttgccatatagctattgggtcggccacctggtatctaacagagcaattatttacttgtttgttggttttgtacccttaaatctcaaggttcttgaaacccttaactacacattgaaactcaattcattgaa

SEQ ID NO: 974 - DNA, 741 bp, Enterovirus B
  source 1..741: mol_type = genomic DNA
ttaaaacagcctgtgggttgttcccactcacagggcctactgggcgctagcactctggtatcacggtacctttgtgcgcctgttttacacacccccctccctaggaatttagaagcaatacacaatgatcaatagtaggcgtggtacgccaaccatgtcttgatcaagcacttctgttcccccggactgagtatcaatagactgctcacgcggttgaaggagaaaacgttcgttacccggccagctacttcgagaaacccagtaacaccatggaaatagcggggcgtttcgctcggcacatccccagtgtagatcaggtcgatgagtcaccgcattccccacgggtgaccgtggcggtggctgcgttggcggcctgcctacagggcgacctgtaggacgcttcaatatggacatggtgcgaagagtctattgagctagctggtagtcctccggcccctgaatgcggctaatcctaactgcggagcgcgcgcctccaatccagggggtggtgcgtcgtaatgggtaactctgcagcggaaccgactactttgggtgtccgtgtttccatttatccttatattggctgcttatggtgacaattgaaaggttgttaccatatagctattggattggccatccagtgtctaacagagcgattgtattcctcttcgttggatttgttccacttaacaaaacaaattaccaaactttgtgttatattgtcaaactaaacacagcaaa

SEQ ID NO: 975 - DNA, 741 bp, Enterovirus B
  source 1..741: mol_type = genomic DNA
ttaaaacagcctgtgggttgttcccacccacagggcccaccgggcgctagcacactggtatcgcggtacctttgtgcgcctgttttatttaccctgccctgatgtaacttagaagcatgacaccaacgatcaatagcaggctcaatgcaccaattgggtcaagatcaagcacttctgttaccccggactgagtatcaataagctgctagcgcggctgaaggagaaaaagttcgttacccggccagctacttcgagaaacctagtatcaccatgaaagttgcgtggcgtttcgctccgcacaaccccagtgtagatcaggtcgatgagtcaccgcattccccacgggcgaccgtggcggtggctgcgttggcggcctgcccgtggagcaatccatgggacgctataatacagacatggtgtgaagagtctattgagctagctggtagtcctccggcccctgaatgcggctaatcctaactgcggagcaggtacccacgaaccagtgggcagtctgtcgtaatgggcaactccgcagcggaaccgactactttgggtgtccgtgtttccttttatttcaacttggctgcttatggtgacaattgagagattgttaccatatagctattggattggccatccggtgactaacagagctatcatatacctttttattggctttgtgccacttactctgaaagaggtcaagactctgcattatatcatactattgaatgctataaa

SEQ ID NO: 976 - DNA, 741 bp, Enterovirus B
  source 1..741: mol_type = genomic DNA
ttaaaacagcctgtgggttgttcccacccacagggcccactgggcgctagcacaccggtatcacggtacccttgtgcgcctgttttatccacctcccccgttgtaacttagaagctcaatacaaatggtcgatagccagcccgatacgccaattgggttttgaccaagcacttctgttaccccggactgagtaccaataggctgccaaagcggctgaaggggaaaacgttcgttaccccaccaactacttcgagaaacctagtaccaccatgaagattgcgcagcgtttcgctcagcacaaccccagtgtagatcaggtcgatgagtcaccgcattccccacaggcgactgtggcggtggctgcgttggcggcctgcccatggggctacccatgggacacttcaatatcgacatggtgcgaagagtctattgagctagttggtagtcctccggcccctgaatgcggataatcctaactgcggagcaggcacccacaagccagtgggcagcctgtcgtaacgggcaactctgcagcggaaccgactactttgggtgtccgtgtttctttttattcttacactggctgcttatggtgacaattgaagaattgttaccatatagctattggattggccatccagcgactaacagagctattatcttcttgtttgtggggtacgtaccactcaatttcacagtagtaaggactctcaatttcattttgtgcttgaataaggcgaa

SEQ ID NO: 977 - DNA, 741 bp, Enterovirus B
  source 1..741: mol_type = genomic DNA
ttaaaacagcctgtgggttgtacccactcacagggcccactgggcgctagcacactggtatcacggtacctttgtgcgcctgttttataatcccttccccaccgtaacatagaagctacacacactgatcaacagcaggcacagcacaccagttgtgtctcgatcaagcacttctgtctccccggaccgagtatcaatagactgcttacgcggttgaaggagaaaacgttcgtcacccggctgactacttcgaaaagcctagtagtaccatgaatgttgcggagtgtttcgctcagcacttcccccgtgtagatcaggctgatgagtcactgcattccccacgggtgaccgtggcagtggctgcgttggcggcctgcccatggggcaacccatgggacgcttcaatacagacatggtgcgaagagtctattgagctagtcagtagtcctccggcccctgaatgcggctaatcctaactgcggagcatgcgcctccgacccagggggtagcatgtcgtaatgggcaactctgcagcggaaccgactactttgggtgtccgtgtttccttttattcttatattggctgcttatggtgacaattgagagattgttgccatatagctattggattggccatccggtgagtaatagagctattatatactcctttgtgggttttgtgccactggatcacaaggtcttgaaaactctcacttttgtcataatactaaacactgcaaa

SEQ ID NO: 978 - DNA, 741 bp, Enterovirus B
  source 1..741: mol_type = genomic DNA
taaaacagcctgtgggttgttcccacccacagggcccattgggcgctagcacactgatatcacggtacctttgtgcgcctgttttatctacccctccccgatgcaacttagaagcatgttacaaacggtcaataggtggttcagttaaccaactgagcctcgaccaagcacttctgttaccccggactgagtatcaataggctgctcgcgtggctgatggagaaaacgtccgttacccggccaattacttcgagaaacctagtaccaccatggaagttgcgcagcgtttcgctccgcacaaccccagtgtagatcaggtcgatgagtcactgcgttccccacgggtgaccgtggcagtggctgcgttggcggcctgcccatggggtatcccatgggacgcttcaatactgacatggtgtgaagagtctattgagctaattggtagtcctccggcccctgaatgcggctaatcctaactgcggagcagatacccacgcaccagtgggcagtctgtcgtaacgggcaactctgcagcggaaccgactactttgggtgaccgtgtttccttttattttaatattggctgcttatggtgacaattgaaagattgttgccatatagctattggattggccatccggtaacaaacagagcaattatttacctgtttattggttttatacctctcaaccacaaggttataagtactctcaaccttgttttagcatttaacacagcaaa

SEQ ID NO: 979 - DNA, 741 bp, Enterovirus B
  source 1..741: mol_type = genomic DNA
ttaaaacagctctggggttgttcccacccacagggcccactgggcgctagcatactggtatcacggtacctttatgcgcctgttttatccacccctccccaacgtaacctagaagacactcatggatgatcaataggaggctcggcatgccagctgagtctggatcaagcacttctgttgccccggaccgagtatcaataggctgctcacgcggctgaaggagaaaaagttcgttatccggccaattacttcgagaaacccagtaccaccatgaaggttgcgtggcgtttcgctccgcacagccccagtgtagatcaggtcgatgagtcaccgcgttccccacgggcgaccgtggcggtggctgcgttggcggcctgcccatggggtaacccatgggacgcttcaatactgacatggtgcgaagagtctattgagctaattggtagtcctccggcccctgaatgcggctaatcctaactgcggagcagacgtccacaaaccagtgggtggtctgtcgtaacgggcaactctgcagcggaaccgactactttgggtgtccgtgtttcctttattcttatattggctgcttatggtgacaattgagagattgttgccatatagctattggattggccatccggtttgcaatagagcgattatactcctctttgttgggtttgtacctctcaacctcaatagttacaggacattattatacattatccagctgaacacgaaaag

SEQ ID NO: 980 - DNA, 741 bp, unidentified
  source 1..741: mol_type = unassigned DNA; note = unclassified Enterovirus sequence
taaaacagcctgtgggttgttcccacccacagggcccactgggcgctagcacactggtatcacggtacctttgtgcgcctgttttatttaccctcccccaacgtaacttagaagcatgactcaaatggtcaacagacaactcagcatgccagctgagcctcgaccaagcacttctgttaccccggactgagtaccagtaagctgctcacgcggctgagagggaaaccgttcgttacccggccaattacttcgagaaacctagtaccaccatgaaagttgcgcagtgtttcgctccgcacaaccccagtgtagatcaggtcgatgagtcaccgcaaaccccacgggtgaccgtggcggtggctgcgctggcggcctgcccatggggcagcccatgggacgcttcaatactgacatggtgcgaagagtctattgagctaattggtgatcctccggcccctgaatgcggctaatcctaactgcggagcagatacccacgcaccagtgggcagtctgtcgtaatgggcaactctgcagcggaaccgactactttgggtgtccgtgtttccttttattcttatactggctgcttatggtgacaattgagagattgttgccatatagctattggattggccatccggttacaaacagagcaattacttacctatttgttggttttgtaccactgaactacaaagtcttgaacaccctcaatttcattacaacacctaacacgttaaa

SEQ ID NO: 981 - DNA, 741 bp, Enterovirus B
  source 1..741: mol_type = genomic DNA
ttaaaacagcctgtgggttgttcccacccacagggcccactgggcgctagcacactggtatcatggtacctttgtgtgcctgttttatttcccttccccagatgcaacttagaagcaacactccacgaccactagcaggcgtggcacaccagccatgtcttggtcaagcacttctgtaaccccggactgagtatcaataaactgctcacgcggtcgaaggagaaaacgtccgttacccggccaactacttcgagaaacctagtaacgccatgaaaattgcgaggtgtttcgctcagcacatccccagtgtagatcaggtcgatgagtcaccgcattccccacaggtaactgtggcggtggctgcgttggcggcctgcccatggggtgacccatgggacgcttcaatacggacatggtgtgaagagtctattgagctagttggtagtcctccggcccctgaatgcggctaatcctaactgtggagcatgcgcccccactccagagggtagcgtgtcgtaacgggtaactccgcagcggaaccgactactttgggtgtccgtgtttctttttattcttatattggctgcttatggtgacaattgaaagattgttaccatatagctattggattggccacccagtgacaaacagagcaataatttaccaatttgtgggatttattccaataagtttgaaagtcttgaagacacttaatctagtattacaactcaatagcgcaaa

SEQ ID NO: 982 - DNA, 741 bp, unidentified
  source 1..741: mol_type = unassigned DNA; note = unclassified Enterovirus sequence
ccagggggccctgtgggtgggtgcaacccacagggcccactgggcgctagcacactggtattacggtacctttgtgcgcctgttttatacacccttaccctatgcaatatagaagcaaaacgacaaggtcaatagagagcccagtgagccaactgggtcgagaccaagcacttctgtttccccggaccgagtatcaataggctgcttacgcggctgaaggagaaaacgttcgttacccggctaactacttcgaaaaacctagtaacgccatggaagttgcgaaccgtttcgctcggcacttccccagtgtagatcaggtcgatgagtcaccgcattccccacgggcgaccgtggcggtggctgcgttggcggcctgcctatggggcaacccataggacgcttcaatatggacatggcgtgaagagtctattgagctagttagtagtcctccggcccctgaatgcggctaatcctaactgcggagcacatgcccccaacccaggaggtggtgtgtcgtaatgggtaactctgcagcggaaccgactactttgggtgtccgtgtttccttttatcccaatgttggctgcttatggtgacaattgaaagattgttaccatatagctattggattggccatccggtgactaacagagcaatcgtttacctattcattggttacgttccattaaatctcaaggaactaacgactctcaattacattttgctcttgaactctgcaaa

SEQ ID NO: 983 - DNA, 741 bp, Enterovirus B
  source 1..741: mol_type = genomic DNA
ttaaaacagcctgtgggttgttcccacccacagggcccattgggcgctagcactctggtatcacggtacctttgtgcgcctgttttacatcccctccccaaattgtaatttagaagtctcacacaccgatcaatagcaagcgtggcacaccagccatgttttgatcaagcacttctgttacccggactgagtatcaatagaccgctaacgcggttgaaggagaaaacgttcgttacccggccaactacttcgaaaaacctagtaacaccatggaagttgcggagtgtttcgctcagcactaccccagtgtagatcaggtcgatgagtcaccgcgttccccacgggcgaccgtggcggtggctgcgttggcggcctgcctacggggaaacccgtaggacgctctaatacagacatggtgcgaagagtctattgagctagttggtaatcctccggcccctgaatgcggctaatcctaactgcggagcacataccctcaaaccagggggcagtgtgtcgtaacgggcaactctgcagcggaaccgactactttgggtgtccgtgtttcattttattcctatactggctgcttatggtgacaattgacgggttgttaccatatagttattggattggccatccggtgactaacagagcaattatatatctctttgttgggtttataccacttagcttgaaagaggttaaaacactacatctcatcattaaactaaatacaacaaa

SEQ ID NO: 984 - DNA, 741 bp, Enterovirus B
  source 1..741: mol_type = genomic DNA
ttaaaacagcctgtgggttgttcccacccacaggcccattgggcgctagcactctggtatcacggtacctttgtgcgcctgttttatacacccttcccaagtgtaacttagaagcttaccacacacggtcaataggcgactcagtaagccaactgggtcttgatcaagcacttctgtttccccggactgagtatcaataagctgctcacgcggctgaaggagaaaacgttcgttaaccggccaattacttcgagaaacctagtaacaccatggaggttgcgcagcgtttcgctccgcacaaccccagtgtagatcaggccgatgagtcaccgcactcctcacgggcgaccgtggcggtggctgcgctggcggcctgcccatggggtaacccatgggacgcttcaatactgacatggtgcgaagagtctattgagctaattggtagtcctccggcccctgaatgcggctaatcctaactgcggagcagatacccacatgccagtgggcagtctgtcgtaatgggcaactctgcagcggaaccgactactttgggtgtccgtgtttccttttattcttatactggctgcttatggtgacaattgagagattgttaccatatagctattggattggccatccagtgacaaacagagcgattatttatttgtttgttggttatatcccattaagccaaaaagtcttagccactctcaatttcatactattgcttaatacaacgaa

SEQ ID NO: 985 - DNA, 742 bp, Enterovirus A
  source 1..742: mol_type = genomic DNA
ttaaaacagcctgtgggttgttcccacccacagggcctactgggcgctagcacactggtatcccggtacctttgtgcgcctgttttatctacccctccccaagtgaaacttagaagatcatcacatatggtcaataggcggctcagtacaccaactgcgtctcgaccaagcacttctgtatccccggactgagtatcaatagactgctcacgcggttgaaggagaaaacgttcgttatccggctaactacttcgggaagcctagtagcaccttgaaagttgcggagtgtttcgctcagcacttcccccgtgtagatcaggccgatgagccactgtaaaccccacgggcgaccgtgacagtggctgcgctggcggcctgcccatgggggaacccatgggacgctctaatactgacatggtgtgaagagtctactgagctagttagtagtcctccggcccctgaatgcggctaatcctaactgcggagcacacaccctcaacccagggggcagtgtgtcgtaatgggtaactctgcagcggaaccgactactttgggtgaccgtgtttccttttattccttattggctgcttatggtgacaattgaaaagttgttaccatatagctattggattggccatccggtatctaatagagctattgtttacttatttattggatacgtccctcttaatttcaaggctatccaaactcttgattatatattgctccttaattataagaa

SEQ ID NO: 986 - DNA, 742 bp, Enterovirus A
  source 1..742: mol_type = genomic DNA
ttaaaacagcctgtgggttgttcccactcacagggcccactgggcgctagtacactggtatctcggtacctttgtacgcctgttttataccccctccctgatttgcaacttagaagcaacgcaaaccagatcaatagtaggtgtgacataccagtcgcatcttgatcaagcacttctgtatccccggaccgagtatcaatagactgtgcacacggttgaaggagaaaacgtccgttacccggctaactacttcgagaaacctagtaacgccattgaagttgcagagtgtttcgctcagcactccccccgtgtagatcaggtcgatgagtcaccgcattccccacgggcgaccgtggcggtggctgcgttggcggcctgcccatggggtaacccatgggacgctctaatatagacatggtgcgaagagtctattgagctagttagcagacctccggcccctgaatgcggctaatcctaactgcggagcgcgcaccctcaacccagggggcggcgtgtcgtaatgggtaactctgcagcggaaccgactactttgggtgtccgtgtttccttttattctttattggctgcttatggtgacaattgaaaagttgttaccatatagctattggattggccatccggtgtctaacagagctattgtctacctatttattggatacgtccctcttaatctcaaggccattcaaactcttgattatatattgctcctcaactgtaggaa

SEQ ID NO: 987 - DNA, 742 bp, Enterovirus A
  source 1..742: mol_type = genomic DNA
tttaaaacagcctgtgggttgtccccacccacagggcccactgggcgttagcactctggtattacggtacctttgtgcgcctgttttataacccctccccaactgtaaattagaagcaacacacgtcgatcaatagtaggcgtgacgcaccagtcacgtcttgatcaagcacttctgtttccccggaccgagtatcaatagactgctcacgcggttgaaggagaaaacgttcgttacccgaccaactacttcgaaaaacctagtagcaccatgaaggttgcggagtgtttcgctcggcacttccccagtgtagatcaggtcgatgagtcaccgcattccccacgggcgaccgtggcggtggctgcgctggcggcctgcctatggggtaacccataggacgctctaatacggacatggtgcgaagagtctattgagctagttggtagtcctccggcccctgaatgcggctaatcctaactgcggagcgcgcgcccccattccaggaggtagcgcgtcgtaacgggcaactctgcagcggaaccgactactttgggtgtccgtgtttccttttatctttattctggctgcttatggtgacaattgacagattgttaccatatagctattggattggccatccggtcacaagcagagcgattatctaccaatttattggatttatcccactgcacactcgtgaatataacacattactgctgatactgagtttggacaaagcaaa

SEQ ID NO: 988 - DNA, 742 bp, Enterovirus A
  source 1..742: mol_type = genomic DNA
ttaaaacagcctgtgggttgcacccacccacagggcccactgggcgctagcactctggtatcacgatacctttgtgcgcctgttttatatccccaccccgagtaaacgttagaagttacgcaaccccgatcaatagtaggtgtagcactccagctgcatcgagatcaagcacttctgtctccccggaccgagtatcaatagactgctaacgcggttgaaggagaaaacgttcgttacccggccaattacttcgagaagcccagtagtgccgtgaaagttgcggagtgtttcgctcagcacttcccccgtgtagatcaggctgatgagtcaccgcgatccccacaggtgactgtggcggtggctgcgttggcggcctgcctatggggcaacccataggacgctctaatacagacatggtgcgaagagcctattgagctaattggtagtcctccggcccctgaatgcggctaatcctaactgcggagcacatgccctcaaaccagggggtggtgtgtcgtaacgggtaactctgcagcggaaccgactactttgggtgtccgtgtttctttttattcttataatggctgcttatggtgacaattaaagaattgttaccatatagctattggattggccatccggtgactaacaaatcgctcatataccagtttgttggttttgttcccttatcacatacagctcataacaccctcttatatttactacaattgaatagcaagaa

SEQ ID NO: 989 - DNA, 742 bp, Enterovirus A
  source 1..742: mol_type = genomic DNA
ttaaaacagcctgtgggttgtacccacccacagggcccactgggcgctagcacactggtattacggtacctttgtgcgcctgttttataccccccccaacctcgaaacttagaagtaaagcaaacccgatcaatagcaggtgcggcgcaccagtcgcatcttgatcaagcacttctgtaaccccggaccgagtatcaatagactgctcacgcggttgaaggagaaaacgttcgttacccggctaactacttcgagaaacccagtagcatcatgaaagttgcagagtgtttcgctcagcactacccccgtgtagatcaggccgatgagtcaccgcacttccccacgggcgaccgtggcggtggctgcgttggcggcctgcctatggggcaacccataggacgctctaatacggacatggtgcgaagagtctattgagctagttagtagtcctccggcccctgaatgcggctaatcctaactgcggagcacatacccttaatccaaagggcagtgtgtcgtaacgggtaactctgcagcggaaccgactactttgggtgtccgtgtttccttttaatttttactggctgcttatggtgacaattgaggaattgttgccatatagctattggattggccatccggtgactaacagagctattgtgttccaatttgttggatttaccccgctcacactcacagtcgtaagaacccttcattacgtgttatttctcaactcaagaaa

SEQ ID NO: 990 - DNA, 742 bp, Enterovirus B
  source 1..742: mol_type = genomic DNA
ttaaaacagcctgtgggttgatcccacccacagggcccactgggcgctagcacactggtatcccggtacctttgtgcgcctgttttatttacccttccccaatgtaatttagaagtttatcccaaatggtcaatagacaacccagcacgccagctgggcttcgaccaagcacttctgttaccccggaccgagtatcaataggctgctcacgcggctgaaagagaaaatgttcgttacccggccaaccacttcgagaaacttagtatcaccatgaaagttgcgcagtgtttcgctccgcacagccccagtgtagatcaggtcgatgagtcaccgcgttccccacgggcgaccgtggcggtggctgcgttggcggcctgcccatggggcaacccatgggacgcttcaatactgacatggtgcgaagagtctattgagctggttggtagtcctccggcccctgaatgcggctaatcctaactgcggagcagatacctacacaccagtgggcagtctgtcgtaacgggcaactctgcggcggaaccgactactttgggtgtccgtgtttccttttattcttatattggctgcttatggtgacaattgaaagattgttaccatatagctattggattggccatccagtgacaaacagagctatcgtgtacctatttgttggttttgtaccactgaaccgtaaggtgttagacactctaaacctcataattctgttcaattcagcaaa

SEQ ID NO: 991 - DNA, 742 bp, Enterovirus B
  source 1..742: mol_type = genomic DNA
ttaaaacagctctggggttgttcccacccacagggcccaccgggcgccagcactctggtatcacggtacctttgtgcgcctgttttatacccccgtccccggttgtaacttagaagtaacactccacgaccgatagtaggtgtggcacgccagccatgtcttggtcaagcacttctgtttccccggattgagtatcaataggctgttcacacggccgaaggagaaaacatccgttatccggccaactacttcgagaaacctagtaccaccatgaaggttgcgcagtgtttcgctccgcacaaccccagtgtagatcaggccgatgagtcaccgctttccccacgggcgaccgtggcggtggctgcgttggcggcctgcccatggggaaatccatgggacgcttcaatactgacatggtgcgaagagtctattgagctagttggtattcctccggcccctgaatgcggctaatcctaactgcggagcagacacccacatgccagtgggcagtctgtcgtaacgggcaactctgcagcggaaccgactactttgggtgtccgtgtttccttttattcttatactggctgcttatggtgacaattgaaagattgttaccatatagctattggattggccatcctgtgactaacagagctattgtatacctatttgttggttttgtgccactgaattacaaggctttaaacaccctcaactttataatactactcaactcattaaa

SEQ ID NO: 992 - DNA, 742 bp, Enterovirus B
  source 1..742: mol_type = genomic DNA
ttaaaacagctctggggttgttcccacccacagggcccactgggcgccagcactctggtattccggtaccctagtgcgcctgttttatcctcccctccccgttgaaacttagaagcaagtcacatgcggtcaatagggggcctagtatgccaactaggtcacgaccaagcactcctgttaccccggactgagtatcaataagctgctcgcgcggctgaaggagaaaacgttcgttacccggctaattacttcgagaaacccagtaccaccgtgaaggttgcgcagcgtttcgctccgcacaaccccagtgtagatcaggtcgatgagtcaccgcaatccccacaggcgactgtggcggtggctgcgttggcggcctgcccatgggacaacccatgggacgcttcaatactgacatggtgcgaagagtctattgagctaattagtaatcctccggcccctgaatgcggctaatcctaactgcggagcagatacccacacaccagtgggcagtctgtcgtaacgggcaactctgcagcggaaccgactactttgggtgtccgtgtttccttttattcttatactggctgcttatggtgacaattgacagattgttaccatatagctattggattggccatccggtgacgaacagagcgattatttacctgtttgttggttttataccacttaattacaaggttctaaacactctcaacttcattctaacactcaactcaacaaa

SEQ ID NO: 993 - DNA, 742 bp, Enterovirus C
  source 1..742: mol_type = genomic DNA
ttaaaacagctctggggttgttcccaccccagaggcccacgtggcggctagtactccggtatcacggtacccttgtacgcctgttttatactccctgccccgtaacttagaagcaaaccaaacaagttcaataggagggggtgcaagcccgcaccaccacgaacaagtactcctgtctccccggtgaggttgtatagactgtacccacggttgaaaacgactgatccgttatccgctctagtacttcgggaagcctagtagcattttggaatcttcgatgcgttgcgctcagcactcaaccccggagtgtagcttaggtcgatgagtctggacatcccccaccggtgacggtggtccaggctgcgttggcggcctacctgtggtccaaagccacaggacgctagttgtgaacaaggtgtgaagagcctactgagctactagagagtcctccggcccctgaatgcggctaatcctaaccacggagcaggtagttgcaacccagcaaccagtctgtcgtaatgcgcaagtctgtggcggaaccgactactttgggtgaccgtgtttccttttattttcatatatggctgcttatggtgacaatcattgattgttatcatatagcgacttggattggccatccggtgagaattagaactactgtttacccgtttgctgatttttgataacactccacacacttaccatttgagaattgtactgttggcaagacagcaccattata

SEQ ID NO: 994 - DNA, 742 bp, Enterovirus B
  source 1..742: mol_type = genomic DNA
ttaaaacagcctgtgggttgttcccacccacagggcccattgggcgctagcacactggtatcacggtacccttgtgcgcctgttttatccacccctccccatcgtaacctagaagcatgactccaacggtcaatagacagctcagtaaaccaattgagccttgaccaagcacttctgttaccccggactgagtatcaataggctgctcacgcggccgaaggagaaaatgttcgttacccggccaattacttcgagaaacctagtaccaccatgaaggttgcgcggtgtttcgctcagcacaaccccagtgtagatcaggccgatgagtcaccgcattccccacgggtgaccgtggcggtggctgcgctggcggcctgcccatggggcaacccatgggacgcttcaatactgacatggtgtgaagagtctattgagctaattggtagtcctccggcccctgaatgcggctaatcctaactgcggagcagatacccacgcaccagtgggcagtctgtcgtaacgggcaactctgcagcggaaccgactactttgggtgtccgtgtttccttttattcttgtactggctgcttatggtgacaattgagagattgttaccatatagctattggattggccatccagtgtcaaacagagcgattgtctacttgttcattggttttataccattgagttacaaggttctagccactcttaacttcattttaacactcaatacatcaaa

SEQ ID NO: 995 - DNA, 742 bp, Enterovirus B
  source 1..742: mol_type = genomic DNA
ttaaaacagcctgtgggttgttcccacccacagggcccatggggcgcaagcacactggtattgcggtacctttgtgcgcctgttttatccacccttccccaatgaaacttagaagcttgactcaaacggtcaatagacagcccagtgcaccaactgggtctcgaccaggcactcctgtttccccggactgagtatcaataggctgcttgcgcggctgaaggagaaaacgttcgttacccggccaattacttcgagaaacctagtaccaccatggacgttgcgcagtgtttcgctccacacaaccccggtgtagatcaggtcgatgagtcaccgcaatccccacgggcgaccgtggcggtggctgcgctggcggcctgcccatggggcaacccatgggacgcttcaatactgacatggtgcgaagagtctattgagctaattggtagtcctccggcccctgaatgcggctaatcctaactgcggagcagatacccacataccagtgggcagtctgtcgtaacgggcaactctgcagcggaaccgactactttgggtgtccgtgtttccttttattcttatattggctgcttatggtgacaattgaaaggttgttaccatatagcttttggattggccatccagtgagcaacagagcgatcatactcctttttgttgggtttgtaccacttgattatagtagttacaacaccttgctatacgtcattcatttaaacacgagaaa

SEQ ID NO: 996 - DNA, 742 bp, Enterovirus B
  source 1..742: mol_type = genomic DNA
ttaaaacagcctgtgggttgttcccacccacagggcccactgggcgccagcactctggtattacggtacctttgtgcgcctgttttatatccccctccccacttgaaacttagaagtgaaacacactgatcaatagttgacatggcaagccagccatgtcttgatcaagcacctctgtttccccggacctagtatcaatagactgctcgcgcggttgaaagagaaagcgttcgttacccggctaactacttcgagaaacttagtaacaccatggaagttgcggagtgtttcgctcagcacatccccagtgtagatcaggccgatgagtcaccgcattccccacgggcgaccgtggcggtggctgcgttggcggcctgcctgtggggcaacccacaggacgctctaatacaaacatggtgcgaagagtctattgagctagttagtagtcctccggcccctgaatgcggctaatcctaactgcggagcacgtgcttccaatccaggaggtggcgtgtcgtaacgggtaactctgcagcggaaccgactactttgggtgtccgtgtttccttttattcttgcattggctgcttatggtgacaattgagagattgttaccatatagctattggattggccatccggtgacaaacagagcaattatatatctctttgttggatacattccattgaactacaaggagttaaaaaccctcaattatattctgttcttgaattccgcaag

SEQ ID NO: 997 - DNA, 742 bp, Enterovirus B
  source 1..742: mol_type = genomic DNA
ttaaaacagcctgtgggttgttcccacccacagggcccactgggcgcaagcacactggtattacggtacctttgtgcgcctgttttacatcccctctcccattataacttagaagcacatacaaaacgaccaataggtggtccagcactccagctgggctctggtcaagtacttctgttaccccggactaagtatcaataagcggctaacgcggctgaaggagaaagcgtccgttacccggccaactacttcgggaaatctagtaacaccatgaaggttgcgcagtgtttcgctccgcacaaacccagtgtagatcaggtcgatgagtcaccgcattccccacaggcgactgtggcggtggctgcgttggcggcctgcccatggggcaacccatgggacgcttcaatactgacatggtgcgaagaatctactgagctagttggtagtcctccggcccctgaatgcggctaatcctaactgcggagcacatacccctaacccaaggggcagtgtgtcgtaacgggcaactctgcagcggaaccgactactttgggtgtccgtgtttccttttattcttatactggctgcttatggtgacaattgagaaattgttaccatatagcttttggattggccatccagtgactaacagagctattatttacttgtttgttggctttgtaccactcaaccttagagttttaaggactctcaatttggttctgctatcgaatacaacaaa

SEQ ID NO: 998 - DNA, 742 bp, unidentified
  source 1..742: mol_type = unassigned DNA; note = Sequence 2 from Patent WO2015007788.1 sequence
ttaaaacagcctgtgggttgttcccacccacagggcccactgggcgctagcacactggtatcacggtacctttgtgcgcctgttttatatccccctccccactgtaacttagagaaatcacataaacgatcaatagaaggcgcagcacaccagctgagtcttgaccaagcacttctgtttccccggactgagtatcaatagactgctcacgcggttgaaggagaaaacgttcgttacccggccaactacttcgagaaacctagtaccaccatgaaagttgcgcagtgtttcgctcagcacaaccccagtgtagatcaggtcgatgagtcaccgcattccccacgggcgaccgtggcggtggctgcgttggcggcctgcctatggggcaacccatgggacgcttcaatactgacatggtgcgaagagtctattgagctagttggtagtcctccggcccctgaatgcggctaatcctaactgcggagcaagtgcccacaaaccagtgggtagcttgtcgtaacgggcaactctgcagcggaaccgactactttgggtgtccgtgtttccttttattcttattctggctgcttatggtgacaattgagagattgttaccatatagctattggattggccatccggtgactaacagagcaatcatattcctctttgttggatttataccacttgattccactagttacaacactctgctacacattatttacttaaaaccaagaag

SEQ ID NO: 999 - DNA, 742 bp, Enterovirus B
  source 1..742: mol_type = genomic DNA
ttaaaacagcctgtgggttgcacccacccacagggcccactgggcgctggtacactggtattaaggtacccttgtacgcctgttttatatccctcccccgatttgtaacttagaattaaagcaaacccgatcaatagtaggtgtggcaaaccagccacatcttgatcaagcacttctgtttccccggaccgagtatcaatagactgctgacgcggttgaaggagaaaacgttcgttacccggccaactacttcgggaaacctagtaccaccatgaaggttgcgcagtgtttcgctccgcacaaccccagtgtagatcaggtcgatgagccaccgcattccccacaggcgactgtggcggtggctgcgttggcggcctgcccatggggtaacccatgggacgcttcaatactgacatggtgcgaagagtccactgagctagttggtattcctccggcccctgaatgcggctaatcctaactgcggagcaggcacccacgagccagtgggcagcctgtcgtaatgggtaactctgcagcggaaccgactactttgggtgtccgtgtttccattttctttttattggctgcttatggtgacaatcacggaattgttaccatatagctattggattggccatccagtgactaacagagcagtaatattcctttttgttggttttgtaccactcaccgtcacgagcctcagaacactcgtattcatcttaacccttaacaagataaa

SEQ ID NO: 1000 - DNA, 742 bp, Enterovirus B
  source 1..742: mol_type = genomic DNA
ttaaaacagcctgtgggttgtacccacccacagggcccaatgggcgctagcactccggtattacggtacccttgtgcgcctgttttatttccccttccccaactgaaacttagaagaaatacacaatgatcgacagtaagcgtggcgcaccagccatgttttgatcaagcacttctgtttccccggaccaagtatcaatagactgctcacgcggttgaaggagaaagcgttcgttaaccggctaactacttcgagaaacccagtaacaccatgaaagttgcagagtgtttcgctcagcactcccccagtgtggatcaggtcgatgagtcactgcgttccccacgggtgaccgtggcagtggctgcgttggcggcctgcctgtggggcaacccacaggacgctctaatacggacatggtgtgaagagtctattgagctagttagtagtcctccggcccctgaatgcggctaatcctaactgtggagcacatgcccctaacccaaggggtggtgtgtcgtaatgggtaactccgcagcggaaccgactactttgggtgaccgtgtttccttttatttttacattggctgcatatggtgacgattgagagattgttgccatatagctattggattggccatccagtgtctaacagagctattgtatatctttttgttggatttgtaccacttgacttgaaagaggtcaggacactacaatacattatactgctgaatactgcaaa

SEQ ID NO: 1001 - DNA, 742 bp, Enterovirus B
  source 1..742: mol_type = genomic DNA
ttaaaacagcctgtgggttgcacccacccacagggcccacagggcgctagcactctggtatcacggtacctttgtgcgcctgttttattaccccttccccaattgaaaattagaagcaatgcacaccgatcaacagcaggcgtggcgcaccagtcacgtctcgatcaagcacttctgtttccccggaccgagtatcaatagactgctcacgcggttgaaggagaaagtgttcgttatccggctaaccacttcgagaaacccagtaacaccatgaaagttgcagggtgtttcgctcagcacttccccagtgtagatcaggtcgatgagtcaccgcgttccccacgggcgaccgtggcggtggctgcgttggcggcctgcctatgggttaacccataggacgctctaatacagacatggtgcgaagagtttattgagctggttagtatccctccggcccctgaatgcggctaatcctaactgcggagcacgtgcctccaatccagggggttgcatgtcgtaacgggtaactctgcagcggaaccgactactttgggtgtccgtgtttccttttattcttatactggctgcttatggtgacaatcgaggaattgttaccatatagctattggattggccatccggtgtctaacagagcgattatatacctctttgttggatttatgcagctcaataccaccaactttaacacattgaaatatatcttaaagttaaacacagcaaa

SEQ ID NO: 1002 - DNA, 742 bp, Enterovirus B
  source 1..742: mol_type = genomic DNA
ttaaaacagcctgtgggttgatcccacccacagggcccattgggcgctagcactctggtatcacggtacctttgtgcgcctgttttataccccctcccccaactgtaacttagaagtaacacacaccgatcaacagtcagcgtggcacaccagccacgttttgatcaagcacttctgttaccccggactgagtatcaatagactgctcacgcggttgaaggagaaagcgttcgttatccggccaactacttcgaaaaacctagtaacaccgtggaagttgcagagtgtttcgctcagcactaccccagtgtagatcaggtcgatgagtcaccgcattccccacgggcgaccgtggcggtggctgcgttggcggcctgcccatggggaaacccatgggacgctctaatacagacatggtgcgaagagtctattgagctagttggtagtcctccggcccctgaatgcggctaatcctaactgcggagcacacaccctcaagccagagggcagtgtgtcgtaacgggcaactctgcagcggaaccgactactttgggtgtccgtgtttcattttattcctatactggctgcttatggtgacaattgagagattgttaccatatagctattggattggccatccggtgaccaatagagctattatatatctctttgttgggtttataccacttagcttgaaagaggttaaaacattacaattcattgttaagttgaatacagcaaa

SEQ ID NO: 1003 - DNA, 742 bp, Enterovirus B
  source 1..742: mol_type = genomic DNA
ttaaaacagcctgtgggttgttcccacccacagggcccactgggcgccagcacactggtatcacggtacccttgtgcgcctgttttataaacccttccccaatgcaacttagaagctcaactttaccggtcaatagacagtccagtacgccaactgggcttcgatcaagcacttctgttaccccggactaagtatcaataggctgctcacgcggctgaaggagaaaacgttcgttacccggccaattacttcgagaaacccagtaacactatggaggttgcgcagtgtttcgttccacacaaccccagtgtagatcaggtcgatgagtcaccgctttccccacgggcgaccgtggcggtggctgcgttggcggcctgcccatggggcaacccatgggacgcttcaatactgacatggtgtgaagagtctattgagctaattggtattcctccggcccctgaatgcggctaatcctaactgcggagcagatactcacgagccagtgggcagtctgtcgtaacgggtaactctgcagcggaaccgactactttgggtgtccgtgtttccttttattcatatattggctgcttatggtgacaattgagagattgttaccatatagctattggattggccatccggtgactaatagagcaattgtttacctatttgttggctttgtgccgttgaactacaaggttttaaaaactattaactacatcctagtacttaacacgttgaa

SEQ ID NO: 1004 - DNA, 742 bp, Enterovirus B
  source 1..742: mol_type = genomic DNA
ttaaaacagcctgtgggttgttcccacccacagggcccattgggcgtcagcaccctggtatcacggtacctttgtgcgcctgttttatatcccttcccccaattgtaacttagaagaaacacacaccgatcaacagcaagcgtggcacaccagccatgttttggtcaagcacttctgttaccccggactgagtatcaatagactgctcacgcggttgaaggagaaagcgtccgttatccggccagctacttcgagaaacctagtaacaccatggaagttgcggagtgtttcgctcagcactaccccagtgtagatcaggtcgatgagtcaccgctttccccacgggcgaccgtggcggtggctgcgttggcggcctgcctatgggggaacccataggacgctctaatacagacatggtgcgaagagtctattgagctagctggtattcctccggcccctgaatgcggctaatcctaactgtggagcacatgcccctaatccaaggggtagtgtgtcgtaatgagcaattccgcagcggaaccgactactttgggtgtccgtgtttcctcttattcttgtactggctgcttatggtgacaattgagagattgttaccatatagctattggattggccatccggtgactaatagagctattgtgtatctctttgttggatttgtaccacttaatttgaaagaaatcaggacactacgctacattttactattgaacaccgcaaa

SEQ ID NO: 1005 - DNA, 742 bp, Enterovirus B
  source 1..742: mol_type = genomic DNA
ttaaaacagcctgtgggttgtacccacacacagggcccactgggcgctagcacactggtatcacggtacctttgtgcgcctgttttataaccccttccccaaacgtaacgtagaagccacacacactgatcaacagtgggcacagcgcaccagccgtgtctcgatcaagcacttctgttttcccggactgagtatcaatagactgctcacgcggttgaaggagaaaacgttcgttacccggctgactacttcgagaagcttagtaacgctatgaaagttgcgaagtgtttcgttcagcactccccccgtgtagatcaggtcgatgagtcaccgcattccccacgggtgaccgtggcggtggctgcgctggcggcctgcccatggggtgacccatgggacgcttcaatacagacatggtgcgaagagcctattgagctagtcagtagtcctccggcccctgaatgcggctaatcctaactgcggagcatgtgccctcaatccagagggtagcgtgtcgtaacgggcaactctgcagcggaaccgactactttgggtgtccgtgtttctttttattcttatattggctgcttatggtgacaattgagagattgttgccatatagctattggattggccatccggtgagtaacagagctattatttactccatcgtaggcttcgtgccattgaactacaaggtcttgaaaactctcaactttgttataatacttaataccacaaa

SEQ ID NO: 1006 - DNA, 742 bp, Enterovirus B
  source 1..742: mol_type = genomic DNA
ttaaaacagcctgtgggttgttcccacccacagggcccactgggcgctagcacactggtatcacggtacccttgtgcgcctgttttatcttcccctccccactgtaacttagaagaatgacataaacggtcaacagatagctcagtacaccaactgagccccgaccaagcacttctgttaccccggaccgagtaacaataggctgctcgcgcggctgaaggtgaaaacgttcgttacccggccaattacttcgagaaacctagtaccaccatgaaggttgcgcagcgtttcgctccgcacaaccccagtgtagatcaggtcgatgagtcaccgcactccccacgggcgaccgtggcggtggctgcgctggcggcctgcctatggggcaacccatgggacgcttcaatactgacatggtgcgaagagtctattgagctaattggtagtcctccggcccctgaatgcggctaatcctaactgcggggcaagtgcccacaaaccagtgggtggcttgtcgtaacgggtaaccctgcagcggaaccgactactttgggtgtccgtgtttccttttattcttattctggctgcttatggtgacaattgagagattgttgccatatagctattggattggccatctggtgagtaacagagcaatcatattcctctttgttggatttataccacttgattccactagttacaacactctgctacatattatttgcttaaatacaagaag

SEQ ID NO: 1007 - DNA, 742 bp, Enterovirus B
  source 1..742: mol_type = genomic DNA
ttttaaagcctgtgggttgttcccacccacagggcccattgggcgctagcactctggtattgcggtacctttgtgcgcctgttttatatccccctcccccatttgaaacttagaagcaagacacaccgatcaatagctgatatggcaagccagccatatcttgatcaagtacttctgtttccccggaccgagtatcaatagactgcttgcgcggtcgaaggagaaagcgttcgttacccggctaattacttcgagaaacctagtaacaccatgaaagttgcagagtgtttcgctcagcacaaccccagtgtagatcaggctgatgagtcaccgcattccccacgggtgaccgtggcggtggctgcgttggcggcctgcctgtggggcaacccacaggacgctctaatacagacatggtgtgaagagtctattgagctaattagtagtcctccggcccctgaatgcggctaatcctaactgcggagcacgtacccccattccaggaggtggcgtgtcgtaacgggtaactctgcagcggaaccgactactttgggtgtccgtgtttccttttatctttacactggctgcttatggtgacaattgaaagattgttaccatatagctattggattggccatccggtgacaaatagagcgattgtatatttgttcattggatttgtaccactaagctataaagcattaaacactcttaaccttatcctagtgcttaactcaacaaa

SEQ ID NO: 1008 - DNA, 742 bp, Enterovirus B
  source 1..742: mol_type = genomic DNA
ttataaacagcgggctgggttgctcccactacagggcccacggcgcgcaagcacactggtatcacggtacttttgtgcgcctgttttatccaccctcccccaatgaaacttagaagcttgattcaaacggtcaatagacaacccagtacaccaactgggtctcgaccaagcacctctgtttccccggactgagtatcaataggctgcttacgtggctgaaggagaaaacgttcgttacccggccaattacttcgagaaacctagtaccaccatgaacgttgcgcagtgtttcgctccacacaaccccagtgtagatcaggtcgatgagtcaccgcattccccacgggtgaccgtggcggtggctgcgctggcggcctgcccatggggtaacccatgggacgctacaatactgacatggtgtgaagagtctattgagctaattggtagtcctccggcccctgaatgcggctaatcctaactgcggagcagatactcacatgccagtgggcagtctgtcgtaacgggcaactctgcagcggaaccgactactttgggtgtccgtgtttccttttattctcatctggctgcttatggtgacaatcgaaagactgttaccatatagctattggattggccatccagtgagtaacagagcgatcattttcctttttgttgggtttataccacttgattacaatagttacaataccttgctatacatcgttcatttgaacacaacaag

SEQ ID NO: 1009 - DNA, 742 bp, Enterovirus B
  source 1..742: mol_type = genomic DNA
ttaaaacagcctgtgggttgttcccacccacagggcccactgggcgctagcacactggtatcacggtacccttgtgcgcctgttttatcaaccccttcccgatgtaacttagaagccaaatcttaccggtcaacaggtggtccagtatgccaactgggctctgaccaagcacttctgttaccccggactgagtatcaataggctgctcacgcggctgaaggagaaaatgtccgttacccggccaattacttcgagaaacctagtaccaccatgaaggttgcgcggcgtttcgctccacacaaccccagtgcagatcaggtcgatgagccaccgcttcccccacgggcgaccgtggcggtggctgcgttggcggcctgcccatgggacaacccatgggacgcttcaatactgacatggtgcgaagagtctattgagctaattggtagtcctccggcccctgaatgcggctaatcctaactgtggagcagatgcccgcaagccagcgggtggtctgtcgtaacgggcaactccgcagcggaaccgactactttgggtgaccgtgtttccttttatttttatactggctgcttatggtgacaattgaaagattgttaccatatagctattggattggccatccggtgactaacagagctatcatatatctatttgttggttacgtcccacttgactatagagttctacgcaccttatatttcattttagatctgaacaaagcgag

SEQ ID NO: 1010 - DNA, 742 bp, Enterovirus B
  source 1..742: mol_type = genomic DNA
ttaaaacagcctgtgggttgttcccacccacagggcccatggggcgccagcacactggtattgcggtacctttgtgcgcctgttttattcaccctttcccaatgaaacttagaagcttaactcaaccggtcgatagacagcccagtacaccaactgggttttgaccaagtactcctgtttccccggactgagtatcaataagctgctcgcgcggctgaaggagaaaacgttcgttacccggccaattacttcgagaaacctagtaccaccatgaacgttgcgcagtgtttcgctccgcacaaccccagtgtagatcaggtcgatgagtcaccgcaatccccacgggcgaccgtggcggtggctgcgctggcggcctgcccatggggcatcccatgggacgcttcaatactgacatggtgcgaagagtctattgagctaattggtaatcctccggcccctgaatgcggctaatcctaactgcggggcagacacccacacgccagtgggcagtctgtcgtaacgggtaactccgcagcggaaccgactactttgggtgtccgtgtttccttttatctttatattggctgcttatggtgacaattgaaagattgttgccatatagctattggattggccatccggtgtctaatagagcaattatatatctctttgttggcttcatcccgttaaataaagtgagctaccagaccctgtgctatattatcaaattgaacacaataaa

SEQ ID NO: 1011 - DNA, 742 bp, Enterovirus B
  source 1..742: mol_type = genomic DNA
ttaaaacagcctgtgggttgcccccacccgcagggcccattgggcgctagcacactggtatcacggtacctttgtgcgcctgttttatcctccctccccaagtgcaacgtagaagcaagacacaaaaggtcaacagatagcccagcacaccagttgggtttcgaccaagcacttctgtctccccggaccgagtatcaataagctgctcacgcggctgaaggagaaagcgttcgttacccggctagttacttcgagaaacccagtaccaccatgaaggttgcgcagcgtttcgctccgcacaaccccagtgtagatcaggtcgatgagtcaccgcgttccccacgggcgaccgtggcggtggctgcgttggcggcctgcccatggggcaacccatgggacgcttcaatactgacatggtgcgaagagtctattgagctaactagtagtcctccggcccctgaatgcggataatcttaactgcggagcaggtgctcacaatccagtgggtggcctgtcgtaacgggcaactctgcagcggaaccgactactttgggtgtccgtgtttccttttatctctttgttggctgcttatggtgacaattgaatgattgttgccatatagctattggattggccatccggtgagcagcagatccattatttaccagtttgttggatttgtaccacttgatcacatagtctttagaacacttgtctttattctaaatcttaacaaggcaag

SEQ ID NO: 1012 - DNA, 742 bp, Enterovirus B
  source 1..742: mol_type = genomic DNA
ttaaaacagcctgtgggttgttcccacccacagggcccaccgggcgctagcacactggtattgcggtacctttgtgcgcctgttttatacacccctccttaatgtaactcagaagtacaacattaccggtcaacagatgactcagtaaaccaactgagcctcgaccaagcacttctgtttccccggaccgagtatcaataggctgctcacgcggctgaaggagaaagtgttcgttacccggccaattacttcgagaagcccagtaccaccatggaggttgcgcggcgtttcgctccgcacatccccagtgtagatcaggctgatgagtcaccgcgttccccacgggtgaccgtggcggtggctgcgctggcggcctgcccatggggtaacccatgggacgcttcaatactgacatggtgtgaagagcctattgagctaattggtagtcctccggcccctgaatgcggctaatcctaactgcggagcagatacccacacaccagcgggcagtctgtcgtaacgggcaactctgcagcggaaccgactactttgggtgtccgtgtttccttttatttttatgctggctgcttatggtgacaattgaggaattgttaccatatagctattggattggccatccagtgtccaacagagcgatcatttacctgttcgttgggttcgtaccactaaaccacaagtcactcagcacacttaattacattataactctcaacacaacaag

SEQ ID NO: 1013 - DNA, 742 bp, Enterovirus B
  source 1..742: mol_type = genomic DNA
ttaaaacagcctgtgggttgttcccatccacagggcccactgggcgctagcacactggtatcacggtacctttgtgcgcctgttttatttcccccctcccgaagtaacctagaagcaggtaatatacggtcaataggtgacacagtataccaactgggtcttgaccaagcacttctgttaccccgggctgagtatcaataagctacttacgtggctgaaggagaaaacgctcgttacccggccaattacttcgagaaacctagtaacaccatgaaggttgcgcagtgtttcgctccgcacaaccccagtgtagaccaggtcgatgagtcaccgcattccccacgggcgaccgtggcggtggctgcgttggcggcctgcccatggggcaacccatgggacgcttcaaaactgacatggtgcgaagagtctattgagctaattggtagtcctccggcccctgaatgcggctaatcccaactgcggagcaaatacccacatgccagtgggcagtctgtcgtaatgggtaactctgcagcggaaccgactactttgggtgtccgtgtttctttttattcttatactggctgcttatggtgacaattgaggaattgttgccatatagctattggattggccatccggtgacaaacagagcaattatttacttgtttgttggattcgtaccgctaaaccacagagtactaagcacccttaattttattatattacttaactcgacaaa

SEQ ID NO: 1014 - DNA, 742 bp, Enterovirus B
  source 1..742: mol_type = genomic DNA
ttaaaacagcctgtgggttgttcccacccacagggcccactgggcgctagcacactggtattacggtacctttgtgcgcctgttttatctacccttgcccaatgcaacatagaagcttagtccaaaaggtcaataggcagcccagtgcaccaactgggtccagaccaagcacttctgttaccccggaccaagtatcagtaggctgctcacgcggctgaaggagaaaacgttcgttacccggccaactacttcgagaaacctagtagcaccatgaaggttgcgcagtgtttcgctccgcacagccccagtgtagatcaggtcgatgagccaccgcattccccacgggtgaccgtggcggtggctgcgttggcggcctgcccatggggtaacccatgggacgcttcaatactgacatggtgtgaagagtctattgagctagttggtagtcctccggcccctgaatgcggctaatcctaactgcggagcgtgcgcttgcaacccagtgagtagcacgtcgtaatgggtaactctgcagcggaaccgactactttgggtgtccgtgtttccttttattccttgtctggctgcttatggtgacaattgagagattgttgccatatagctattggattggccatccggtatctaacagggcgatcatttacctgtttgttggtttcatacccttgaatcttgaggtttataataccctcactcttataataaaactcaatacatcaag

SEQ ID NO: 1015 - DNA, 742 bp, Enterovirus B
  source 1..742: mol_type = genomic DNA
ttaaaacagcctgtgggttgtacccacccacagggcccactgggcgccagcacactggtatcacggtacccttgtgcgcctgttttatccacccctccccgaagtaacttagaagctctaaataagcggtcagcagccagcccagcacaccagctgggttttgaccaagtacttctgttaccccggaccgagtatcaataggctgcacacgcggctgaaggagaaaacgttcgttacccggccatctacttcgagaaacctagtaccactatgaaagttgcgaagcgtttcgctccacacaaccccagtgtagatcaggctgatgagtcaccgcattccccacaggtgactgtggcggtggctgcgttggcggcctgcccatggggcaacccatgggacgcttcaataccgacatggtgcgaagagtctattgagctagatggtagtcctccggcccctgaatgcggctaatcctaactgcggagcaggtgcacacaaaccagtgagtagcctgtcgtaatgggcaactctgcagcggaaccgactactttgggtgtccgtgtttctttttattcttatattggctgcttatggtgacaattgaaagattgttaccatatagctattggattggccatccggtgactagcagagcactgatatacctatttgtgggctttgtaccactcaactttgtcagctacaccacattgctatatattgtccaactgaacgcaagaag

SEQ ID NO: 1016 - DNA, 742 bp, Enterovirus D
  source 1..742: mol_type = genomic DNA
ataaaacagcctgtgggttgttcccacccacagggcctactgggcgctagcacactggtattgcggtacctttgtgcgcctgttttatctgcccttccccaatgtaacttagaagttaaactcagacggccaatagacagcccagtacaccaactgggtctcggccaggcacttctgtttccccggactgagtatcaataagctgctcgcgcggctgaaggagaaaacgttcgttatccggccaattacttcgagaaacctagtaccaccatggacgttgcgcagtgtttcgctccgcacaaccccagtgtagatcaggtcgatgagtcaccgcaatccccatgggcgaccgtggcggtggctgcgctggcggcctgcccatgggtcaacccatgggacgcttcaatactgacatggtgtgaagagtctattgagctaattggtagtcctccggcccctgaatgcggctaatcccaactgcggagcagatacccacacgccagtgggcagtctgtcgtaacgggcaactctgcagcggaaccgactactttgggtgtccgtgtttccttttatccttacattggctgcttatggtgacaattgagagattgttaccatatagctattggattggccatccagtgagcaacagagcaattatatttctctttgttgggtttgtaccacttgattttgatagttacaacaccctactttatattgttcgcctgaacacgagaaa

SEQ ID NO: 1017 - DNA, 742 bp, Enterovirus B
  source 1..742: mol_type = genomic DNA
ttaaaacagctctggggttgttcccaccccagaggcccacgtggcggccagtactccggtattgcggtacccttgtacgcctgttttatactcccttcccccgtaacttagaagaaataaaccaagttcactaggagggggtacaaaccagtaccaccacgaacaagcacttctgtttccccggtgacattgcatagactgtacccacggttgaaagcgactgatccgttacccgctactgtacttcgagaagcctagtaccatcttggaatcttcgacgcgttgcgctcagcactcaaccccagagtgtagcttaggtcgatgagtctggacaatccccaccggtgacggtggtccaggctgcgttggcggcctacctgtggcccaaagccacaggacgctagttgtgaacaaggtgtgaagagcctattgagcttcagtagagtcctccggcccctgaatgcggctaatcccaaccacggagcaggtggtcataatccaatgactggcctgtcgtaacgcgcaagtctgtggcggaaccgactactttgggtgtccgtgtttccttttattttgtcaatggctgcttatggtgacaatctaagattgccatcatatagcttttggattggccatccggtattattttgagttatttgatttgttgtccacagctctttacagtatcacttaactattattgtttgtattttgctccttggatcacaaccaggtaatcaga

SEQ ID NO: 1018 - DNA, 742 bp, Enterovirus B
  source 1..742: mol_type = genomic DNA
ttaaaacagcctgtgggttgttcccacccacagggcccattgggcgctagcactctggtattacggtacctttgtgcgcctgttttatgtcccctcccccaatcgcaacttagaagcaacacacactgatcaacagtaagcgtggcataccagccacgttttgatcaagcacttctgttaccccggactgagtatcaatagactgctcacgcggttgaaggagaaagcgttcgttatccggccaactacttcgagaaacctagtaacaccgtgaaagttgcagagtgtttcgctcagcactaccccagtgtagatcaggtcgatgagtcaccgcattccccacgggcgaccgtggcggtggctgcgctggcggcctgcctacggggaaacccgtaggacgctctaatacagacatggtgcgaagagtctattgagctagttggtagtcctccggcccctgaatgcggctaatcctaactgcggagcacacacccccaagccagggggcagtgtgtcgtaacgggtaactctgcagcggaaccgactactttgggtgtccgtgtttcattttattcctatgctggctgcttatggtgacaattgacagattgttaccatatagctattggattggccatccggtgactaatagagccattatataccactttgttgggtttataccactcaacttgaaagaggtcaaaacactacagctcatcattaaattgaacacaacaaa

SEQ ID NO: 1019 - DNA, 742 bp, Enterovirus B
  source 1..742: mol_type = genomic DNA
tttaaaacagcctgtgggttgttcccacccacagggcccactgggcgctagcactctggtatcacggtacccttgtgcgcctgttttatatccccaccccagtggaacattagaagcagcacacctatgatcaatagtgggcgtggcatccagtcacgttatgatcaagcacttctgtgaccccggactgagtatcaatagactgctcacgcggttgaaggagaaaacgttcgttacccggccagttacttcgagaaacccagtaacaccatgaatgttgcagagtgtttcgctcagcacttcccccgtgtagatcaggtcgatgagccactgcattccccacgggcgaccgtggcagtggctgcgttggcggcctgcctatggggtcacccataggacgctctaatactgacatggtgcgaagagtctattgagctaactggtagtcctccggcccctgaatgcggctaatcctaactgtggagcacattcccccaatccagggggcagtgtgtcgtaacgggcaactctgcagcggaaccgactactttgggtgtccgtgtttctttttattctcatattggctgcttatggtgacaattacagaattgttaccatatagctattggattggccatccggtgactaacagagcaattatttatcaattcgttggatttgtcccactcgatttcaaagcagtcaatacactctcatatatcgttacactcaacacaacaaa

SEQ ID NO: 1020 - DNA, 742 bp, unidentified
  source 1..742: mol_type = unassigned DNA; note = unclassified Enterovirus sequence
ttaaaacagcctgtgggttgttcccacccacagggcccactgggcgctagcacactggtatcacggtacctttgtgcgcctgttttatccacccttccccaagtgacttagaagcataccacacacggtcaacaggcggctcaatgcaccaattgagtcatgaccaagtacttctgttaccccggacttagtatcaataagctgctcacgcggctgaaggagaaaacgttcgttacccggccaattacttcgagaaacctagtagcaccatggaggttgcgcggcgtttcgctccacacaaccccagtgtagatcaggctgatgagtcaccacaatcctcacgggcgaccgtggtggtggctgcgctggcggcctgcccatggggtaacccatgggacgctacaatactgacatggtgtgaagagtctattgagctaattggtagtcctccggcccctgaatgcggctaatcctaactgcggagcagatacccacacaccagtgggcagtctgtcgtaacgggcaactctgcagcggaaccgactactttgggtgtccgtgtttccttttttctcttatactggctgcttatggtgacaattgaaagattgttaccatatagctattggattggccatccagtgacaaacagagcgattgtttacctgttcattggtttcgtaccgctgaattacacagttttaaacacccttaatcttattttggcacttaatacatcaaa

SEQ ID NO: 1021 - DNA, 742 bp, Enterovirus B
  source 1..742: mol_type = genomic DNA
ttaaaacagctctggggttgtacccactcacagggcccactgggcgctagcacactggtatcacggtacctttgtgcgcctgttttataaccccttccccaaacgtaacgtagaagctacacacactgatcaatagtaggcacagcgcaccagttgtgtcccgatcaagcacttctgtctccccggaccgagtatcaatagactgctcacgcggttgaaggagaaaacgttcgttaaccggctgactacttcgagaaacctagtagtactatgaaagttgcgaagcgtttcactcagcacttcccccgtgtagatcaggctgatgagtcactgcgttccccacgggtgaccgtggcagtgactgcgttggcggcctgcccatggggtaacccatgggacgcttcaatacggacatggtgcgaagagtctattgagctagccagtagtcctccggcccctgaatgcggctaatcctaactgcggagcatgtgccctcgatccagggggtagcgtgtcgtaacgggcaactctgcagcggaaccgactactttgggtgtccgtgtttctttttattcttatattggctgcttatggtgacaattgagagattgttaccatatagctattggattggccacccggtgactaatagagctattatctactcctttataggttttgtgccgttgaactacaaggtcttaaggactctcaactttatcataatacttaatactgcaaa

SEQ ID NO: 1022 - DNA, 742 bp, Enterovirus B
  source 1..742: mol_type = genomic DNA
ttaaaacagcctgtgggttgttcccatccacagggcccactgggcgcttgcactctggtatcacggtaccattgtgcgcctgttttatatcccctatccccagttgtaacttagaagcgatgccttccgaccaatagtgggcatggcacaccagtcatgtcttggtcaagtacacctgtttccccggactgagtatcaatagactgctcacgcggttgaaggagaaaacgttcgttacccggctaactacttcgagaaacctagtaacaccatgaatattgcgaagtgtttcgttcagcaccccccagtgtagatcaggccgatgagtcaccgcgttccccacaggcggccgtggcggtggctacgctggcggcctgcctatggggcaacccataggacgcttcaatgtggacatggtgtgaagagtctattgagctagttagtagtcctccggcccctgaatgcggctaatcctaatctcggagcaggcacccacaaaccagtgggcaacctgtcgtaatgggtaactctgcggcggaaccgactactttgggtgtccgtgtttccctttattcttgtattggctgcttatggtgacaattaggagattgttaccatatagctattggattggccatccggtgtctaacagagcaattatttacctctttgttggttacgtaccattaaactttaaggttatagcaacgctcaagtttatcctacttctcaataaagtaaa

SEQ ID NO: 1023 - DNA, 742 bp, Enterovirus A
  source 1..742: mol_type = genomic DNA
ttaaaacagcctgtgggttgttcccacccacagggcccactgggcgttagcacactggtatcaaggtacctttgtgcgcctgttttattcacccttccccttcgtaacttagaagcatagctcagacggtcaatagacagcccagcataccagctgggtcatgaccaagcacttctgttgccccggactgagtatcaataggctgcttgcgcggctgaaggagaaaagttcgttacccggccagttacttcgagaaacctagtaacaccatggaagttgcgtagtgtttcgctccgcacaaccccagtgtagatcaggtcgatgagtcaccgcataccccacgggtgaccgtggcggtggctgcgttggcggcctgcccatggggcatacccatgggacgctacaatactgacatggtgcgaagagtctattgagctaattggtagtcctccggcccctgaatgcggctaatcctaactgcggagcagatacccacacaccagtgggcggtctgtcgtaacgggtaactctgcagcggaaccgactactttgggtgtccgtgtttccttttattcctaatctggctgcttatggtgacaattgagagattgttaccatatagctattggattggccatccggtgactaacagagcgatcatctacctgtttgttggtttcattccactaaactacaaagtactaaacactctgaattacattttactgcttaactcatcaaa

SEQ ID NO: 1024 - DNA, 743 bp, Enterovirus A
  source 1..743: mol_type = genomic DNA
ttaaaacagctgtgggttgtcacccacccacagggtccactgggcgctagtacactggtatctcggtacctttgtacgcctgttttataccccctccctgatttgcaacttagaagcaacgcaaaccagatcaatagtaggtgtgacataccagtcgcatcttgatcaagcacttctgtatccccggaccgagtatcaatagactgtgcacacggttgaaggagaaaacgtccgttacccggctaactacttcgagaagcctagtaacgccattgaagttgcagagtgtttcgctcagcactccccccgtgtagatcaggtcgatgagtcaccgcattccccacgggcgaccgtggcggtggctgcgttggcggcctgcctatggggtaacccataggacgctctaatacggacatggcgtgaagagtctattgagctagttagtagtcctccggcccctgaatgcggctaatcctaactgcggagcacatacccttaatccaaagggcagtgtgtcgtaacgggcaactctgcagcggaaccgactactttgggtgtccgtgtttctttttattcttgtattggctgcttatggtgacaattaaagaattgttaccatatagctattggattggccatccagtgtcaaacagagctattgtatatctctttgttggattcacacctctcactcttgaaacgttacacaccctcaattacattatactgctgaacacgaagcg

SEQ ID NO: 1025 - DNA, 743 bp, Enterovirus A
  source 1..743: mol_type = genomic DNA
ttaaaacagcctgtgggttgcacccactcacagggcccactgggcgcaagcactctggcacttcggtacctttgtgcgcctgttttatatcccctcccccaatgaaatttagaagcagcaaaccccgatcaatagcaggcataacgctccagttatgtcttgatcaagcacttctgtttccccggactgagtatcaatagactgctcacgcggttgaaggagaaaacgttcgttatccggctaactacttcggaaagcctagtaacaccatggaagttgcggagagtttcgttcagcacttccccagtgtagatcaggtcgatgagtcaccgcattccccacgggcgaccgtggcggtggctgcgttggcggcctgcccatggggtaacccatgggacgctctaatacggacatggtgtgaagagtctactgagctagttagtagtcctccggcccctgaatgcggctaatcccaactgcggagcacacgcccacaagccagtgggtagtgtgtcgtaacgggcaactctgcagcggaaccgactactttgggtgtccgtgtttccttttattcttatgttggctgcttatggtgacaattaaagagttgttaccatatagctattggattggccatccggtgtgcaacagagcgatcgtttacctatttattggttttgtaccattgacactgaagtctgtgatcacccttaattttatcttaaccctcaacacagccaaac

SEQ ID NO: 1026 - DNA, 743 bp, Enterovirus A
  source 1..743: mol_type = genomic DNA
ttaaaacagcctgtgggttgtacccaccctcagggcccactgggcgccagcactctggtaccacggtacctttgtgcgcctgttttatcatcccacccctacctgaaacgtagaagcaataatcagtcgaccaatagtgggtgtggcacaccagccacatcttggtcaagcacttctgtttccccgggttgagtatcaatatgctgttcacacggctgaaggagaaaacgcccgttatccggccaactacttcgagaagcctagtatcgccatgaacattgcaaggcgtttcgctcagcacttcccccgtgtagatcaggccgatgagtcaccgcattccccacgggcgaccgtggcggtggctgcgttggcggcctgcctgtgggttgacccacaggacgccttaatatagacatggtgtgaagagcctattgagctggttggtattcctccggcccctgaatgcggctaatcctaactgtggagcacatactcacaagccagtgggtggtgtgtcgtaatgggcaactctgcagcggaaccgactactttgggtgtccgtgtttccttttatacttatactggctgcttatggtgacaatcagagaattgttaccatatagctattggattggccatccggtgtgcaacagagctattgtgtatttatttgttggatttgtcccactatcacatacatcccttaacactttgtattttattttgaaattaaacgcaagaaa

SEQ ID NO: 1027 - DNA, 743 bp, Enterovirus A
  source 1..743: mol_type = genomic DNA
tttaaaacagcctgtgggttgcacccacccacagggcccactgggcgctagcactctggtactgcggtacctttgtgcgcctgttttatcaccccaccccatctggaacgtagaagcaatgcacaactgaccaatagtgggtgtggcgcaccagccacatcttggtcgagcacttctgtttccccgggtttagtatcaataagctgctcacgcggctgaaggagaaaacacccgttatccggccgactacttcgagaaacctagtaccgctatgaacgttgcaaggcgtttcgttcagcacttcccccgtgtagatcaggccgatgagtcaccgcattcctcacgggcgaccgtggcggtggctgcgttggcggcctgcctatgggcttgcccataggacgccttaatactgacatggtgcgaagagtctattgagctagttggtagtcctccggcccctgaatgcggctaatcctaactgcggagcacatactcacaaaccagtgagcggtgtgtcgtaacgggcaactctgcagcggaaccgactactttgggtgtccgtgtttccttttattcttatactggctgcttatggtgacaattaaagaattgttaccatatagctattggattggccatccggtgtctaacagagctattatatacttgtttgttggattcatctcgttatcacacaaatcccttaacactttgtgttttatcttgaatttgaactcaaaaag

SEQ ID NO: 1028 - DNA, 743 bp, Enterovirus A
  source 1..743: mol_type = genomic DNA
tttaaaacagcctgtgggttgtacccacccacagggcctactgggcgccagcactctggtactatggtacctttgtgcgcctgttttatattcctcccccaaattgcaacttagaagacatgcactccgatcaatagcaggcgtggcgcaccagctgcgtcttgatcaagcatttctgtttccccggactgagtatcaatagactgctcacgcggttgagggagaaaacgtccgttacccggccaactacttcgagaagcctagtaacactatgaaagttgcggggcgtttcgctcagcactcccccagtgtagatcaggtcgatgagtcaccgcattccccacgggcgaccgtggcggtggctgcgttggcggcctgcctatggggcaacccatgggacgctctaatatggacatggtgtgaagagcttattgagctagttggtagtcctccggcccctgaatgcggctaatcctaactgcggagcacgtgcctccaaaccagaaggtggcgtgtcgtaatgggcaactctgcagcggaaccgactactttgggtgtccgtgtttccttttattcttactctggctgcttatggtgacaattgacagattgttaccatatagctattggattggccatccggtgacgaacagagcgattgtgtaccagtttattggtttcgtccacttgaatacacgtgaattcaataccttgctgttggtattgaatttcaatacaacaaa

SEQ ID NO: 1029 - DNA, 743 bp, Enterovirus A
  source 1..743: mol_type = genomic DNA
ttaaaacagcctgtgggttgcacccacccacagggcccaatgggcgtcagcactctggtaccgaggtacctttgtgcgcctgttttatttccccttcccctgatgcaacttagaagctccgaactaatgatcaatagtaggtgtggcacgccagccacatcttgatcaagcacttctgtttacccggaccgagtatcaataagctgcgcaagcggctgaaggagaaagcgttcgttatccggccaactacttcgagaagcttagtaccaccatgaacgttgcagagtgtttcgttcagcacaaccccggtgtagatcaggccgatgagtcaccgcgttccccatgggcgaccatggcggtggctgcgttggcggcctgcccatggagcaatccatgggacgctctaatactgacatggtgcgaagagcctattgagctagttggtgatcctccggcccctgaatgcggctaatcctaactgcggagcatgcgcccacaagccagtgggtggtgtgtcgtaacgggtaactctgcagcggaaccgactactttgggtgtccgtgtttccttttatctttacattggctgcttatggtgacaattgaagaattgttaccatatagctattggattggccatccggtgtgcaatagagcgattatatacctatttgttggatttgttccattgacatatagatctcttaacactctacaacacatcttgatcttgaacacgagaaa

SEQ ID NO: 1030 - DNA, 743 bp, Enterovirus A
  source 1..743: mol_type = genomic DNA
ttaaaacagcctgtgggttgtacccacccacagggcccactgggcgctagcactctgattctacggaatctttgtgcgcctgttttacaaccccctccccctatgtaacttagaagcaatgcaccaatgatcaacagcaggcgtggcgcaccagccatgtcttgatcaagcacttctgtttccccggacagagtatcaatagactgctcgcgtggtcgaaggagaaaacgtccgttacccggctaactacttcgagaaacctagtagcaccaatgaagctgcagagcgtttcgctcagcacttaccccgtgtagatcaggccgatgagtcactgcgttccccacgggcgaccgtggcagtggctgcgttggcggcctgcctatggggtcacccataggacgctctaatgtggacatggtgcgaagagtctattgagctagttagtagtcctccggcccctgaatgcggctaatcctaactgcggagcgcataccctcaaaccagggggtggtgcgtcgtaacgggtaactctgcagcggaaccgactactttgggtgtccgtgtttccttttattttcttaatggctgcttatggtgacaattgaggaattgttaccatatagctattggattggccatcaggtgtgtaacagagcaattatctacttgtttgtaggatataccccattaacgttcaaatctcttaacacactacagtacatactaactttgaacacaagaaa

SEQ ID NO: 1031 - DNA, 743 bp, Enterovirus A
  source 1..743: mol_type = genomic DNA
ttaaaacagcctgtgggttgtacccacccacagggcccactgggcgccagcactctggtaatacgttacctttgtgcgcctgttttacctccccctaccctggaacactttagaagtaaagcatatctggtcaatagaaggtgtggcgaaccagctgcatctcgaccaagcacttctgtttccccggactgagtatcaatagactgctaacgcggtcgaaggagaaaacgttcgttatccggctagctacttcgagaagcctagtaacaccatgaaagttgcagagtgtttcactcagcacttcccccgtgtagatcaggtcgatgagtcaccgcgacccccacgggcgaccgtggcggtggctgcgttggcggcctgcctgtggggcaacccataggacgctctaatacagacatggtgtgaagagcctattgagctagctagtagtcctccggcccctgaatgcggctaatcctaactgcggagcacatgctcgtgaaccagcgagtagtgtgtcgtaatgggtaactctgcagcggaaccgactactttgggtgtccgtgtttctttttattcttacattggctgcttatggtgacaattaaagaattggcaccatatagctattggattggccatcctgtgactaacagagctattatatatctctttgttggatttgttcccttgaggctcactacttataacacactttgttttatattgactctcaattcagcaaa

SEQ ID NO: 1032 - DNA, 743 bp, Enterovirus A
  source 1..743: mol_type = genomic DNA
ttaaaacagcctgtgggttgtacccacccacagggcccactgggcgcgagcactctggtatcacgatacctttgtgcgcctgttttatatcccttccccattaatgtaacatagaagttatgcaccccgatcaatagcaggcatggcgctccagctatgtcttgatcaagcacttctgtttccccggactgagtatcaatagactgcttgcgcggttgaaggagaaaacgttcgttatccggctaactacttcgggaagcttagtaatgccatggaagttgcggagagtttcgctcagcacttccccagtgtagatcaggctgatgagtcaccgcattccccacgggtgaccgtggcggtggctgcgttggcggcctgcccatagggagacctatgggacgctctaatacggacatggtgtgaagagcctactgagctagttagcagtcctccggcccctgaatgcggctaatcctaactgcggagcacgcgtctccaatccaggggatagcgtgtcgtaatgggcaactctgcagcggaaccgactactttgggtgtccgtgtttccttttattcttacactggctgcttatggtgacaattgaggaattgttaccatatagctattggattggccatccggtgactaacagagctattatttaccaatttgttggatttgtacctctttcactcaccgtttaccacacccttctatacctattacaactgaatagtagaag

SEQ ID NO: 1033 - DNA, 743 bp, Enterovirus C
  source 1..743: mol_type = genomic DNA
ttaaaacagcctgtgggttgttcccaccccagaggcccacgtggcggctagtactctggtattacggtacctttgtacgcctgttttatactccctccccatgtaactttagaagcaattcaataagttcaatagagggggtacaaaccagtaccaccacgaacaagcacttctgtctccccggtgatcttgcatagactgttcccacggttgaaagcgagtgatccgttatccgcttgagtacttcgagaagcctagtaccaccttggaatcttcgatgcgttgcgctcagcactctgccccgagtgtagcttaggctgatgagtctgggctttccccaccggcgacggtggcccaggctgcgttggcggcctacccgtggtcaacaccacgggacgctagttgtgaacaaggtgtgaagagcctattgagctactcaagagtcctccggcccctgaatgcggctaatcctaaccatggagcaggtactctcaacccagagggcagcctgtcgtaacgcgtgagtccgtggcggaaccgactactttgggtgaccgtgtttccttttatttttgactggctgcttatggtgacaatcatagattgttatcatagagcgaattggattggccatccagtgaaatataaacacgttatctacttgtttgttggatttactccactcactcagtttacccctagcataataatagcagtactactgataaggaattattgccacc

SEQ ID NO: 1034 - DNA, 743 bp, Enterovirus B
  source 1..743: mol_type = genomic DNA
tttaaaacagcctgtgggttgttcccacccacaggcgccaccgggcgttagcacactggtatcacggtacccttgtgcgcctgttttataaccccaccccgagtaaaccttagaagcaatgcacctctggtcaatagtaggtgtgacacaccagtcacatcgtgaccaagcacttctgtctccccggactgagtatcaataggctgctcgcgcggctgaaggagaaagcgttcgttacccggccagctacttcgagaagcctagtaacaccatgaaggttgcagagtgtttcgctcagcacttcccctgtgtagatcaggccgatgagtcaccgcgttcctcacgggcgaccgtggcggtcgctgcgctggtggcctgcctatggggcaacccataggacgctctaatgctgacatggtgcgaagagtctattgagctagctggtagtcctccggcccctgaatgcggctaatcccaactgcggagcacgcaccctcaaaccagggggcagcgtgtcgtaacgggcaactctgcagcggaaccgactactttgggtgtccgtgtttctttttattcctatattggctgcttatggtgacaattgagagattgttaccatatagctattggattggccatccggtgagcaacagagctattgtgtatctgtttactggtttcataccccttaattacaaagaagtcaaaacccttcacttgatcttgttattcaatacaacaaa

SEQ ID NO: 1035 - DNA, 743 bp, Enterovirus C
  source 1..743: mol_type = genomic DNA
ttaaaacagctctggggttgttcccaccccagaggcccacgtggcggccagtactctggtatcacggtacctttgtacgcctgttttatactcccttcccgcaacttagacgcataaaaaccaagttcaatagaagggggtacaagccagtaccaccacgaacaagcacttctgtttccccggtgatgttgtatagactgctcgcgtggttgaaagcgacagatccgttatccgcttgtgtacttcgagaagcccagtaccaccttggaatcttcgatgcgttgcgctcagcactcaaccccagagtgtagcttaggctgatgagtctggacatcccccaccggtgacggtggtccaggctgcgttggcggcctacccatggctaacgccatgggacgctagttgtgaacagggtgtgaagagcctattgagctacataagagtcctccggcccctgaatgcggctaatcccaacctcggagcaggtggtcacataccagtgactggcctgtcgtaacgcgcaagtccgtggcggaaccgactactttgggtgtccgtgtttccttttattttataatggctgcttatggtgacaatcacagattgtcgtcataaagcgaattggattggccatccggtgatagtgaaattcattacttaactgtttactggattcgctccaccgcaagtgtttgctctgagtacaatttcaatagttactttaagtagacaattgtattaca

SEQ ID NO: 1036 - DNA, 743 bp, Enterovirus B
  source 1..743: mol_type = genomic DNA
ttaaaacagcctgtgggttgtacccacccacagggcccactgggcgctagcactctggtattacggtacccttgtgcgcctgttttatataccccgccccaagcaaacgctagatgtaacgcacttatgatcaatagcaggcgtggcactccagccacgttatgatcaagcacttctgtctccccggaccgagtatcaatagactgctcacgcggtcgaaggagaaaacgttcgttacccgaccagctacttcgagaaacctagtaactccatggaggttgcagagtgtttcgttcagcacttcccccgtgtagatcaggctgatgagtcaccgcgttcctcacgggcgaccgtggcggtggctgcgttggcggcctgcctatgggtatacccataggacgctctaatactgacatggtgcgaagagtctattgagctagttggtagtcctccggcccctgaatgcggctaatcctaactgcggagcacatacccccaacccagggggcagtgtgtcgtaacgggtaactctgcagcggaaccgactactttgggtgtccgtgtttccttttattcttacattggctgcttatggtgacaattgagagattgttaccatatagctattggattggccatccagtgactaacagagctattatttacctttttgttggcttcgtatcacttggtttaaaagaggttagtactttatattgcattatattactaaacacgagaaa

SEQ ID NO: 1037 - DNA, 743 bp, Enterovirus B
  source 1..743: mol_type = genomic DNA
ttaaaacagcctgtgggttgttcccacccacagggcccactgggcgttagcactctggtatcgcggtacccttgtgcgcctgttttatccgccctttcccaaacgtaacttagaagctcaacttgaatggtcagcaggaaacccagtacgccaactgggtcacgaccaagcacttctgtaaccccgggccgagtatcaataagctgctcacgcggttgaaggagaaaacgcccgttacccggccaattacttcgagaaacctagtaccaccatggaggttgcgtagtgtttcgctccgcacaaccccagtgtagatcaggccgatgagtcaccgcgttccccacgggcgaccgtggcggtggctgcgttggcggcctgcccatgggataacccatgggacgcttcaatactgacatggtgcgaagagtctattgagctaattggtagtcctccggcccctgaatgcggctaatcccaactgcggagcagatacccacatgccagtgggcagtctgtcgtaacgggcaactctgcagcggaaccgactactttgggtgtccgtgtttccttttattcatacattggctgcttatggtgacaattgaaagattgttaccatatagctattggattggccatccggtgtctaatagagcgattgtctacttgttcattgggtttgtacctttaaaccttaaagttcttaacactctcaaccttgtgctacaactcaacacggcaaa

SEQ ID NO: 1038 - DNA, 743 bp, Enterovirus B
  source 1..743: mol_type = genomic DNA
ttaaaacagcctgtgggttgatcccacccacagggcccactgggcgtcagcactctggtatcacggtacctttgtgcgcctgttttatactccctccccccaaccgtaacttagaagcagcactaactgatcaatagccagcgcggcatgccagccacgcttcgatcaagcacttctgttaccccggactgagtatcaatagactgctcacgcggttgaaggagaaaacgttcgtcatccggccaactacttcgagaaacctagtaacaccatggaagttgcggagtgtttcgctcagcactaccccagtgtagatcaggtcgatgagtcaccgcattccccacaggcgactgtggcggtggctgcgttggcggcctgcccatggggaaacccatgggacgctcttatatagacatggtgcgaagagtctattgagctagttggtagtcctccggcccctgaatgcggctaatcctaactgcggagcatacaccctcaaaccagagggcagtgtgtcgtaatgggcaactctgcagcggaaccgactactttgggtgtccgtgtttcactttatttctaaattggctgcttatggtgacaattgagagattgttaccatatagctattggattggccatccggtgaccaatagagctattatatatctctttgttgggttcataccacttagcttgaaagaggttaaaactctgcattacattatactattgaattccgcaaa

SEQ ID NO: 1039 - DNA, 743 bp, Enterovirus B
  source 1..743: mol_type = genomic DNA
ttaaaacagcctgtgggttgttcccacccacagggcccattgggcgtcagcactctggtatcacggtacccttgtgcgcctgttttataatccctttccccacaagtaacttagacacagcacaaaccgatcaacagtaggcgtgacactccagtcatgtcgtgatcaagcacttctgttaccccggaccgagtatcaatagactgcttacgcggttgaaggagaaaacgcccgttacccggccaactacttcgagaaacccagtaacaccatggaaattgcggagtgtttcgctcagcacaaccccagtgtagatcaggtcgatgagccaccacattccccacgggtgaccgtggtggtggctgcgttggcggcctgcctatgggggaacccataggacgcttcaatacggacatggtgcgaagagtctattgagctagttggtaatcctccggcccctgaatgcggctaatcctaactgcggagcgcgtgcccccaaaccaggaggtggcgcgtcgtaatgggcaactccgcagcggaaccgactactttgggtgtccgtgtttccttttatatttttattggctgcttatggtgacaattgagaaattgttaccatatagctattggattggccatccggtgtctaacagagcgattatttatctttttgttggatttgtaccactcaacataacaaactatcagactttgtgttgcattattggattgaacacagcaaa

SEQ ID NO: 1040 - DNA, 743 bp, Enterovirus B
  source 1..743: mol_type = genomic DNA
tgtgctcttccgatctggttgttcccacccacagggcccactgggcgccagcacactggtattacggtacccttgtgcgcctgttttatccacccccccccactgtaacttagaagataaccacacgcggtcaataggtgactcagtacgccaactgggtcgcgaccaagcacttctgttaccccggaccgagtatcaataagctgctcgcgcggctgaaggagaaaacgttcgttacccggccaattacttcgagaaacctagtaccaccatggaggttgcgcagcgtttcgctccgcacaaccccagtgtagatcaggtcgatgagtcaccgcaatccccacaggcgactgtggcggtggctgcgttggcggcctgcccatggggaaacccatgggacgcttcaatatcgacatggtgcgaagagtctattgagctaattggtagtcctccggcccctgaatgcggctaatcctaactgtggagcagatacccacactccagtgggcagtctgtcgtaatgggcaactctgcagcggaaccgactactttgggtgtccgtgtttccttttattcctatgctggctgcttatggtgacaattgacagattgttaccatatagctactggattggccatccggtgacaagcagagcgattgtttacttatttgttggtttcattccactcaattataaagtactaaacacccttaatttcattataactcttaacacgttaaa

SEQ ID NO: 1041 - DNA, 743 bp, Enterovirus B
  source 1..743: mol_type = genomic DNA
ttaaaacagcctgtgggttgaacccatccacagggcccactgggcgcaagcacactggtatcacggtacctttgtgcgcctgttttatccacccttccccgaacgaaacttagaagtttgacttaaacggtcaatagaaagcccagtacaccaactgggtcgtgaccaagcacttctgtgaccccggactgagtatcaataagctactcacgtggctgaaggagaaaacgttcgttatccggccaattacttcgagaaacttagtaccaccatgaaggttgcgtagcgtttcgctccgcacaaccccagtgtagatcaggtcgatgagtcaccgcgttcctcacgggcgaccgtggcggtggctgcgttggcggcctgcccttggggcaacccaagggacgcttcaatactgacatggtgcgaagagtctattgagctaattggtagtcctccggcccctgaatgcggctaatcctaactgcggagcagatacccacatgccagtgggcagtctgtcgtaatgggcaactctgcagcggaaccgactactttgggtgtccgtgtttccttttattcttatactggctgcttatggtgacaattgagaaattgttaccatatagctattggattggccatccagtgtccaatagagcaatcatttaccttttcgttggatttattccacttgactacaaagcactcaaaacactcgaatacattgtagacctcaatacaacaaa

SEQ ID NO: 1042 - DNA, 743 bp, Enterovirus B
  source 1..743: mol_type = genomic DNA
ttaaaacaaggctgtgggttgtacccacccacagggcccaccgggcgctagcacactggtatctaggtacccttgtgcgcctgttttattcgccccaccccatcgtaacttagaagttgatcaataatggtcgttaggtagcccagcacgccagctgggtcttgaccaagcacttctgttaccccggaccgagtatcaatacgctgctcacgcggctgaaggagaaaacgttcgttacccggccaattacttcgagaagcctagtaccaccatgaaggttgcgcagcgtttcgctccgcacaaccccagtgtagatcaggccgatgagtcaccgcactcctcacgggcgaccgtggcggtgactgcgttggcggcctgcccatggggtgacccatgggacgcttcaatactgacatggtgcgaagagcctattgagctaattggtagtcctccggcccctgaatgcggctaatcctaactgcggagcagatacccacacaccagtgggcagtctgtcgtaacgggcaactctgcagcggaaccgactactttgggtgtccgtgtttccttttattctaatattggctgcttatggtgacaattgaaaaattgttaccatatagctattggattggccatccggtgacaaatagagcgattgtttacctgtttgttggtttcataccattaaatcttaaagtcttaaaaacccttgattttatactagcactcaattcagcaaa

SEQ ID NO: 1043 - DNA, 743 bp, unidentified
  source 1..743: mol_type = unassigned DNA; note = Human enterovirus 87 strain BAN01-10396, complete genome.1 sequence
ttaaaacagcctgtgggttgttcccacccacagggcccactgggcgctagcacactggtatcacggtacccttgtgcgcctgttttatacacccttcccctactgtgacttagaagcaaaacaatgatgaccaatagcaagcgcagcactccagctgtgtttcggtcaagcacttctgtttccccggactgagtatcaataggccactcacgtggccgaaggagaaaacgtccgttacccggccaattacttcgagaaacccagtaacaccatagaggttgcgcagcgtttcgctccgcactcccccagtgtagatcaggtcgatgagtcaccgcgttccccacgggcgaccgtggcggtggctgcgttggcggcctgcccatggggtaacccatgggacgcttcaatactgacatggtgcgaagagtctattgagctaattggtagtcctccggcccctgaatgcggctaatcctaactgcggagcagatacccacgctccagtgggcagtctgtcgtaacgggtaactctgcagcggaaccgactactttgggtgtccgtgtttccttttattcttatattggctgcttatggtgacaattgaaagattgttaccatatagctattggattggccatccggtgtctaatagagcaattatattcctgtttgttggttttataccactgaatatcacagtttacaagaccctcaattacatcctacgtttaaacaagacaaa

SEQ ID NO: 1044 - DNA, 743 bp, Enterovirus B
  source 1..743: mol_type = genomic DNA
ttaaaacaggcctgtgggttggttccacccacagggcccactgggcgccagcacactggtattacggtacctttgtgcgcctgttttatccacccttccctgatgtaacttagaagtaaaacataggcggtcaataggtagcccaacacaccagttgggtttcgaccaaacacttctgttaccccggaccgagtatcaataggctgctcacgcggctgaaggagaaaacgttcgttacccgaccaattacttcgagaaacccagtaacaccatgaaagttgcgcagtgtttcgctccgcacaaccccagtgtagatcaggtcgatgagtcaccgcattccccacgggcgaccgtggcggtggctgcgttggcggcctgcccatgggctaacccatgggacgctacaataccgacatggtgcgaagagtctattgagctaattggtagtcctccggcccctgaatgcggctaatcctaactgcggagcagatacccacacaccagtgggcggtctgtcgtaacgggcaactctgcagcggaaccgactactttgggtgtccgtgtttccttttattcctatattggctgcttatggtgacaattgagagattgttaccatatagctattggattggccatccggtgacaaacagggcggtcatttacctatttgttggttttgtaccattgaattttaaggtattgaaaaccctcaaccttgttttagcactcaatacagcaaa

SEQ ID NO: 1045 - DNA, 743 bp, Enterovirus B
  source 1..743: mol_type = genomic DNA
ttaaaacagcctgtgggttgttcccacccacagggcccattgggcgctagcactctggtattgcggtacctttgtgcgcctgttttatattccctccccctgaccgtaacttagaagtaacacacaccgatcaacagtaagcatggcacaccagccatgttttgatcaagcacttctgttatcccggactgagtatcaatagactgctcacgcggttgaaggagaaaacgttcgttacccggccaactacttcgaaaaacctagtaacaccatggaagttgcagagtgtttcgctcagcactaccccagtgtagatcaggtcgatgagtcaccgcattccccacgggcgaccgtggcggtggctgcgttggcggcctgcctatggggaaacccataggacgctctaatacagacatggtgcgaagagtctattgagctagttggtagtcctccggcccctgaatgcggctaatcctaactgcggagcacacaccctcaagccagggggcagtgtgtcgtaacgggcaactctgcagcggaaccgactactttgggtgtccgtgtttccccttactcttgtattggctgcttatggtgacaattttggaattgttgccatatagctattggattggccatccggtgacaaacagagcgattgtatacctattcgttggacttgtaccgctcaacgttacgagtctaacgactttatactacatcatctggttgaacacagcaaa

SEQ ID NO: 1046 - DNA, 743 bp, Enterovirus B
  source 1..743: mol_type = genomic DNA
ttataacagcctgtgggttgtacccacccacagggcccacagggggccagcacactggtatctcggtacctttgtgggcctgttttatccacccttcccccattttatttagaagcatgcaccaaaacggtcaacagggagcccagtaagccacttgttcattgaccaagtacttctgttaccccggaccgagtatcaataggctgctcgcgcggctgaaggagaaaacgttcgttacccggccaattacttcgagaaacccagtagcgccatggaggttgcgcagcgtttcgctccgcacaaccccagtgtagatcaggtcgatgagccaccgcgttccccacgggcgaccgtggcggtggctgcgttggcggcctgcccatgggactacccatgggacgcttcaatactgacatggtgtgaaaagtctattgagctaattggtagtcctccggcccctgaatgcggctaatcctaactgcggagcagacgcccacacaccagtgggcgatctgtcgtaatgggcaactctgcagcggaaccgactactttgggtgtccgtgtttccttttattcttaccctggctgcttatggtgacaattgagaagttgttgccatatagctattggattggccatccggtgacgagcagggcgataatttatttgtttatcgggtttgtaccactgaactacaaggttttaaacactttggattttattctgatcctcaactcactaaa

SEQ ID NO: 1047 - DNA, 743 bp, Enterovirus B
  source 1..743: mol_type = genomic DNA
ccagtgggccctgtgggttgtacccacccacagggcccactgggcgctagcactctggtatcacggtaccttagtgcgcctgttttatatcccccacccccacttgaaacttagaagcaaaacatactgaccaatagttgacatggcaagccagccgtgccttggtcaagcacctctgtttccccggaccgagtatcaatagactgctagcgcggttgaaggagaaagcgttcgttacccgactaactacttcgaaaaacctagtagcatcatgaaagttgcagagtgtttcgctcagcacaaccccagtgtagatcaggccgatgagtcaccgcattcctcacgggtgaccgtggcggtggctgcgctggcggcctgcctgtggggcaacccacaggacgctctaatacagacatggtgcgaagagtctattgagctagttagtagtcctccggcccctgaatgcggctaatcctaactgcggagcacgtgcctctaatccaagaggtagcgtgtcgtaacgggcaactctgcagcggaaccgactactttgggtgtccgtgtttccttttatttttatactggctgcttatggtgacaattgagagattgttaccatatagctattggattggccatccggtgactaatagagctattgtatacctctttattggttacgttccattaaaccgcaaggaattaaggaccctcaattacatcttgcttttgaattcagcaaa

SEQ ID NO: 1048 - DNA, 743 bp, Enterovirus B
  source 1..743: mol_type = genomic DNA
ttaaaacagcttgtgggttgttcccacccacagggcccactgggcgccagtacactggtatcacggtacctttgtgcgcctgtttgactcaccttccccaaacgcaacttagaagcataacttaaatggtcattaggcggctcagtatgccaactgagtctcgatcaagcacttctgttaccccggactgagtaccaataggctgctcacgcggctgaaagggaaaccgttcgttacccgaccaactacttcgagaaacctagtaccaccatgaaagttgcgcggcgtttcgctccgcacaaccccagtgtagatcaggccgatgagtcaccgcaaaccccacgggcgaccgtggcggtggctgcgctggcggcctgcccatgggacaacccatgggacgccacaatactgacatgatgcgaagagtctattgagctagttggtagtcctccggcccctgaatgcggctaatcccaactgtggagcagatacccacgcaccagtgggcagtctgtcgtaatgggcaactctacagcggaaccgactactttgggtgtccgtgtttctttttattcctacgctggctacttatggtgacaattgagagactgtaaccatattgctatcgggttggccacctggtgaagaataaaacagttgctcactcgtttgtcagtcttgcaccgtcgtgccacaaagtcttaactgcccctcaacatcgtcataatactaaatacgctgaa

SEQ ID NO: 1049 - DNA, 743 bp, Enterovirus B
  source 1..743: mol_type = genomic DNA
ttaaaacagcctgtgggttgtacccacccacagggcccactgggcgctagcactctggtaccgcggtacctttgtgcgcctgttttatatcccccctccccttaaccggaacttagaagttacacacactgatcaacagtgggcatagcatgccagctatgtcttgatcaagcacttctgtctccccggaccaagtatcaatagactgctcacgcggttgaaggagaaagcgttcgttacccgactaactacttcgagaaacccagtagcactatgaaagttgcgaggcgtttcgctcaacacttccccagtgtagatcaggtcgatgagtcaccgcattccccacggcgaccgtggcggtggctgcgttggcggcctgctacggggcaactcgtaggacgcttcaatacagacatggtgcgaagagtctattgagctagttagtagtcctccggcccctgaatgcggctaatcctaactgcggagcacataccctcaacccagggggcagtgtgtcgtaacgggtaactctgcagcggaaccgactactttgggtgtccgtgtttccttttatccttacattggctgcttatggtgacaattgaaagattgttaccatatagctattggattggccatccagtgtctaatagagctattatatacctctttgttggatttataccacttagcctaaaagaagttaagacactacagcttattgtacaattaaacacagcaaa

SEQ ID NO: 1050 - DNA, 743 bp, unidentified
  source 1..743: mol_type = unassigned DNA; note = Coxsackievirus B5 isolate 3936/09, complete genome.1 sequence
ttaaaacagcctgtgggttgtacccacccacagggcccactgggcgctagcactctggtatcacggtacctttgtgcgcctgttttatgcccccttcccccaattgaaacttagaagttacacacaccgatcaacagcgggcgtggcataccagccgcgtcttgatcaagcactcctgtttccccggaccgagtatcaatagactgctcacgcggttgaaggagaaaacgttcgttacccggctaactacttcgagaaacctagtagcatcatgaaagttgcgaagcgtttcgctcagcacatccccagtgtagatcaggtcgatgagtcaccgcattccccacgggcgaccgtggcggtggctgcgttggcggcctgcctacggggcaacccgtaggacgcttcaatacagacatggtgcgaagagtcgattgagctagttagtagtcctccggcccctgaatccggctaatcctaactgcggagcacataccctcaacccagggggcattgtgtcgtaacgggtaactctgcagcggaaccgactactttgggtgtccgtgtttccttttattcttataatggctgcttatggtgacaattgaaagattgttaccatatagctattggattggccatccggtgtctaacagagctattatatacctctttgttggatttgtaccacttgatctaaaggaagtcaagacactacaattcatcatacaattgaacacagcaaa

SEQ ID NO: 1051 - DNA, 743 bp, Enterovirus B
  source 1..743: mol_type = genomic DNA
ttaaaacagcctgtgggttgttcccacccacagggcccactgggcgctagcacactggtatcacggtacctttgtgcgcctgtttgacttaccctccccaaacgcaacttagaagcacaacttaaatggtcaatagacggctcagtatgccaactgagtctcgatcaagcacttctgttaccccggactgagtaccaataggctgctcacgcggctgaaggggaaaccgttcgttacccgactaactacttcgagaaacctagtaccaccatgaaagttgcgcagcgtttcgctccgcacaaccccagtgtagatcaggccgatgagtcaccgcaaaccccacgggcgaccgtggcggtggctgcgctggcggcctgcccatggggcaactcatgggatgcttcaatactgacatggtgcgaagagtctattgagctagttggtagtcctccggcccctgaatgcggctaatcctaactgcggagcagatacccacgcaccagtgggcagtctgtcgtaatgggcaactctgcagcggaaccgactactttgggtgtccgtgtttccttttatccttatactggctacttatggtgacaattgagagattgtaaccatattgctattggattggccacccggcgacgaatagaacagttgcttacctgtttgttagtctcgtgtcactgaactgcaaggccttaaacaccctttaatttcatcataacgctcaatacgttaaa

SEQ ID NO: 1052 - DNA, 743 bp, Enterovirus B
  source 1..743: mol_type = genomic DNA
ttaaaacagcctgtgggttgatcccacccgcagggcccactgggcgtaagcacactggtattacggtacctttgtgcgcctgttttatacacccctcccccgatgtaacttagaagttcaatgcaagcggtcgatagccagcccaacacaccagttgggttcagatcaagcacttctgttaccccggactgagtatcaataagctgctcacgtggctgaaagagaaaacgttcgttacccggccagttacttcgggaagcctagtaccaccatgaaagttgcgcagtgtttcgttccgcacaaccccagtgtagatcaggtcgatgagtcaccgcattccccacaggcgactgtggcggtggctgcgttggcggcctgcccatggggttacccatgggacgctacaatactgacatggtgcgaagagcctactgagctaactggtattcctccggcccctgaatgcggctaatcctaactgcggagcaagtacctgcagaccagcaggcagcttgtcgtaacgggcaactctgcagcggaaccgactactttgggtgtccgtgtttccttttattcttgttatggctgcttatggtgacaatcacagaattgttaccatatagctattggattggccatccagtgactaacagagcaattatatacttgtttgtcggatttgtcaaattagattttaacaacctacgcacgctttgttatattattgaattaaatacagcaag

SEQ ID NO: 1053 - DNA, 743 bp, Enterovirus B
  source 1..743: mol_type = genomic DNA
tttaaaacagcctgtgggttgttcccacccacagggcccaatgggcgctagcacactggtatcatggtacctttgtgcgcctgttttattcaccccatcacaataaaatggagaagcataacgtaataggtcaataggtggctcagtgcgccacttgggtttagaacaaacaattctgttttcccgcaccgagtatcaataaggtgctagcgtggatgaaggagaaaacgttagttacccgagtaattagttcgagaaagacagtaccaccatgaaggatgcgcagtgtttcgttcagcactaccccagtgtagatcaggtcgatgagtcaccgcgatccccacgggtgtccgtggcggtcctgtgttggcggcaaaaccatggggtaacccatagaacgataaaattaagacatggtgagaagagtttattgagctagttggtaatcatccggcccgggaatgcggctaatcttacatgcgcagcgggcacccacaaaccagtggaaacgtttgtcgtaacgggcaactctgcagcggaaccgactactgtggggggccgggttgccttgtattcatatattggctgcttatggggacgattgaaagattgttgccatatagctattggattggccatccggaaacaaacagagctattatttacctttttgttggctttgtgccgttgaatttcaaagttgtaaaaactataaacttcattttgacactcaatacagcaaa

SEQ ID NO: 1054 - DNA, 743 bp, Enterovirus B
  source 1..743: mol_type = genomic DNA
ttaaaacagcctgtgggttgtacccacccacagggcccactgggcgctagcactctggtattgcggtacctttgtgcgcctgttttacccaccctcccccaacgtaacttagaagcctgacatatacggtcacaagccagcccagtacgccaactgggtaccgaccaagcacttctgttaccccggactgagtatcaataagctgccaaagcggctgaaggagaaaacgttcgttacccggccaattacttcgagaaacccagtaacaccatgaaagttgcgtagcgtttcattcagcacaatcccagtgtagatcaggtcgatgagtcaccgcattccccacaggcgactgtggcggtggctgcgttggcggcctgcccatggggcaaacccatgggacgcttcaatactgacatggtgcgaagagtctattgagctaattggtagtcctccggcccctgaatgcggctaatcctaactgcggagcaggcactcgcagaccagcgagcagcttgtcgtaatgggcaactccgcagcggaaccgactactttgggtgtccgtgtttcctatttcctttacactggctgcttatggtgacaattgagaaattgttaccatatagctattggagtggccatccggtgactaacagagcaataatatatttgtttgttggctttgtgccacttaatttgaaggttgttaagacgctcaatctgatactacttctaaataaagcaaa

SEQ ID NO: 1055 - DNA, 743 bp, Enterovirus B
  source 1..743: mol_type = genomic DNA
ttaaaacagcctgtgggttgttcccacccacagggcccactgggcgttagcacactggtatcacggtacctttgtgcgcctgttttatactcccccccctaaggaaactttagaagcaaagcaattgtgatcaatagtgggtatggcacaccagtcatatcttgatcaagcacttctgttcccccggacttagtaccaatagactgctcaagcggttgaaggggaaaacgttcgttatccggccaactacttcgagaaacctagtagcaccatgaaagttgcggagtgtttcgctcagcacttcccccgtgtagatcaggctgatgagtcaccgtattccccacgggcgaccgtgacggtggctgcgttggcggcctgcccatggggtaacccatgggacgctctaaaacagacacggtgcgaagagtctattgagctagttggtagtcctccggcccctgaatgcggccaatcctaactgcggagcacatactcccaatccagggagcagtgtgtcgtaatgggtaactctgcagcggaaccgactactttgggtgtccgtgtttccttttattctcacattgactgcttatggtgacaattgaaagattgttaccatatagctattggattggtcatccggtgagcaatagagctattgtttatcaatttgttggatttgtaccactcaacttttctgttttgagaacactcaactacatcttactgctaaacacatcaaa

SEQ ID NO: 1056 - DNA, 743 bp, Enterovirus B
  source 1..743: mol_type = genomic DNA
ttaaaacagcctgtgggttgttcccacccacagggcccacgtggcgttagcacactggtatcccggtacctttgtgcgcctgttttatacaccccaaaccccaatgtaaattagaagaaaataacaccgatcaatagtgggtgtggcacaacagccacatcatgatcaagcactactgttcccccggactgagtatcaataagctgctcgcgcggctgaaggagaaaacgttcgttatccggccaattacttcgagaaacctagtaccaccatgaaggttgcgcagtgtttcgctccacacaaccccagtgtagatcaggtcgatgagtcaccgcattccccacaggcgactgtggcggtggctgcgctggcggcctgcccatggggtgacccatgggacgcttcaatactgacatggtgtgaagagtctattgagctaattggtagtcctccggcccctgaatgcggctaatcctaactgcggagcagatacccacgcaccagtgggtagtctgtcgtaacgggtaactctgcagtggaaccgactactttgggtgtccgtgtttccttttattctcacattggctgcttatggtgacaattgaaagattgttaccatatagctactggattggccatccggtgacaaacagagcaattgtgttcctcttcgatgggttcatacctctcaacaagatcagctttcgaactttgtgctacatcatcaagctaaacacaacaaa

SEQ ID NO: 1057 - DNA, 743 bp, Enterovirus B
  source 1..743: mol_type = genomic DNA
ttaaaacagcctgtgggttgttcccacccacagggcccattgggcgctagcacactggtatcacggtacccttgtgcgcctgttttatccaccccccccttaacgtaacttagaagcataaatcaaatggtcaatagataacccagtatgccaactgggtcccgaccaagtacttctgttaccccggactgagtatcaataagctgcttacgtggctgaaggagaaaacgttcgttacccgaccaattacttcgagaaacctagtaacaccatgaaggttgcgcagtgtttcgctcaacacaaccccagtgtagatcaggtcgatgagtcaccgcgttccccacaggcgaccgtggcggtggctgcgttggcggcctgctcatggggcaacccatgagacgcttcaatactgacatggtgcgaagagtctattgagctaactggtagtcctccggcccctgaatgcggctaatcctaactgcggagcaggcgctcgcaaaccagtgagtagcctgtcgtaacgggtaactctgcagcggaaccgactactttgggtgtccgtgtttccttttattcttatattggctgcttatggtgacaattgagagattgttaccatatagctattggattggccatccggtgtctaacagagcaatcatttacctctttgttggttacgtaccattaaatcttaaggtcgtagcaacgcttaagtttatcctacttctcaacaaagcaaa

SEQ ID NO: 1058 - DNA, 743 bp, Enterovirus B
  source 1..743: mol_type = genomic DNA
ttaaaacagcctgtgggttgatcccacccacagggcccattgggcgctagcactctggtatcacggtacctttgtgcgcctgttttatatccctttcccttaattggaacttagaagttacacacaccgatcaacagcaggcgtggcatgccagctacgtcttgatcaagcacttctgtttccccggaccgagtatcaatagactgctcacgcggttgaaggagaaagtgttcgttacccggctaactacttcgagaaacccagtagcatcatgaaagttgcgaggtgtttcgctcagcacttccccagtgtagatcaggtcgatgagtcaccgcattccccacgggcgaccgtggcggtggctgcgttggcggcctgcctacggggcaacccgtaggacgcttcaatacagacatggtgcgaagagtcaattgagctagttagtattcctccggcccctgaatgcggctaatcctaactgcggagcacataccctcaatccagggggcattgtgtcgtaacgggtaactctgcagcggaaccgactactttgggtgtccgtgtttccttttgttcttatactggctgcttatggtgacaattgaaagattgttgccatatagctattggattggccatccattgtctaatagagctgttatatacctctttgttggttttgtaccgctcaatctaaaagaagttaagacactacaacttattatacagctgaacacagcaaa

SEQ ID NO: 1059 - DNA, 744 bp, Aichivirus A
  source 1..744: mol_type = genomic DNA
tttgaaaagggggtgggggggcctcggccccctcaccctcttttccggtggtctggtcccggaccaccgttactccattcagcttcttcggaacctgttcggaggaattaaacgggcacccatactccccccaccccccttttgtaactaagtatgtgtgctcgtgatcttgactcccacggaacggaccgatccgttggtgaacaaacagctaggtccacatcctcccttcccctgggagggcccccgccctcccacatcctccccccagcctgacgtatcacaggctgtgtgaagcccccgcgaaagctgctcacgtggcaattgtgggtccccccttcatcaagacaccaggtctttcctccttaaggctagccccggcgtgtgaattcacgttgggcaactagtggtgtcactgtgcgctcccaatctcggccgcggagtgctgttccccaagccaaacccctggcccttcactatgtgcctggcaagcatatctgagaaggtgttccgctgtggctgccaacctggtgacaggtgccccagtgtgcgtaaccttcttccgtctccggacggtagtgattggttaagatttggtgtaaggttcatgtgccaacgccctgtgcgggatgaaacctctactgccctaggaatgccaggcaggtaccccacctccgggtgggatctgagcctgggctaattgtctacgggtagtttcatttccaatccttttatgtcggagtc

SEQ ID NO: 1060 - DNA, 744 bp, Enterovirus A
  source 1..744: mol_type = genomic DNA
ttaaaacagcctgtgggttgtacccactcacagggcccactgggcgtcagcactctggtactgaggtacctttgtgcgcctgttttaactcccttcccctgaagtaacttagaagcaataaactaacgatcaacagtgggcatgacataccagtcatgtctcgatcaagcacttctgtttccccggactgagtatcaataggctgctcgcgcggctgaaagagaaaacgttcgttacccggccagctacttcgagaagcttagtaccatcatgaacgaagcagagcgtttcgctcagcacaatcccagtgtagatcaggctgatgagtcactgcgacccccatgggcgaccatggcagtggctgcgttggcggcctgcccatggagaaatccatgggacgctctaattctgacatggtgcgaagagcctattgagctagctggtagtcctccggcccctgaatgcggctaatcctaactgcggagcacgcacccacaaaccagtgggcagtgtgtcgtaacgggtaactctgcagcggaaccgactactttgggtgtccgtgtttccttttattcttatattggctgcttatggtgacaatcaaagagttgttaccatatagctattggattggccatccggtgtgcaacagagcaattgtttacctatttattgggtttgtaccactaacgttgaagtctgtgaccacactcaactttatcctgaacctcaatacagtaaaac

SEQ ID NO: 1061 - DNA, 744 bp, Enterovirus A
  source 1..744: mol_type = genomic DNA
ttaaaacagcctgtgggttgcacccacccacagggcccactgggcgccagcactctggtacttaggtacctttgtgcgcctgttttatctcccttcccccgaagtaacttagaagctgtgagctaacgatcaacagtaggtgtgacataccagtcatatcttgatcaagcacttctgtttccccggactgagtatcaataggctgctcgcgcggctgaaagagaaaacgttcgtcacccggccaactacttcgagaagcttagtaccaccatgaacgaggcagagtgtttcgctcggcacaaccccagtgtagatcaggctgatgagtcactgcaatccccatgggcgaccatggcagtggctgcgttggcggcctgcccatggagaaatccatgggacgctctaattctgacatggtgcgaagagcctattgagctagctggtagtcctccggcccctgaatgcggctaatcctaactgcggagcacacacccacaagccagtgggcagtgtgtcgtaacgggcaactctgcagcggaaccgactactttgggtgtccgtgtttccttttattcttgtattggctgcttatggtgacaatcaaagagttgttaccatatagctattggattggccatccggtgtgcaacagagcaattatttacctatttattggttttgtaccattgacactgaagtctgtgattacccttaattttattttgaccctcaacacagtcaaac

SEQ ID NO: 1062 - DNA, 744 bp, Enterovirus A
  source 1..744: mol_type = genomic DNA
ttaaaacagcctgtgggttgcacccactcacagggcccactgggcgctagcactctggtaccgtggtacctttgtgcgcctgttttatacccccttccccgtttgaacattagaagtaacgcacctcgatcagtagcaggcgcggcgcaccagccgtgtcttgatcaagcacttctgtttccccggaccgagtatcaatagactgctcacgcggttgaaggagaaaacgttcgttatccggctaactacttcgagaaacttagtagcaccatggaagttgcagagtgtttcgctcagcactccccccccagtgtagatcaggctgatggatcaccgcgttcctcacgggtgaccgtggcggtggtcgcgttggcggcctgcccatggggcaacccatgggacgctctaatatggacatggtgtgaagagtctattgagctagttagtagtcctccggcccctgaatgcggctaatcctaactgcggagcacgtgtccccaacccaggggatagcgtgtcgtaacgggtaactctgcagcggaaccgactactttgggtgtccgtgtttcctttattcttatcctggctgcttatggtgacaattgagagattgttaccatatagctattggattggccatccggtgtctaacagagctataatatatctttttgttgggttcgtacccctcaattttgaggttgttctcacattaaagtacatcttggtgttaaatatcagaag

SEQ ID NO: 1063 - DNA, 744 bp, Enterovirus A
  source 1..744: mol_type = genomic DNA
ttaaaacagcctgtgggttgtccccacccacagggcccactgggcgctagcacactgattttgcgggatctttgtgcgcctgttttataacccctccctaaacggcaatttagaagttctgcacatccacgaccagtagtaagcgtgacgcgccagtcacgtcttggtcaagtacttctgtatccccggactgagtatcaatagactgctcacgcggttgaaggagaaaacgttcgttatccggctaactacttcgagaaacctagtaacaccgtgaaagttgcggagtgtttcgctcagcacttcccccgtgtagatcaggccgatgagtcactgtaaaccccacgggcgaccgtgacagtggctgcgttggcggcctgcccatgaggcaactcatgggacgctctaatacagacatggtgtgaagagtctattgagctagttagtagtcctccggcccctgaatgcggctaatcctaactgcggagcacgcaccctcaacccagggggcggcgtgtcgtaatgggtaactctgcagcggaaccgactactttgggtgtccgtgtttccttttattccttattggctgcttatggtgacaattgaaaagttgttaccatatagctattggattggccatccggtatctaatagagctattgtttacctgttcattggatacgtccctcttagtcttaaggtcattcaaactcttgattacatattactccttaaccacaagaa

SEQ ID NO: 1064 - DNA, 744 bp, Enterovirus A
  source 1..744: mol_type = genomic DNA
ttaaaacaggctgtgggttgtacccactcacagggcctactgggcgctagcactctggcactaaggtacctttgtgcgcctgtttttacttccctttcccaaagaaacttagaagttgtgtaccaatgatcaatagcaggtgtgacgtacaaataacatcttgatcaatcacttctgtttccccggaccgagtatcaataggctgctcgcgcggctgaaggagaaaacgttcgttacccgaccagctatttcgagaagcttagtaccaccatgaacgaggcagagtgtttcgttcagcacaaccccagtgtagatcaggctgatgagtcactgcaacccccatgggcgaccatggcagtggctgcgttggcggcctgcccatggagaaatccatgggacgctctaattctgacatggtgtgaagagcctattgagctagctggtagtcctccggcccctgaatgcggctaatcctaactgcggagcacatgctcacgagccagtgggtggtgtgtcgtaatgggcaactctgcagcggaaccgactactttgggtgtccgtgtttccttttattcttatgttggctgcttatggtgacaatcaaagaattgttaccatatagctattggattggccatccggtgtgcaacagagcaattgtttatctatttattggtttcgtaccactatcactgaagtctgtgaccactctcgaattcattttgaccctcaactcaatcaaac

SEQ ID NO: 1065 - DNA, 744 bp, Enterovirus C
  source 1..744: mol_type = genomic DNA
ttaaaacagctctggggttgttcccaccccagaggcccacgtggcggccagtacaccggtatcacggtacccttgtacgcctgttttatactccctaccccgtaacttagaagcatcaactcaagttcaatagtaggggtacaatccagtaccaccacgaacaagcacttctgtttccccggtgatattgtatagactgtgcccacggttgaagacaatagatccgttatccgcttttatacttcgagaagcccagtaccaccttggaatcttcgatgcgttgcgatcagcactcgaacccggagtgtagcttaggtcgatgagtctggacgctcctcaccggcgacggtggtccagactgcgttggcggcctacctgtggcccaaagtcacaggacgctagttgtgaacaaggtgtgaagagcctattgagctataaaagagtcctccggcccctgaatgcggctaatcccaaccacggagcaggtgatcacaaaccagtgactagcctgtcgtaacgcgcaagtctgtggcggaaccgactactttgggtgtccgtgtttccttttatttcatttatggctgcttatggtgacaatcatagattgttatcataaagcgaattggattggccatccggtgaaaatcaagcacatcatttatctgtttgttggatttacacctttagtttcttactccccgcgccttattcatattgtgttgttgattagacagtggtattacc

SEQ ID NO: 1066 - DNA, 744 bp, Enterovirus C
  source 1..744: mol_type = genomic DNA
ttaaaacagctctggggttgttcccaccccagaggcccacgtggcggccagtacaccggtatcacggtacccttgtacgcctgttttatactccccgcccgtaacttagaagcaataactcaagttcaacagcagggggtacaaaccagtacctccacgaacaagcacttctgtttccccggtgacattgtatagactgtacccacggttgaaaacaatagatccgttatccgcttttgtacttcgagaagcccagtaccgtcttggaatcttcgatgcgttgcgctcagcactcgaacccggagtgtagcttaggtcgatgagtctggacagtcctcaccggcgacggtggtccaggctgcgttggcggcctacctgtggcccaaagccacaggacgctagttgtgaacaaggtgcgaagagcctattgagctacagaagagtcctccggcccctgaatgcggctaatcccaaccatggagcaggtgatcacgaaccagtgattagcctgtcgtaatgcgcaagtctgtggcggaaccgactactttgggtgtccgtgtttccttttatttcatttatggctgcttatggtgacaatcatagattgttgtcataaagcgaattggattggccatccggtgaaagtcaaacacattgtttatttgtttgttggcttcacgcctttaacttatcacaccttaaacctcattcacattaccttgttgatcagacagtggtatcacc

SEQ ID NO: 1067 - DNA, 744 bp, Enterovirus C
  source 1..744: mol_type = genomic DNA
ttaaaacagctctggggttgttcccaccccagaggcccacgtggcggccagtactccggtattgcggtacccttgtacgcctgttttacactcccttccccgtaacttagacgcaataaaccaagttcactaggaggggtgcaaaccagcaccaccacgaacaagcacttctgtttccccggtgacattgtatagactgtatccacggttgaaaacgattgatccgttatccgctcttgtacttcgagaagcctagtatcatcttggaatcttcgacgcgttgcgctcagcattcaaccccagaatgtagcttaggtcgatgagtctggacattcctcaccggtgacggtggtccaggctgcgttggcggcctacctgtgacccaaagtcacaggacgctagttgtgaacaaggtgtgaagagcctattgagctacaagagagtcctccggcccctgaatgcggctaatcctaaccacggagcaagtgctcacgaaccagtgagtggcttgtcgtaacgagcaattctgtggcggaaccgactactttgggtgtccgtgtttcctttttaactttaaatggctgcttatggtgacaatcattgattgttatcataagccgaattggattggccatccggtgaaaatcaagttgatcatttatttgtttgttggattcactccattaactcatttttcaattgacctaatacgtattgtattattagttagaaacatacatcaca

SEQ ID NO: 1068 - DNA, 744 bp, Enterovirus C
  source 1..744: mol_type = genomic DNA
ttaaaacagctctggggttgttcccaccccagaggcccacgcggcggccagtacaccggtatcacggtacccttgtacgcctgttttatactcccttccccgtaacttagaagccacaaaccaagttcgataggagggggtacaaaccagtaccaccgtgaacaagcacttctgtttccccggtgatgtcacatagactgtccccacggttgaaagtgattgatccgttacccgccttggtacttcgagaaacctagtatcatcttggaatcaatgacgcgttgcgctcagcactcaaacccggagtgtagcttaggctgatgagtctggacgtccctcactggcgacagtggtccaggctgcgctggcggcctacctgtggtggaagccacaggacgctaattgtgaacaaggtgtgaagagtctattgagctaccatggagtcctccggcccctgaatgcggctaatcccaaccacggagcaagtattcacaaaccagtgaaatgcttgtcgtaacgcgaaagtctgtggcggaaccgactactttgggtgtccgtgtttccttttattctttatatggctgcttatggtgacaatcatagattgttatcataaagcgcattggattggccatccggtgaaaatcaagcaaatcatttacttatttgttggatttactccaatcacaccatttacattgcatttaattactcttgtgttgacaatcagaagatactaccaca

SEQ ID NO: 1069 - DNA, 744 bp, Enterovirus C
  source 1..744: mol_type = genomic DNA
ttaaaacagcctgtgggttgttcccaccccagaggcccacgtggcggctagtactctggtatcacggtacctttgtacgcctgttttataccccttccccaagtaaccttagaagcaactcaacaagttcaatagagggggtacaaaccagtaccaccacgaacaagcacttctgtttccccggtgattttgcataggctgtacccacggccaaaagtgaatgatccgttatccgcttgagtacttcgagaagcttagtaccaccttggaatcttcgatgcgttgcgctcagcactctaccccgagtgtagcttaggctgatgagtctgggcattccccaccggcgacggtggcccaggctgcgttggcggcctacccatggctaacgccatgggacgctagttgtgaacaaggtgtgaagagcctattgagctactcaagagtcctccggcccctgaatgcggctaatcctaaccatggagcaagtgccctcaacccagagggtggcttgtcgtaacgcgcaagtccgtggcggaaccgactactttgggtgtccgtgtttccttttatcttatatatggctgcttatggtgacaatcatagattgttatcataaagcgaattggattggccatccggtgaagtataaacatattatttacctgtttgtcggattcaccccgctcactttatacacacccaatatagtatctattgtactgctactgaggcactaccaccgca

SEQ ID NO: 1070 - DNA, 744 bp, unidentified
  source 1..744: mol_type = unassigned DNA; note = Human enterovirus 88 strain BAN01-10398, complete genome.1 sequence
ttaaaacagcctgtgggttgatcccacccacagggcccactgggcgctagcacactggtattccggtacttttgtgcgcctgttttatacacccttccccttcatgtaacttagaagtaaaacacaaacggtcaataggtagctcagcaaaccagctgagcctcggccaagcacttctgttaccccggactgagtatcaataagctgttaacacggctgaaggagaaaacgttcgttatccggccaattacttcgagaaacctagtaacaccatgaaggttgcgtagcgtttcgctccacacaaccccagtgtagatcaggtcgatgagtcaccgctctccccacgggtgaccgtggcggtggctgcgttggcggcctgcccatggagcactccatgggacgcttcaatactgacatggtgtgaagagtctattgagctaattggtagtcctccggcccctgaatgcggctaatcctaactgcggagcagacacccacacgccagtgggcagtctgtcgtaatgggcaactctgcagcggaaccgactactttgggtgtccgtgtttccttttattcttacattggctgcttatggtgacaatcaaggaattgttaccatatagctattggattggccatccggtatctaacagagcaattgtttacctcttcaccggttttgtaccattgaattgcaatagtctcaacaccctttgctatatcattaaattgaactcagcaaa

SEQ ID NO: 1071 - DNA, 744 bp, Enterovirus B
  source 1..744: mol_type = genomic DNA
ttaaaacagcctgtgggttgctcccacccacagggcccactgggcgctagcacactggtatcccggtacctttgtgcgcctgttttatccaccccacccccagctgtaatttagaagttcgacacacatggtcaatagatggctcagtgcaccaactgggtttagaccaagcacttctgttaccccgggccgagtatcaataagctgctcgcgcggctgaaggagaaaacgctcgttatccggccaattacttcgagaaacctagtaccaccatggaggttgcgcagcgtttcgctccgcacagccccagtgtagatcaggccgatgagtcaccgcgttcctcacgggcgaccgtggcggtggctgcgttggcggcctgcccatggggcaacccatgggacgcttcaatactaacatggtgtgaagagtctattgagctaattggtagtcctccggcccctgaatgcggctaatcctaactgcggagcagatactcacatgccagtgggcagtctgtcgtaacgggcaactctgcagcggaaccgactactttgggtgtccgtgtttccttttattcttatactggctgcttatggtgacaattgagaaattgttaccatatagctattggattggccatccagtgacaaacagagcgattgtttacctatttgtcggtttcataccgttgaactttagagttttgaagaccctcaacttgattatattattcaactctgtaaa

SEQ ID NO: 1072 - DNA, 744 bp, Enterovirus B
  source 1..744: mol_type = genomic DNA
taaaacagcctgtgggttgttcccacccacagggcccactgggcgccagcactctggtattatggtaccttagtgcgcctgttttatacaccccttccccaaatgtaatttagatgcatgtaaacaaaggccaatagcaggcgcagcataccagctgtgtctcggtcaagcacttctgttaccccggactgagtatcaataggctactcacgtggctgaaggagaaaacgttcgttatccggccaattacttcgagaaacctagtaataccatgaaggttgcgaagtgtttcgctcagcacaaccccagtgtagatcaggtcgatgagtcaccgcattccccacgggtgaccgtggcggtggctgcgctggcggcctgcccatgggattacccatgggacgcttcaatattgacatggtgtgaagagtctattgagctaattggtattcctccggcccctgaatgcggctaatcccaactgcggagcaggtacccacatgccagtgggcagcctgtcgtaatgggcaactctgcagcggaaccgactactttgggtgtccgtgtttctctttattcttatactggctgcttatggtgacaattgagaaattgttgccatatagctattggattggccatccggtgacaaatagagcaattgtgcatccatttgttggttttatactaactcaatctcaaagttttaactaccctcaatctcattatatcattcaatacagcaaa

SEQ ID NO: 1073 - DNA, 744 bp, Enterovirus B
  source 1..744: mol_type = genomic DNA
ttaaaacagcctgtgggttgttcccacccacagggcccactgggcgttagcactctggtatcacggtacctttgtgcgcctgttttatctaccctccctaaaaatgtaatttagaagcatgatccgaacggtcattaggtagctcagtgcaccaactgagcccagaccaagcacttctgttaccccggactgagtatcaataggctgctcgcgcggctgaaggagaaaacgttcgttatccggccaattacttcgagaaacccagtaccactatgaaagttgcgcagcgtttcgttccgcacaaccccagtgtagatcaggtcgatgagtcaccgcgttccccacgggcgaccgtggcggtggctgcgttggcggcctgctcatggggcaacccatgagacgcttcaatactgacatggtgcgaagagtctattgagctaattggtagccctccggcccctgaatgcggctaatcccaactgcggagcagatacccacaaaccagtgggcagtctgtcgtaatgggtaactctgcagcggaaccgactactttgggtgtccgtgtttccttttgttcttacactggctgcttatggtgacaattgagagattgttgccatatagctattggattggccatccggtgactaacagagcaattgtttacttatttgttggttttataccgttagattacaaagtcctaaacaccctgaatctcattataacacttaattcagcaaa

SEQ ID NO: 1074 - DNA, 744 bp, Enterovirus B
  source 1..744: mol_type = genomic DNA
tttaaaacagcctgtgggttgtttccacccacagggcccacagggcgctagcactttggtatcacggtacctttgtgcgcctgttttataacccttcccccccacagaaacttagaagcaccacacaccgatcaatagaaagcgtggcgcaccagccatgtcttgatcaagcacttctgtttccccggaccgagtatcaatagactgctcgcgcggtcgaaggagaaaacgtccgttatccggctgactacttcgagaaacccagtaacaccatggaaattgcggagtgtttcgatcagcacatccccagtgtagatcaggtcgatgagtcaccgcattccccacgggtgaccgtggcggtggctgcgttggcggcctgcctacggggcatcccgtaggacgcttcaaaatggacatggtgcgaagagtctattgagctagtcagtagtcctccggcccctgaatgcggctaatcctaactgcggagcgcgcgcctccaacccagggggtagcgcgtcgtaacgggtaactctgcagcggaaccgactactttgggtgtccgtgtttctttttatcattacattggctgcttatggtgacaattgaaaggttgttaccatatagctattggattggccacccggtgtctaatagagcgattgtgtacctttttgttgggtttgtgccactttgtaaaacagcctatcagactttgtgctttatagtcaaactaaatacagcaaa

SEQ ID NO: 1075 - DNA, 744 bp, Enterovirus B
  source 1..744: mol_type = genomic DNA
ttttaaaacaagctgtgggttgatcccacccacagggcccactgggcgctagtacactggtatcacggtacctttgtgcgcctgttttacctacccctccccgaaagaaacttagaagctcaacttatgtggtcaatagtaagctcagtacgccaactgagccacgaccaagcacttctgtcgccccggactgagtatcaataagctgctcacgtggctgaaggagaaaacgttcgttatccggccaattacttcgagaaacccagtaccaccatgaaagttgcgcggcgtttcgctccgcacaaccccagtgtagatcgggccgatgagtcaccgcgttccccacgggcgaccgtggcggtgactgcgttggcggcctgcccatggagcaatccatgggacgcttcaatactgacatggtgcgaagagtctattgagctaattggtagtcctccggcccctgaatgcggctaatcctaactgcggagcagatacccacacaccagtgggcagtctgtcgtaacgggcaacttcgcagcggaaccgactactttgggtgtccgtgtttccttttattttatactggctgcttatggtgacaattgagagattgttaccatatagctattggattggccatccggtgtccaacagagcgatcatttacttgtttgttggattcgtgcccttgaactacaaagcactcctaacacttaaatacattgtagacctcaacacagcaaa

SEQ ID NO: 1076 - DNA, 744 bp, Enterovirus B
  source 1..744: mol_type = genomic DNA
ttaaaacagcctgtgggttgttcccacccacagggcccactgggcgctagcacactggtattacggtacctttgtgcgcctgttttatataccccccccaagtgcaacttagaagcaagacatgaccggtcagcaggtgattcagtaaaccaactgagtcttgaccaagcacttctgtttccccggaccgagtatcaataggctgcttacgcggctgaaggagaaagtgttcgttacccggccaattacttcgagaagcctagtaccaccatggaggttgcgcggcgtttcgctccgcacacccccagtgtagatcaggccgatgagccaccgcattccccacgggtgaccgtggcggtggctgcgttggcggcctgcccatggggtaacctatgggacgcttcaatactgacatggtgcgaagagcctattgagctaattggtagtcctccggcccctgaatgcggctaatcctaactgcggagcaggtacccacataccagtgggcagcctgtcgtaacgggtaactctgcagcggaaccgactactttgggtgaccgtgtttccttttattttttcctattggctgcttatggtgacaatcgaggaattgttgccatatagctattggattggccatccggtgtcaaatagagcgattatttacctgtttgttggatttgtaccactgaactttaaggcgctcatcactctcaactatattttatcccttaacgcaacaaa

SEQ ID NO: 1077 - DNA, 744 bp, Enterovirus B
  source 1..744: mol_type = genomic DNA
ttaaaacagcctgtgggttgttcccacccacagggcccaccgggcgccagcacactggtatcacggtacccttgtgcgcctgttttatccaccccttcccacagtaacttagaagcacaccatgtatacggtcaataggcggctcagtacaccaactgggccacgaccaagcacttctgttaccccggactgagtatcaataagctgctcacgcggctgaaggagaaaacgttcgttacccggccaattacttcgagaaacccagtaccaccatgaaggttgcgcagcgtttcgttccgcacaaccccagtgtagatcaggtcgatgagtcaccgcgttcctcacgggtgaccgtggcggtggctgcgttggcggcctgcccatggggcaacccatgggacgcttcaatactgacatggtgcgaagagtctattgagctaattggtagtcctccggcccctgaatgcggctaatcctaactgcggagcagatacccacaaaccagtgggcagtctgtcgtaacgggcaactctgcagcggaaccgactactttgggtgtccgtgtttccttttatccttacactggctgcttatggtgacaattgagaaattgttaccatatagctattggattggccatccggtgacaaacagagcagttgtttacctatttgttggtttcgtaccgctgaaccttaaagttctaaagaccctcaattttatcttagcacttaacacagcaaa

SEQ ID NO: 1078 - DNA, 744 bp, Enterovirus C
  source 1..744: mol_type = genomic DNA
ttaaaacagctctggggttgttcccaccccagaggcccacgtggcggccagtacaccggtattacggtacccttgtacgcctgttttatactcccttccccgcaacttagaagttaaacaaaccaagttcaatagaagggggtgcaaaccagtaccaccacgaacaagcacttctgtttccccggtgacgtcatataggttgtaaccacggccaaaagtgactgatccgttatccgctcttgtacttcgagaagcccagtaccatcttgggatcttcgatgcgttgcgctcagcactcgaacccggagtgtagcttaggccgatgagtctggacattccccaccggtgacggtggtccaggctgcgttggcggcctacctgtggtccaagccacaggacgctagatgtgaacaaggtgtgaagagcctattgagctacaagggaatcctccggcccctgaatgcggctaatcctaactacggagcagacggtcacaaaccagtgaatggtctgtcgtaatgcgcaagtctgtagcggaaccgactactttgggtgtccgtgtttccttttatctttttaatggctgcttatggtgacaatcctagattgttatcataaagcgatttggattggccatccagtgatatttgaaaccattactgtattgcctgctaaggctattttaaagacttaataaacacaacttcattcaactcaattacaccaactaacaactgtctcata

SEQ ID NO: 1079 - DNA, 744 bp, unidentified
  source 1..744: mol_type = unassigned DNA; note = unclassified Enterovirus sequence
tttaaaacagcctgtgggttgttcccacccacagggcccactgggcgctagcactctggtattacggtacctttgtgcgcctgttttacatccctcccccagatgcaacttagaagcagtacaccaagaccaatagtaggcatggcataccagccatgtgtcggtcaagcacttctgttcccccgggctgagtatcaataaactgctcacgtggttgaaggagaaagcgcccgttacccggctaactacttcgagaagcctattaacaccatgaaagttgcggagtgtttcgctcagcacgatcccggtgtagatcaggccgatgagtcaccgcgttccccacaggtgactgtggcggtggctgcgttggcggcctgcccatggggcaacccatgggacgcttcaatatggacatggtgtgaagagcccattgagctagttagtagtcctccggcccctgaatgcggctaatcccaactgcggagcacagcgcccccgctccagggggtagtgtgtcgtaacgggcaactctgcagcggaaccgactactttgggtgtccgtgtttccttttttccttttcattggctgcttatggtgacaattgaaagattgttaccatatagctattggattggccatccagtgtcaagcagagctataatttaccaatttatagggtttgtcccgttggatctgaaagctttaaaaacccttaacttggtactactattaaacagtgtaaa

SEQ ID NO: 1080 - DNA, 744 bp, Enterovirus B
  source 1..744: mol_type = genomic DNA
ttaaaacagcctgtgggttgttcccacccgcagggcccactgggcgctaccacactggtattaaggtacccttgtgcgcctgtttaatacacccctccccctaatgtaacttagaagcatgacttaagtggtcaatagatagctcagtaatccaactgagttccgaccaagtacttctgttaccccggaccgagtatcaataagctgttcacgcggcagaaggagaaagcgttcgttatccggccaattacttcgagaaacccagtatcaccatgaaagttgcgcagtgtttcgctccgcacaaccccagtgaagatcaggtcgatgagtcaccacagtcctcacgggcgaccgtggtggtggctgcgttggcggcctgcccatggggcaacccctgggacgcttcaatcctgacatggtgtgaagagtctattgagctggatggtatccctccggcccctgaatgcggctaatcctagctgcggagcagacgctcgcatgccaacgggtagtctgtcgtaccgggtaactctgcagcggaaccgactactttgggtgtccgtgtttccttttatccttatatcgcctgcttatggtgtcaattgaaagattgttaccatatagctaatggattggccatccgataacaaatagagtgattatctagttttttgttggatttgttccattgaactacaaggtattgaacacccttaatttcattttaacactcaacacaacaaa

SEQ ID NO: 1081 - DNA, 744 bp, Enterovirus B
  source 1..744: mol_type = genomic DNA
tttaaaacagcctgtgggttgttcccacccacagggcccactgggcgctagcactctggtatcacggtacctttgtgcgcctgttttatagcccctcccttagataggaatttagaagcactgcacaccgatcaatagcaggcgcggcacgccagccacgtcttgatcaagcacttctgtttccccggaccgagtatcaatagactgttaacgcggtcgaaggagaaaacgttcgttatccggccaactacttcgagaaacctagtaacgccatggaagttgcggagtgtttcgctcagcacatccccagtgtagatcaggtcgatgagtcaccgcatccctcacgggtgaccgtggcggtggctgcgttggcggcctgcctacggggcaacccgtaggacgcttcaatatggacatggtgcgaagagtatattgagctagttggtagtcctccggcccctgaatgcggctaatcctaactgcggagcgctcgcccccaatccagggggtcgtgcgtcgtaacgggtaactctgcagcggaaccgactactttgggtgtccgtgtttccttttatctttatcacggctgcttatggtgacaattgaaagattgttaccatatagctattggattggccatcctgtgtctaacagagcaatcatatatctttttgttggatttgtgccacttgataaaataagttaccagactttgtgttttatcatcagactaaacacaacaaa

SEQ ID NO: 1082 - DNA, 744 bp, Enterovirus B
  source 1..744: mol_type = genomic DNA
ttaaaacagcctgtgggttgtacccacccacagggcccaccgggcgctagcacactggtatcacggtacccttgtgcgcctgttttatcaacccctccccacattgaaacttagaagtaacacacaccgatcaatagtgggcgtggcaaaccagctacgtcgtgatcaagtatttctgtttccccggactgagtatcaatagactgctcgcgcggttgaaggagaaaacgttcgttacccggctaactacttcgagaaacctagtaatgccatgaaaattgcgtagcgtttcgttcagcacaaccccagtgtagatcaggtcgatgagtcactgcattcctcacgggcgaccgtggcagtggctgcgttggcggcctgcctatagggtaacctataggacgctacaatatggacatggtgtgaagagtctattgagctagttagtagtcctccggcccctgaatgcggctaatcctaactgcggagcgcgtgtttccaatccaggaagtggcgcgtcgtaatgggcaactctgcagcggaaccgactactttgggtgtccgtgtttctcttttatccttacactggctgcttatggtgacaattgaagaattgttaccatatagctattggattggccatccggtgtctaatagagcaattgtatacctctttgttggatttataccattaaacagaacaagttaccagaccctgtgctttattgttaaactaaacacgacgaa

SEQ ID NO: 1083 - DNA, 744 bp, Enterovirus B
  source 1..744: mol_type = genomic DNA
tttaaaacaaagctgtgggttgttcccacccacagggcccactgggcgctggcacactggtattgcggtacctttgtgcgcctgttttatccgccctccccagtagtaacctagaagcatgaataatgtggtcaataggaagctcagtaaaccaactgggtcttgaccaagcacttctgttaccccggactgagtatcaagaagctgctcgcgtggctgaaggagaaaacgttcgttacccggccaattacttcgagaaacccagtaccaccatggaagttgcgcagcgtttcgctccgcacaaccccagtgtagatcaggtcgatgagtcaccgcaatcctcacgggtgaccgtggcggtggctgcgctggcggcctgcccatggggtaacccatgggacgcttcaatactgacatggtgcgaagagtccattgagctaattggtagtcctccggcccctgaatgcggctaatcctaactgcggagcagatatccacacaccagtggacagtctgtcgtaatgggtaactctgcagcggaaccgactactttgggtgtccgtgtttccttttatctttatattggctgcttatggtgacaattgagagattgttaccatatagctattggattggccatccggtgagcaacagagcaattgtattcctctttgtaggatttgtgccgttgaattacaacaactacaacaccttactctacattatccacttaaacacgcggaa

SEQ ID NO: 1084 - DNA, 744 bp, Enterovirus B
  source 1..744: mol_type = genomic DNA
ttaaaacaaggctgtgggttgtacccgcccacagggcccactgggcgccagcactctggtattacggtacccttgtgcgcctgttttatatcccttccccaaggtaaacgttagaagcaatgcactcccgatcaatagaaggtgcgacgcgccagtcgtatctcgatcaagcacttctgtttccccggaccgagtatcaatagactgctagcgcggttgaaggagaaaacgttcgttacccgactaactacttcgagaagcccagtagcgccatgaaagttgcagagtgtttcgctcagcacttcccccgtgtagatcaggccgatgagtcaccgcaatccccacgggcgaccgtggcggtggctgcgttggcggcctgcctatggggaaacccataggacgctcaaatacagacatggtgcgaagagtctattgagctagttagtactcctccggcccctgaatgcggctaatcctaactgcggagcaagtactcacaatccagtgggcagcttgtcgtaacgggtaactctgcagcggaaccgactactttgggtgtccgtgtttccttttattcctacattggctgcttatggtgacaatcaaagagttgttaccatatagctattggattggccatccggtgactaataaagcaattatatttctttttgttgggtttgtaccccttaatacaaccagcttcaccacattgtgttacatcattagactgaacaaggcaaa

SEQ ID NO: 1085 - DNA, 744 bp, Enterovirus B
  source 1..744: mol_type = genomic DNA
ttaaaacagcctgtgggttgttcccacccacagggcccactgggcgccagcacactggtatcacggtacttttgtgcgcctgttttatctacccccacccccagcgtaacttagaagcacatttcacacggtcaataggtgactcagcatgccagctgagttttggccaagcacttctgttaccccggaccgagtatcaataagctactcacgtggctgaaggagaaagcgttcgttaaccggccaattacttcgagaaacctagtatcaccatgaaggttgcgtggcgtttcgctccgcacaaccccagtgtagatcaggtcgatgagttaccgcgtccctcacgggcgaccgtggcggtagctgcgctggcggcctgcccatggggcaacccatgggacgcttcaatactgacatggtgtgaagagtctattgagctaattggtagtcctccggcccctgaatgcggctaatcctaactgcggagcagatacccacacgccagtgggcagtctgtcgtaatgggcaactctgcagcggaaccgactactttgggtgtccgtgtttccttttactcttatattggctgcttatggtgacaattaaaagattgttaccatatagctattggattggccatccagtgtctaatagagcgatcatttacctttttcttgggtttgttccactcaactataaagcacttgtaacgctcaaatatattataaacctcaacacaacaaa

SEQ ID NO: 1086 - DNA, 745 bp, Enterovirus A
  source 1..745: mol_type = genomic DNA
ttaaacagctctagggttgttcccaccctagaggcccacgtggcggctagcactctggtatcacggtacctttgtgcgcctgttttatatccctttccccatgtaacttagaagttattaaacaaagttcaatagaagggggtacaaaccagtgccaccacgaacaagcacttctgtttccccggtgaagctgtatagactgtctccacggttgaaaatggcagatccgttacccgctttggtacttcgagaaacctagtatcaccttggaatcttcgatgcgttgcgctcagcactcaaccccagagtgtagcttaggtcgatgagtctggacgatcctcactggtgacagtggtccaggctgcgttggcggcctacctgtggtgaaaaccacaggacgctagttgtgaacaaggtgtgaagagtctattgagctaccaaagagtcctccggcccctgaatgcggctaatcctaaccacggagcaagtgccttcaaaccagtaggtagcttgtcgtaacgcgcaagtctgtggcggaaccgactactttgggtgtccgtgtttccttttattttatcatggctgcttatggtgacaatctaagattgttatcatatagctattggattggccatccggtgactaacagagatctcatatacctttttgttggttttactaaattaaatattaccacgttcaagacacttctccttatcatacaactaaatagtgagaagagaaa

SEQ ID NO: 1087 - DNA, 745 bp, Enterovirus A
  source 1..745: mol_type = genomic DNA
ttaaaacagcctgtgggttgtacccacccacagggcccactgggcgttagcacactgatttcacggaatctttgtgcgcctgttttatatccctcccccaatacagtaacttagaagttagaaacctacacgaccaatagcaggcgtgacgcaccagtcatgtcttggtcaaacacttctgtttccccggactgagtatcaataagccgctcacgcggctgaaggagaaaacgttcgttatccggctaactacttcgagaaacctagtagcaccgtgaaagttgcagagtgtttcgctcagcactttccccgtgtagatcaggtcgatgagtcactgcatcccccacgggcgaccgtggcagtggctgcgttggcggcctgcctatggggcaacccatgggacgctctaatacagacatggtgtgaagagtctattgagctagttagtagtcctccggcccctgaatgcggctaatcctaactgcggagcacgcaccctcaatccagggggcggcgtgtcgtaacgggtaactctgcagcggaaccgactactttgggtgtccgtgtttccttttatcacttactggctgcttatggtgacaatcaaagaattgttaccatatagcttttggattggccatccggtgtctaacagagctattgtttacctgtttgttggatacattcctctcaactacaaagttcttcaaactctcaactttatattgctccttaatcataagaa

SEQ ID NO: 1088 - DNA, 745 bp, Enterovirus A
  source 1..745: mol_type = genomic DNA
ttaaaacagcctgtgggttgcacccacccacagggcccactgggcgtcagcactctggtactgaggtacctttgtgcgcctgtttttacttccctttcccgaaagtaacttagaagctttgaaccagcgatcaacagtaggtgtgacataccagtcacatctcgatcaagcacttctgtatccccggactgagtatcaataggctgcttacgcggctgaaagagaaaacgttcgttacccggccaactacttcgagaagcttagtaccaccatgaacgaggcagagcgtttcgctcggcactaccccagtgtagatcaggctgatgagtcactgcaatccccatgggcgaccatggcagtggctgcgctggcggcctgcccatggagagatccatgggacgctctaattttgacacggtgcgaagagcctattgagctagttggtagtcctccggcccctgaatgcggctaatcctaactgcggagcgcacacccacataccagtgggtagtgtgtcgtaacgggcaactctgcagcggaaccgactactttgggtgtccgtgtttccttttattctcatgtcggctgcttatggtgacaatcgaagagttgttaccatatagctattggattggccatccggtgtgcaacagagcaattgtctaccagtttattggttttgtaccactgacattaaagtctgtaattaccctcaattttatcttgacccttaacacggtcaagc

SEQ ID NO: 1089 - DNA, 745 bp, Enterovirus A
  source 1..745: mol_type = genomic DNA
ttaaaacagcctgtgggttgttcccacccacagggcccactgggcgctagcacactgattctgcgggatctttgtgcgcctgttttataacccttcccctaggtagcaactttgaaggtttggacaaaaacgaacaatagggggcgaaaagcgccagtcacgtcttggtcaaacacttctgtatccccggactgagtaccaataggctgctcacgcggttgaaggggaaaacgttcgttacccggctaactacttcgagaaacctagtaacaccatgaaagttgcggagtgtttcgctcagcacttcccccgtgtagatcaggtcgatgagtcactgtaaaccccacgggcgaccgtgacagtggctgcgttggcggcctgcccatggggtaacccatgggacgctctaatacagacatggtgcgaagagtctattgagctagttagcagtcctccggcccctgaatgcggctaatcctaactgcggagcgcgcaccctcaatccagggggcggcgtgtcgtaatggttaactctgcagcggaaccgactactttgggtgtccgtgtttccttttattctttattggctgcttatggtgacaattgaaaagttgttaccatatagctattggattggccatccggtgtctaacagagctattgtttacctatttattggatacgtccctctcaatctcaagtccattcaaactcttgattatatattgctccttaactgtaggaa

SEQ ID NO: 1090 - DNA, 745 bp, Enterovirus A
  source 1..745: mol_type = genomic DNA
ttaaaacagcctgtgggttgttcccacccacagggcccattgggcgatagcacactgattttgcggaatctttgtgcgcctgttttataacccttcccccaagcagcaacttagaagtattgcacaatcgcggccagtagtgggcgtgacgcgccagtcacgtcttggtcaagcacttctgtatccccggactgagtatcaatagactgctcacgcggttgaaggagaaaacgttcgttatccggctaactacttcgggaaacctagtagcaccttgaaagttgcagagtgtttcgctcagcacttcccccgtgtagatcaggccgatgagccactgtaaaccccacgggcgaccgtgacagtggctgcgctggcggcctgcccatgggggaacccatgggacgctctaatacaaacatggggtgaaaagtctactgagctacttagtagtcctccggcccctgaatgcggctaatcctaactgcagagcacacaccctcaaccctcggggcagtgtgtcgtaatgggtaactctgcagaggaacccactactttgggtgaccgtgtttccttttattcgttattggctgcttagggcgacaattgaaaagttgttaccatatccctattgtattggccatccggtatctaacagagctattgtttacttatttgttggatacgtccctcttaatttcaaggctatccaaactcttgattatatatcgctccttaattataagaa

SEQ ID NO: 1091 - DNA, 745 bp, Enterovirus A
  source 1..745: mol_type = genomic DNA
ttaaaacagcctgtgggttgttcccacccacagggcccactgggcgctagcactctgattttgcgggatctttgtgcgcctgttttataatcccttccctaagcagtaacttagaagttctacacaatcaggaccaacagtcagcgtggcacgccagccacgttttggtcaagcacctctgtttccccggactgagtatcaatagactgctcacgcggttgaaggagaaaacgttcgttacccggctaactacttcgagaaacctaatagcaccatgaaagttgcggagtgtttcgctcagcacttcccccgtgtagatcaggtcgatgagtcactgtaaaccccacgggcgaccgtgacagtggctgcgttggcggcctgcccatggggtaacccatgggacgctctaatacggacatggtgtgaagagtctattgagctagttagtagtcctccggcccctgaatgcggctaatcctaactgcggagcatgcgccctcaacccagggggtggcatgtcgtaatgggcaactctgcagcggaaccgactactttgggtgtccgtgtttccttttattcctcattggctgcttatggtgacaattgaaaggttgttaccatatagctattggattggccatccggtgtctaacagagctattgtttacctattcattgggtttgtccctcttaatcttaagaccatccaaactcttgattacatattgctcctcaattgtagaag

SEQ ID NO: 1092 - DNA, 745 bp, Enterovirus A
  source 1..745: mol_type = genomic DNA
ttaaaacagcctgtgggttgtacccacccacagggcccactgggcgctagcactctggtactacggtacctttgtgtgcctgttttaagcccctaccccccactcgtaacttagaaggcttctcacactcgatcaatagtaggtgtggcacgccagtcacaccgtgatcaagcacttctgttaccccggtctgagtaccaataagctgctaacgcggctgaaggggaaaacgatcgttatccggctaactacttcgagaaacccagtaccaccatgaacgttgcagggtgtttcgctcggcacaaccccagtgtagatcaggtcgatgagtcaccgtattccccacgggcgaccgtggcggtggctgcgttggcggcctgcccatggggtgacccatgggacgctctaatactgacatggtgcgaagagtctattgagctagttagtagtcctccggcccctgaatgcggctaatcctaactgcggagcacatacccttaatccaaagggcagtgtgtcgtaacgggcaactctgcagcggaaccgactactttgggtgtccgtgtttccttttattcttacattggctgcttatggtgacaattgaaaagttgttaccatatagctattggattggccatccggtgacaaatagagctattgtatatctttttgttggttacgtaccccttaattacaaagtggtttcaactttgaaatacatcctaacactaaattgtagaaa

SEQ ID NO: 1093 - DNA, 745 bp, Enterovirus C
  source 1..745: mol_type = genomic DNA
ttaaaacagcctgtgggttgttcccaccccagaggcccacgtggcggctagtacaccggtatcgcggtacccttgtacgcctgttttatactccctaccccgtaacttagaagcaataacttgagttcaacagcagggggtacaaaccagtaccaccacgaacaagcacttctgtttccccggtgacgttgtatagactgtacccacggtcgaaaacaatagatccgttatccgcttttgtacttcgaaaagcccagtaccatcttggaatcttcgatgcgttgcgttcagcactcgaacccggagtgtagcttaggtcgatgagtctggacagtccacaccggcgacggtggtccaggctgcgttggcggcctacctgtggcccaaagccacaggacgctagttgtgaacaaggtgtgaagagcctattgagctacaaaagactcctccggcccctgaatgcggctaatcccaaccacggagcaggcgatcacaaaccagtggttagcctgtcgtaatgcgcaagtctgtggcggaaccgactactttgggtgtccgtgtttccttttatttcatttatggctgcttatggtgacaatcgtagattgttatcataaagcgaattggattggccatccggtgaaattcaaatatactgtttatttatttgttggcttcgcgcctttaaattaccgcaccttagaactcattcacattatcttgctggttagacagtggtaccatc

SEQ ID NO: 1094 - DNA, 745 bp, Enterovirus C
  source 1..745: mol_type = genomic DNA
ttaaaacagctctggggttgttcccaccccagaggcccacgtggcggctagtacaccggtatcacggtacccttgtacgcctgttttatacccccttcccccgtaacttagaagctacacaccaagttcaatagaagggggtacaaaccagtaccaccgcgaacaagcacttctgtttccccggtgaagttgcatagactgtgcccacggttgaaagcgaccgatccgttacccgccttggtacttcgagaaacccagtaccactttggaatcaatgatgcgttgcgctcagcgctcgaacccggagcgtagcttaggctgatgagtctggacattccccactggtgacagtggtccaggctgcgttggcggcctacctgtggtgaaagccacaggacgctagttgtgaacaaggtgcgaagagtctattgagctaccatggagtcctccggcccctgaatgcggctaatcccaaccacggagcaggcactcacaagccagtgagacgcttgtcgtaatgcgaaagtctgtggcggaaccgactactttgggtgtccgtgtttccttttattctttgtatggctgcttatggtgacaatcgaagattgttatcataaagcaagttggattggccatccggtgagaattaaaagcattatttacttgcttattggattcactccaatcacatcatttactccacatctaatcaatcttgtgttgatactcagaaggtgttatcaaa

SEQ ID NO: 1095 - DNA, 745 bp, Enterovirus C
  source 1..745: mol_type = genomic DNA
ttaaaacagctctggggttgttcccaccccagaggcccacgtggcggccagtacactggtattacggtacccttgtacgcctgttttacaccccttcccccgtaacttagaagctttaaacccaagttcaatagtaggtggtacaacccagtaccaccacgaacaagcacttctgttatcccggtgagattgcataagctgtccccacggctaaaagcgattgatccgttacccgctcttgtacttcgagaagcctagtaaaaccttggaatcttcgacgcgttgcgttcgacactcaaccccagagtgtagcttaggctgatgagtctggacattcctcaccggcgacggtggtccaggctgcgttggcggcctacctgtggcctaaagccacaggacgctagttgtgaacaaggtgtgaagagcctattgagctacaagggagtcctccggcccctgaatgcggctaatcccaaccacggagcaggtggttgcaatccagcaactggcctgtcgtaacgcgcaagtctgtggcggaaccgactactttgggtgtccgtgtttccttttattttttaatggctgcttatggtgacaatcacagattgttgtcataaagcgaattggattggccatccagtgagagttaagataattatctacttgtttattggatttgttcctataaccgcccatacaccttgcttgattgaagtgatcctgtcaataagacatcactattaca

SEQ ID NO: 1096 - DNA, 745 bp, Enterovirus C
  source 1..745: mol_type = genomic DNA
ttaaaacagctctggggttgttcccaccccagaggcccacgtggcggccagtactccggtattgcggtacccttgtacgcctgttttacactcccttccccggtaacttagaagtaaacaaaccaagttcaatagaagggggtacaaaccagtaccaccacgaacaagcacttctgtttccccggtgacgttgtatagactgtacccacggttgaaaacaactgatccgttatccgctcttgtacttcgagaagcccagtatcaccttggaatcttcgatgcgttgcgctcagcactcaaccccagagtgtagcttaggtcgatgagtctggacaatcctcaccggcgacggtggtccaggctgcgttggcggcctacctgtggcccaaagccacaggacgctagttgtgaacaaggtgtgaagagcctattgagctacgagagagtcctccggcccctgaatgcggctaatcccaaccacggagcaggtgatcacaagccagtgattagcctgtcgtaacgcgcaagtctgtggcggaaccgactactttgggtgtccgtgtttcctttattttattatggctgcttatggtgacaatcacagattgttatcataaagcgacttggattggccatccagtgaaaataaaacacatcatttacctgattgttggatttactccgctgactatctactcaccaggtcttattaaggttattctgttgattaggtcacaatttcaca

SEQ ID NO: 1097 - DNA, 745 bp, Enterovirus C
  source 1..745: mol_type = genomic DNA
ttaaaacagctctcgggttgttccccccccagaggcccacgtggcggccagtactccggtattacggtacccttgtacgcctgttttgtatccccttcccccgcaacttagaagttataaaccaagttcaatagaagggggtacaagccagtaccaccacgaacaagcacttctgtttccccggtgatgttgtatagactgctaacgcggttgaaaacagctgatccgttatccgcttgtgtacttcgagaagcctagtatcatcttggaatcttcgatgcgttgcgttcagcgctctaccccagagcgtagcttaggctgatgagtctgggcattccccaccggcgacggtggcccaggctgcgttggcggcctacctatggctaacgccataggacgctagttgtgaacaaggtgtgaagagcctattgagctacacaagagtcctccggcccctgaatgcggctaatcctaaccatggagcaagtgatcacaatccagtgatattcttgtcgtaacgcgcaagtccgtggcggaaccgactactttgggtgtccgtgtttccttttacttttatcatggctgcttatggtgacaatcattgattgttatcataaagcgaattggattggccatccggtgaaagtgagacttatcatctacttgtttgttggattcactccattgaacacattcactcccagtatcatttcaatagtaatcagaattagacagttgtatcaca

SEQ ID NO: 1098 - DNA, 745 bp, Enterovirus C
  source 1..745: mol_type = genomic DNA
ttaaaacagctctggggttgttcccaccccagaggcccacgtggcggctagtactccggtattacggtacccttgtacgcctgttttaaatccccttccccgtaacttagaagcttaaaccaataagttcaatagaagggggtacaaaccagtaccaccacgaacaagcacttctgtttccccggtgcggtggtatagactgtacccacggttaaaaaccaccaatccgttatccgctctggtacttcgagaagcctagtaccaccttggaatctttgacgcgttgcgctcaacactcaaccccagagtgtagcttaggctgatgagtctgggcagtccccaccggtgacggtggcccaggctgcgttggcggcctacccatggctaatgccatgggacgctagaagtgaacaaggtgtgaagagcctattgagctactagagagtcctccggcccctgaatgcggctaatcccaaccacggatcaagtgcgcgcaacccagtgcgtagcttgtcgtaatgcgcaagtctgtggcggaaccgactactttgggtgtccgtgtttccttttattcttattatggctgcttatggtgacaatcttagattgttatcatatagcaattggattggccatccagtgagagtgagagatatcatatacctatttgtagcttttactccacttagcacgaacacagttactttgattagaattgtgctattgatcagattgacacatcact

SEQ ID NO: 1099 - DNA, 745 bp, Enterovirus C
  source 1..745: mol_type = genomic DNA
ttaaaacagctctggggttgttcccaccccagaggcccacgtggcggctagtactctggtatcacggtacctttgtacgcctgttttatatcccttcccccgtaacttagaagctttgtaccaacaagttcaatagaaggggtacaaaccagtaccaccacgaacaagcacttctgtttccccggtgcgatgacatagactgtacccacggtcaaaagtcaccaatccgttacccgctttggtacttcgagacgcctagtattgccttggaattctcgatgcgttgcgctcaacactcgaccctggagtgtagcttaggctgatgagtctgggcattccccaccggtgacggtggcccaggctgcgttggcggcctacccatagctattgctatgggatgctagagttgaacaaggtgtgaagagccaattgagctactaaagagtcctccggcccctgaatgcggctaatcccaaccacggatcaagtgcgtgcaacccagcacgtagcttgtcgtaatgcgcaagtctgtggcggaaccgactactttgggtgtccgtgtttccttttatttttatcatggctgcttatggtgacaatcttggattgttatcatatagcgattggattggccatccggtgagaataaaagatattgtttatctgtttgtggcttttactccattaaacaaaaacacactttccttaattaaagtggtactattgatcagatcagcataccaca

SEQ ID NO: 1100 - DNA, 745 bp, Enterovirus C
  source 1..745: mol_type = genomic DNA
ttaaaacagctctggggttgttcccaccccagaggcccacgtggcggctagcactctggtattgcggtacctttgtgcgcctgttttatatccccgcccctacgtaactttagaagcaatacacagtgttcattaggaggggcacaaaccagtgtccttaagaacaagcacttctgtttccccggtgacctcgtataggctgtacccacggctaaaaacgagcgattcgttacccgcttaggtacttcgagaagcctagtaccgccttggaatcttcgacgcgttgcgctcagcactctaccccgagtgtagcttaggctgatgagtctgggcattccccaccggtgacggtggcccaggctgcgttggcggcctacccatggcctgcgccatgggacgctagttgtgaacaaggtgtgaagagcctattgagctacctaagaatcctccggcccctgaatgcggctaatcctaaccacggagcaagcaccctcaatccagggggtggcttgtcgtaacgcgcaagtctgtggcggaaccgactactttgggtgtccgtgtttccctttatttttattgtggctgcttatggtgacaatctttgattgccatcataaagcgaattggattggccatccggtgaaagttgaacacaccattcatctatttgttggattcacctcgttgactcagtttacacccaatttggtacatatagtgatagtgattagagaaaaataccaca

SEQ ID NO: 1101 - DNA, 745 bp, Enterovirus C
  source 1..745: mol_type = genomic DNA
ttaaaacagctctggggttgttcccaccccagaggcccacgtggcggctagtactctggtattacggtacctttgtacgcctgttttatatcccctccccccagtaacttagaaacaaaaaacccaagttcaataggagggggtacaaaccagtaccaccacgaacaagcacttctgttttccccggtgaggttgtatagactgtccccacggtcgaaaatgactgatccgttacccgctcctgtacttcgagaagcccagtaacatcttggaatcttcgatgcgttgcgctcagcactcaaccccagagtgtagcttaggtcgatgagtctggacgctccccaccggcgacggtggtccaggctgcgttggcggcctacctgtggtccaaagccacaggacgttagttgtgaacaaggtgtgaagagcctattgagctacaagagagtcctccggcccctgaatgcggctaatcccaaccatggagcagatgattgcaaaccagcaattggtctgtcgtaatgcgtaagtctgtggcggaaccgactactttgggtgtccgtgtttcctttttactctttaatggctgcttatggtgacaatcacggattgttatcataaagcgaattggattggccatccggtgagaatcagaacgattatttcttcctcgtggatttgtaccaataacaccttacacaccgcacttaatcagagttatattgtgtgagatttcattaccata

SEQ ID NO: 1102 - DNA, 745 bp, Enterovirus C
  source 1..745: mol_type = genomic DNA
ttaaaacagctctggggttgttcccaccccagaggcccacgtggcggctagcactctggtatcacggtacctttgtgcgcctgttttatgtccccgcccccatgtaactttagaagcaatacacggtgttcattaggaggggcacaagccagtgttcctatgaacaagcacttctgtttccccggtgacctcgtataggctgtgcccacggctaaaaacgtgcgatccgttacccgcttgggtacttcgagaagcccagtaccaccttggaatcttcgacgcgttgcgctcagcactctaccccgagtgtagcttaggctgatgagtctgggcattccccactggtgacagtggcccaggctgcgttggcggcctacccattgctcgcgcaatgggacgctagatgtgaacaaggtgtgaagagcctattgagctgcctaagagtcctccggcccctgaatgcggctaatcctaaccacggagcaagcgccttcaacccagggggtggcttgtcgtaacgcgcaagtctgtggcggaaccgactactttgggtgtccgtgtttccctttgtttttattatggctgcttatggtgacaatcattgattgccatcataaagcgaattggattggccatccggtggaagttacatacatcatccatctatttgttggatttgcttcactaacacagttcacaatcaacttggtatatataataatagtgattagagaaaaataccata

SEQ ID NO: 1103 - DNA, 745 bp, Enterovirus C
  source 1..745: mol_type = genomic DNA
ttaaaacagctctggggttgttcccaccccagaggcccacgtggcggctagtactctggtatctcggtacctttgtacgcctgttttatacccccttccccatgtaactttagaagcaattcaacaagttcaatagagggggtacaaaccagtaccaccacgaacaagcacttctgtttccccggtgattttacataagctgtgcccacggctgaaagtgaatgatccgttacccgcttgagtacttcgagaagcctagtatcgccttggaatcttcgatgcgttgcgctcagcactctaccccgagtgtagcttaggctgatgagtctgggcattccccaccggtgacggtggcccaggctgcgttggcggcctacccatggctaacgccatgggacgctagttgtgaacaaggtgtgaagagcctattgagctacttaagagtcctccggcccctgaatgcggctaatcccaaccacggagcaggcgccaccaatccaggaggtagcctgtcgtaacgcgtaagtctgtggcggaaccgactactttgggtgtccgtgtttccttttatctctttaatggctgcttatggtgacaatcatagattgttatcataaagcgaattggattggccatccggtgaagtgtaaacacattatttatttgttcattggatttactccattcacccgatttactccaaatataatacatattgtattgttgataagacgttgctactaca

SEQ ID NO: 1104 - DNA, 745 bp, Enterovirus C
  source 1..745: mol_type = genomic DNA
ttaaaacagctctggggttgttcccaccccagaggcccacgtggcggctagcactccggtattacggtacccttgtgcgcctgttttatactcccttcccccgcaatttagaagcatgaaacccggttcaatagtaaggggtacaaaccagtaccactatgaacaagcacttctgtctccccggtgatattgtatagactgctcacgcggttgaaagcgattgatccgttatccgcttgtgtacttcgagaagcctagtaccaccttcggaacttcgacgcgttgcgctcagcacccgaccccggggtgtagcttgggctgatgagtctggacgatcctcaccggcgacggtggtccaggctgcgttggcggcctacccgtggttcacaccacgggacgctacaagtgaacaaggtgtgaagagcctattgagctacacaagagtcctccggcccctgaatgcggctaatcccaaccacggagcaggcggtcacgaaccagtggctagcttgtcgtaacgcgcaagtctgtggcggaaccgactactttgggtgtccgtgtttcctgttatttttatcatggctgcttatggtgacaatcattgattgttatcataaagcgaattggattggccgtccggaaagtgttttatcacatatactgtttggtgaagctactacattaattctgcctctcactcggttagtcaaacagaactcagacagagtaaaacatcaccaacgca

SEQ ID NO: 1105 - DNA, 745 bp, Enterovirus C
  source 1..745: mol_type = genomic DNA
ttaaaacagcctgtgggttgttcccaccccagaggcccacgcggcggctagtactctggtgctgcggtacctttgtacgcctgttttatacccccgtccccgcaatttagaagcaagaaaacaaagttcaatagtaggtggtgcaatccagcatcgctatgaacaagcacttttgttgccccggtgaggttgcatagactgttcccacggtcaaaagtgaccaatccgttacccgcttttgtacttcgagaagcctagtatcaccttggaatcttcgacgcgttgcgttccgcactcaaccccagggtgtagcttaggtcgatgagtctgggcggaccccaccggcgacggtggcccaggctgcgttggcggcctacctgtggtccaaagccacaggacgctagttgtgaacaaggtgtgaagagcctattgagctacaaaagagtcctccggcccctgaatgcggctaatcctaaccacggagcaggtggtcgcaaaccagtgattaacctgtcgtaatgcgcaagtctgtggcggaaccgactactttgggtgtccgtgtttctctttattttactatggctgcttatggtgacaatcgaggattgttatcataaagcgaattggattggccatccggtgaaagtgaaatacattatctattcaattgttgaattcatccagaacacacccgcaacactacatctgattaaactcgttttgataaccagagaacattaccaca

SEQ ID NO: 1106 - DNA, 745 bp, Enterovirus C
  source 1..745: mol_type = genomic DNA
ttaaaacagcctgtgggttgttcccaccccagaggcccacgtggcggctagcactccggtattacggtacccttgtgcgcctgtttttatactcccttccccgtaacttagaagcacaaaaccaagttcaatagaagggggtacaaaccagtaccaccacgaacaagcacttctgtttccccggtgacgttgtatagactgctcacgcggttgaaagcgacgaatccgttatccgcttgtgtacttcgagaagcctagtaccaccttggaatcttcgacgcgttgcgctcggcactctaccccagagtgtagcttaggctgatgagtctgggcattcctcatcggcgacgatggcccaggctgcgttggcggcctacctatggctaacgccataggacgctagttgtgaacaaggtgtgaagagcctattgagctacacaagagtcctccggcccctgaatgcggctaatcctaaccatggagcaggagatcacaaaccagtggtattcctgtcgtaatgcgcaagtccgtggcggaaccgactactttgggtgtccgtgtttccttttatttttatcatggctgcttatggtgacaatcattgattgttatcataaagcgaattggattggccatccggtgaaaataagatttattatttacttgtttgttggattcactccgctaaacacattcactccaggtatcatctctatagtgattgaaattaggcaattacatcaca

SEQ ID NO: 1107 - DNA, 745 bp, Enterovirus C
  source 1..745: mol_type = genomic DNA
ttaaaacagctctggggttgttcccaccccagaggcccacgtggcggctagtactctggtatcacggtacctttgtacgcctgttttacatcccctcccccacgtaactttagaagcaattcaacaagttcaatagagggggtacaaaccagtatcaccacgaacaagcacttctgtttccccggtgattttacataagctgtgcccacggctgaaagtgaatgatccgttacccgctcgagtacttcgaaaagcctagtatcgctttgggatcttcgacgcgttgcgctcagcactctaccccgagtgtagcttaggctgatgagtctgggcattccccatcggcgacgatggcccaggctgcgttggcggcctacccatggctaacgccatgggacgctagttgtgaacaaggtgtgaagagcctattgagctactcgagagtcctccggcccctgaatgcggctaatcccaaccacggatcaggtgcctccaacccaggaggtggcctgtcgtaacgcgcaagtctgtggcggaaccgactactttgggtgtccgtgtttccttttatcttttaaatggctgcttatggtgacaatcatagattgttatcataaagcgaattggattggccatccggtgaaatacaaacacattatttacttgtttgttggatttactccgctcacacagcttactcctaagataatatttattgtattgctggtaaggagacactattata

SEQ ID NO: 1108 - DNA, 745 bp, Enterovirus B
  source 1..745: mol_type = genomic DNA
tttaaaacagcctgtgggttgttcccacccacagggcccactgggcgccagcactctggtattgcggtaccttagtgcgcctgttttatatacccatcccccaaacgtgatttagatgcatgttaacgaagaccaatagtaagcgcagcacaccagctgtgttccggtcaagcacttctgttaccccggactgagtatcaataagctactcacgtggctgaaggagaaaacgttcgttacccggccaattacttcgagaaacccagtaacaccatgaaggttgcgcagtgtttcgctccgcacaaccccagtgtagatcaggtcgatgagtcaccgcattccccacgggtgaccgtggcggtggctgcactggcggcctgcccatggggtaacccatgggacgcttcaatactgacatggtgcgaagagtctattgagctaattggtagtcctccggcccctgaatgcggctaatcctaactgcggagcagatacccacacgccagtgggcagtctgtcgtaacgggcaactctgcagcggaaccgactactttgggtgtccgtgtttctctttatccttatactggctgcttatggtgacaattgggagattgttaccatatagctattggattggccatccagtgacaaatagagcaatcgtgtatttgtttgttggtttcgtaccattaaattacaaggtcataaacaccctcaatcttattatagcattcaatacaacaaa

SEQ ID NO: 1109 - DNA, 745 bp, Enterovirus B
  source 1..745: mol_type = genomic DNA
ttaaaacagcctgtgggttgtacccacccacagggcccactgggcgctagcacactggtatcccggtacctttgtgcgcctgttttataccccctcccccatatcgtaacatagaagcaatgcactcccggtcaatagctgacgtgacaaaccagttgcgttttgaccaagcacttctgtaaccccggaccgagtatcaataagctgcttgcgcggctaaaggagaaaccgtccgttacccggctaactacttcgagaaacctagtaccaccatgaacgttgcggagtgtttcgctcagcacttcccccgtgtagatcaggtcgatgagccaccgcattccccacgggcgaccgtggcggtggctgcgttggcggcctgcctgtggggcaacccacaggacgctctaatatagacatggtgtgaagagtctattgagctagttagtagtcctccggcccctgaatgcggctaatcctaactgcggagcacatacccctaatccaaggggcagtgtgtcgtaacgggcgactctgcagcggaaccgactactttgggtgtccgtgtttccttttatcttttatattggctgcttatggtgacaattgcagagttgttaccatatagcttttggattggccatccggtgagcaatagagctgttatttatcaatttgttggattcgtcgcactcaaccacacagtctttagaacactcggatttatcttgacccttaatacgagaaa

SEQ ID NO: 1110 - DNA, 745 bp, Enterovirus B
  source 1..745: mol_type = genomic DNA
ttaaaacaagcctgtgggttgaacccactcacagggcccaatgggcgctagcacactggtatcacggtacctttgtgcgcctgttttatccaccctttccccgaacgaaacttagaagtttgaattaaacggtcaataggaaacccagtacaccaactgggctgtgaccaagcacttctgtgaccccggaccgagtatcaataagctactcacgtggctgaaggagaaaacgttcgttacccggccaattacttcgagaaacttagtaccaccatgaaagttgcgcagcgtttcgctccgcacgaccccagtgtagatcaggctgatgagtcaccgcgtaccccacgggtgaccgtggcggtggctgcgttggcggcctgcccttggggcaacccaagggacgcttcaatactgacatggtgcgaagagtctattgagctaattggtagtcctccggcccctgaatgcggctaatcccaactgcggagcagatacccacataccagtgggcagtctgtcgtaatgggcaactctgcagcggaaccgactactttgggtgtccgtgtttcctttatttcttacactggctgcttatggtgacaattgagagattgttgccatatagctattggattggccatccggtgtctaatagagcaattatctacctttttgttggatttattccacttaactataaagcactcaaaacacttatatacattgtagatctcaacacagcaaa

SEQ ID NO: 1111 - DNA, 745 bp, Enterovirus B
  source 1..745: mol_type = genomic DNA
tttaaaacagcctgtgggttgttcccacccacagggcccactgggcgctagcacactggtatcacggtacctttgtgcgcctgttttatacacccccccctacatcgtaatttagaagtccaagccaaacggtcaatagacaacccagtatgccaactgggtcccgaccaagcacttctgttgccccggaccgagtatcaataagctgcttgcgcggctgaaggagaaagcgttcgttacccggccaattacttcgagaaacccagtaacaccatggaagttgcgtggcgtttcgctccgcacaaccccagtgtagatcaggtcgatgagtcaccgcaaccctcacgggcgaccgtggcggtggctgcgttggcggcctgcccatgggacaacccatgggacgcttcaataccgacatggtgcgaagagtctattgagctaattggtattcctccggcccctgaatgcggctaatcctaactgcggagcagacacccacatgccagtgggcagtctgtcgtaacgggaaactctgcagcggaaccgactactttgggtgaccgtgtttcctattatccttattctggctgcttatggtgacaattgaaagattgttaccatatagctattggattggccatccggtgtctaatagagctattatatacctctttgttggatttataccacttaacaaagtaaactaccagactctgtgctatatcattggattgaacacggtgaa

SEQ ID NO: 1112 - DNA, 745 bp, Enterovirus B
  source 1..745: mol_type = genomic DNA
ttttaaaacaggctgtgggttgttcccacccacagggcccattgggcgccagcacactggtattacggtacctttgtgcgcctgttttatccaccccctccccaatgtaacgtagaagcacaaaccaagtggtcaatagatggctcagtacaccaactgggcttagaccaagcacttctgttaccccggactgagtatcaataggctgctcacgcggctgaaggagaaaacgttcgttacccgaccaactacttcgagaagcctagtaccatcatgaaggatgcgcagtgtttcgttcagcacaaccccagtgtagatcaggccgatgagtcaccgcaatccccacgggtgaccgtggcggtggctgcgctggcggcctgcccatggggcaacctatgggacgcttcaatttcgacatggtgcgaagagcctattgagctagttggtagtcctccggcccctgaatgcggctaatcccaactgcggagcagacacccacaaaccagtgggcagtttgtcgtaacgggcaactctgcagcggaaccgactactttgggtgtccgtgtttccttttatctatatattggctgcttatggtgacaattgagggattgttgccatatagctattggattggccatccggtaacaaacagagctattatttacctttttgttggcttcgtgccgttgaactttaaagttattaaaaccatatacttcatcttgacactcaacacagcaaa

SEQ ID NO: 1113 - DNA, 745 bp, Enterovirus B
  source 1..745: mol_type = genomic DNA
aaaacaagcctgtgggttgctcccggccccacaggggcccactgggcgctagcacactggtattgcggtacccttgtgcgcctgttttatccaccctccccaaccgtaatttagaagcacgaacaacgtggtcaacaggcaacccagtataccaactgggtctcgaccaagcacttctgtcaccccggactgagtatcaataagctgctcgcgtggctgaaggagaaaacgttcgttacccggccaattacttcgagaaacctagtatcaccatggaagttgcgcagtgtttcgctccgcacaaccccagtgtagatcaggtcgatgagtcaccgcaaccctcacgggtgaccgtggcggtggctgcgctggcggcctgcccatggggcaacccatgggacgcttcaatactgacatggtgcgaagagtctattgagctaattggtaatcctccggcccctgaatgcggctaatcctaactgcggagcagatatccacacaccagtggacagtctgtcgtaatgggcaactctgcagcggaaccgactactttgggtgtccgtgtttccttttattctttttattggctgcttatggtgacaattgagagattgttaccatatagctattggattggccatccggtgagcaacaggtcaattgtattcctctttgttggatttgtgccattaaactataataactacaacaccctgctttacattatccatttaaacacacagaa

SEQ ID NO: 1114 - DNA, 745 bp, Enterovirus C
  source 1..745: mol_type = genomic DNA
gctctggggttgttcccaccccagaggcccacgtggcggctagtactcccggtatcacggtacccttgtacgcctgttttatactccctttcccccgcaacttagaagattatgagaatccacgttcaacaggaagggggtacaaaccagtaccaccacgaacaagcacttctgtttccccggtgaggttgtatagactgtacccacggttgaagacgactgatccgttacccgctctagtacttcgagaagcttagtaacaccttggaatcatcgatgcgttgcgttcaacactcaaccccagagtgtagcttaggctgatgagtctggacaatcctcaccggtgacggtggtccaggctgcgctggcggcctacctgtggtccaaaaccacaggacgctagatgtgaacaaggtgcgaagagcctattgagctactagagagtcctccggcccctgaatgcggctaatcccaaccacgaagcaagtgctcacgatccagtgagtggcttgtcgtaacgcgtaagttcgtggcggaaccgactactttgggtgtccgtgtttcctttttaactttatatggctgcttatggtgacaatcattgattgttatcataaagcgatttggattggccatccagtgagagcgagaacaactacttatttgctcgttggatttgctccttcgacaagctacattttagatatcattctcattgtattcttgatcagaaagcaatatcata

SEQ ID NO: 1115 - DNA, 745 bp, unidentified
  source 1..745: mol_type = unassigned DNA; note = unclassified Enterovirus sequence
ttaaaacagcttgggggtgtttcccacccacagggcccactgggcggtagcactctggtattacggtacctttgtgcgccttttttatatccccacccccgattgtaacttagaagaaataattcacgaccaatagtaggcgtggcgcgccagccatgttttggtcaagtacttctgtttccccggatcgagtatcaataggctgtccacacggctgaaggagaaagcgtccgttatccggccaattacttcgagaaacctagtaccaccatgaaagttgcgcagtgtttcgctccgcacaaccccagtgtagatcaggtcgatgagtcaccgcttccctcacgggcgaccgtggcggtggctgcgctggcggcctgcccatggggaaacctatgggacgctccaatactgacatggtgcgaagagtctattgagctaattggtagtcctccggcccctgaatgcggctaatcccaactgcggagcagatacccacatgccagtgggcagtctgtcgtaacgggcaactctgcagcggaaccgactactttgggtgaccgtgtttccttttattcctatactggctgctaatggtgacaattgaaagattgttaccatatagctattggattggccatccggtaactaacagagcgattgtttaccaatttgttggttttgtaccactagactacaaggtcttaaacaccttaaactatatcttgacactcaacacattgaaaag

SEQ ID NO: 1116 - DNA, 746 bp, Enterovirus A
  source 1..746: mol_type = genomic DNA
gtgctcttccgatctgtgggttgcacccacccacagggcccactgggcgttagcactctggtaccatggtacccttgtgcgcctgttttatcaccctaacccaacttgaaacttagaagcaatacacaatcgaccaatagtaggtgtggcgcaccagccgcatcttggtcaagcacttctgtttccccgggttgagtatcaataagctgtccacacggctgaaggagaaaacgcccgttatccggccaactacttcgagaaacctagtaccactatgaacgttgcaaggcgtttcgctcagcacttcccccgtgtagatcaggtcgatgagtcaccgcattccccacgggcgaccgtggcggtggctgcgttggcggcctgcctatgggttaacccataggacgccttaatactgacatggtgcgaagagtctattgagctagttggtagtcctccggcccctgaatgcggctaatcctaactgcggagcacatactcacaacccagtgagcggtgtgtcgtaatgggtaaccctgcagcggaaccgactactttgggtgtccgtgtttccttttattcttacattggctgcttatggtgacaatcatagaattgttaccatatagctattggattggccatccgatttctaacagagctattatttacctgtttgttggatttactccgttgacatacaaatccctaaacactttgtgctttatcttgaacttgaacgcacgaaa

SEQ ID NO: 1117 - DNA, 746 bp, Enterovirus A
  source 1..746: mol_type = genomic DNA
tgctcttccgatctgtgggttgtacccacccacagggcccattgggcgctagcactctggtaccatggtacccttgtgcgcctgttttatcaccccgcccctacctgaaacgtagaagctataatcaatcggccaatagtgggtgtggcataccagccacatcttggtcaagcacttctgtttccccgggttgagtatcaatatgctgttcacacggctgaaggagaaaacacccgttacccggccaactacttcgagaagcttagtaccgccatgaacattgcaaggcgtttcgctcagcactttccccgtgtagatcaggccgatgagtcaccgcattccccacgggcgaccgtggcggtggctgcgttggcggcctgcctgtgggttaacccacaggacgccttaatatagacatggtgcgaagagcctattgagctagttggtattcctccggcccctgaatgcggctaatcctaactgtggagcacatactcacaagccagtgggtggtgtgtcgtaacgggcaactctgcagcggaaccgactactttgggtgtccgtgtttcctttttatccttatattggctgcttatggtgacaatcagagaattgttaccatatagctattggattggccatccggtgtgcaacagagctattgtgtatttgtttgttggatttgtcccactatcgtatacacccctcaacaccttgtattttattttgagattgaacgcaagaaa

SEQ ID NO: 1118 - DNA, 746 bp, Enterovirus A
  source 1..746: mol_type = genomic DNA
tttaaaacagcctgtgggttgtacccacttgcagggcccactgggcgctagcactctgattctgcgggatctttgtgcgcctgttttataaccccacccctactcgtaacttagaagtaacacacaccattgatcaacagcaagcgtggcgcaccagccacgtttagatcaagcacttctgtttccccggactgagtatcaatagactgctcacgcggttgaaggagaaatcgttcgttacccggctaactacttcgagaaacctagtagcaccattgaaactgcagagtgtttcgttcagcactttccccgtgtagatcaggccgatgagtcactgcaatccccacgggcgaccgtggcagtggctgcgttggcggcctgcctatgggctttcccataggacgctctaatgtggacatggtgtgaagagtctattgagctagttagtagtcctccggcccctgaatgcggctaatcctaactgcggagcgcataccctcaatccagggggtggtgcgtcgtaacgggcaactttgcagcggaaccgactactttgggtgtccgtgtttccttttattcttatattggctgcttatggtgacaattgagaaattgttaccatatagctattggattggccatccagtgtctaacagagcagttgtatacttatttgctggattcgttccactatcatacacatctattaataccttatattatattataagattgaacgcaaggaa

SEQ ID NO: 1119 - DNA, 746 bp, Enterovirus A
  source 1..746: mol_type = genomic DNA
tttaaaacagcctgtgggttgtacccacctacagggcccactgggcgctagcactctgattccacggaatccttgtgcgcctgttttatatcccctccccaagttgcaacttagaagcattgcactacaatgatcagtagcaggcgtggcgctccagccatgtctcgatcaagcacttctgtttccccggaccgagtatcaatagactgctaacgcggttgaaggagaaaacgttcgttatccggctaactacttcgagaaacctagtagcaccatcgaagctgcggggcgtttcgctcagcacttcccccgtgtagatcaggtcgatgagtcactgcaatcctcacgggcgaccgtggcagtggctgcgttggcggcctgcctatggggcaacccataggacgcttcaaagtggacatggtgtgaagagtctattgagctagttagtagtcctccggcccctgaatgcggctaatcctaactgcggagcacataccttcaatccaggaggtagtgtgtcgtaacgggcaactctgcagcggaaccgactactttgggtgtccgtgtttccttttattctcttattggctgcttatggtgacaattgaagaattgttaccatatagctattggattggccatccagtgtctaacagagcaattgtgtacttatttgttggttttgttcctttgtctcacacgtcccttagtactttgtattacattataaaactgaattcggagag

SEQ ID NO: 1120 - DNA, 746 bp, Enterovirus A
  source 1..746: mol_type = genomic DNA
tttaaaacagcctgtgggttgcacccacccacagggcccactgggcgctagcactctggtactgaggtacctttgtgcgcctgtttttactccccttcccccgaagtaacttagaagctgtaaatcaacgatcaatagcaggtgtggcacaccagtcataccttgatcaagcacttctgtttccccggactgagtatcaataggctgctcgcgcggctgaaggagaaaacgttcgttacccgaccaactacttcgagaagcttagtaccaccatgaacgaggcagggtgtttcgctcagcacaaccccagtgtagatcaggctgatgagtcactgcaacccccatgggcgaccatggcagtggctgcgttggcggcctgcccatggagaaatccatgggacgctctaattctgacatggtgtgaagagcctattgagctagctggtagtcctccggcccctgaatgcggctaatcctaactgcggagcacatgctcacaaaccagtgggtggtgtgtcgtaacgggcaactctgcagcggaaccgactactttgggtgtccgtgtttccttttattcctatattggctgcttatggtgacaatcaaagagttgttaccatatagctattggattggccatccggtgtgcaacagggcaattgtttacctatttattggttttgtaccattatcactgaagtctgtgatcactctcaaattcattttgaccctcaacgcaatcaaac

SEQ ID NO: 1121 - DNA, 746 bp, Enterovirus A
  source 1..746: mol_type = genomic DNA
ttttaaaaaccagcctgtgggttgcacccactcacagggcctactgggcgcaagcactctggtacctcggtacctttgtgcgcctgttttacaccccccccctagtgaaacttagaagcagcaaaccacgatcaatagcaggcataacgctccagttatgtcttgatcaagcacttctgtttccccggactgagtatcaatagactgctcgcgcggttgaaggagaaaacgttcgttatccggctaactacttcggaaaacctagtaacaccatgaaagttgcggagagcttcgttcagcactcccccagtgtagatcaggtcgatgagtcaccgcattccccacgggcgaccgtggcggtggctgcgttggcggcctgcccatggggtaacccatggggcgctctaatacggacatggtgtgaagagtctactgagctagttagtagtcctccggcccctgaatgcggctaatcccaactgcggagcacacgcccacaagccagcgggtagtgtgtcgtaacgggtaactctgcagcggaaccgactactttgggtgtccgtgtttccttttatctttatattggctgcttatggtgacaattaaagaattgttaccatatagctattggattggccatccggtgtgtaatagagcaattatttacctatttattggttttgtaccattaaccttgaattctgtgaccacccttaattatattttgacccttaacacagctaaac

SEQ ID NO: 1122 - DNA, 746 bp, Enterovirus A
  source 1..746: mol_type = genomic DNA
ttaaaacagcctgtgggttgttcccacccacagggcccactgggcgctagcacactgattctacggaaactttgtgcgcctgttttatgtccctccccctaatatgtaacttagaaatttagtacacccatgaccaatagtaggcgtgacgcaccagtcacgtcttggtcaagcacttttgtttccccgggctgagtatcaatagactgcttacgcggttgaaggagaaaacgttcgttacccggctaactacttcgagaaacctagtaacaccatgaaagttgcagggtgtttcgctcagcacttcccccgtgtagatcaggtcgatgagtcactgcaaaccccacgggcgaccgtggcagtggctgcgttggcggcctgcccatggggtaacccatgggacgctctgatactgacatggtgcgaagagtctattgagctagttagtagtcctccggcccctgaatgcggctaatcctaactgcggagcacacaccctcaacccagggggcggtgtgtcgtaacgggcaactctgcagcggaaccgactactttgggtgtccgtgtttccttttatctctattatggctgcttatggtgacaattgaagaattgttaccatatagctattggattggccatccggtgtttaacagagcaattgtatacctatttgttggatttgtccctttgtcacacacatctctcaataccttatactacattataaagttgaatacaggaac

SEQ ID NO: 1123 - DNA, 746 bp, Enterovirus A
  source 1..746: mol_type = genomic DNA
ttaaaacagcccgtgggttgtacccactcacggggtccactggacgctagcactctggttccacggaacctttgtgcgcctgttttatacccctccccaacttgtaacgtagaagcagtacctaatatcgatcaatagtaggtgtggcgcaccagccatatcttgatcaagcacttctgtctccccggaccgagtatcaatagactgctcacgcggttgaaggagaaagcgttcgttacccggctaactacttcgagaaacctagtagcaccatggaagctgcggagtgtttcgctcagcacttcccccgtgtagatcaggtcgatgagtcactgcaatcctcacgggtgaccgtggcagtggctgcgttggcggcctgcctgtggggcaacccacaggacgctctaatgtggacatggtgcgaagagtctattgagctagttagtagtcctccggcccctgaatgcggctaatcctaactgcggagcgcatgccctcaatccagagggtagtgcgtcgtaacgggcaactctgcagcggaaccgactactttgggtgtccgtgtttccttttactcttatattggctgcttatggtgacaattacggaattgttaccatatagctattggattggccatccggtgtgcaatagagctatcatttacctatttgttggatttgtaccactgtcattaaagtccataaccacactcaattatatactcactctcaatataactaaac

SEQ ID NO: 1124 - DNA, 746 bp, Enterovirus A
  source 1..746: mol_type = genomic DNA
ttaaaacagctgtgggttgttcccactcacagggcccactgggcgctagcactctgattttacgaaatccttgtgcgcctgttttatatcccttccctaattcgaaacgtagaagcaatgcgcaccactgatcaatagtaggcgtaacgcgccagttacgtcatgatcaagcatatctgttcccccggactgagtatcaatagactgcttacgcggttgaaggagaaaacgttcgttatccggctaactacttcgagaagcccagtaacaccatggaagctgcagggtgtttcgctcagcacttcccccgtgtagatcaggtcgatgagccactgcaatccccacaggtgattgtggcagtggctgcgttggcggcctgcctatggggagacccataggacgctctaatgtggacatggtgcgaagagcctattgagctagttagtagtcctccggcccctgaatgcggctaatcctaactgcggagcacatgccttcaacccagagggtagtgtgtcgtaatgggcaactctgcagcggaaccgactactttgggtgtccgtgtttctttttattcttatattggctgcttatggtgacaattacagaattgttaccatatagctattggattggccatccggtgtgtaatagagctgttatatacctatttgttggctttgtaccactaactttaaaatctataactaccctcaactttatattaaccctcaatacagttgaac

SEQ ID NO: 1125 - DNA, 746 bp, Enterovirus A
  source 1..746: mol_type = genomic DNA
ttaaaacagcctgtgggttgttcccacccacagggcccattgggcgctagcacactgactttgcggagtctttgtgcgcctgttttataacccttcccccaagtagcaacttagaagtattgcacaaccgcggccagtagtgggcgtgacgcgccagtcacgtcttggtcaagcacttctgtatccccggactgagtatcaatagactgctcgcgcggttgaaggagaaaacgttcgttatccggctaactacttcgggaaacctagtagcaccttggaagttgcagagtgtttcgctcagcactttccccgtgtagatcaggtcgatgagccactgtaaaccccacgggcgaccgtgacagtggctgcgttggcggcctgcccatggggtaacccatgggacgctctaatacagacatggtgtgaagagtctactgagctagttagtagtcctccggcccctgaatgcggctaatcctaactgcggagcacacaccctcaatccagggggcggtgtgtcgtaatgggtaactctgcagcggaaccgactactttgggtgtccgtgtttccttttattcctttactggctgcttatggtgacaattgaaaagttgttaccatatagctattggattggccatccggtgtctaacagagctattgtctacttgtttattggatacgtccctcttaatctcaaggtcattcgaactcttgattatatattgctccttaattataggaa

SEQ ID NO: 1126 - DNA, 746 bp, Enterovirus A
  source 1..746: mol_type = genomic DNA
tttaaaacagcctgtgggttgcacccacccacagggcccactgggcgccagcactctgattccgcggaatctttgtgtgcctgttttatcacccttcccccaaacttgcaacttagaagcagcacttcactgaccaatagcaggcgtggcgcaccagccatgtctaggtcaagcacttctgtttccccggactgagtatcaataggctgctcacgcggctgaaggagaaaacgttcgtcatccggctaactacttcgagaaacctagtagcaccggtgaagctgcagagtgtttcgctcagcacttcccccgtgtagatcaggtcgatgagtcactgcactccccacgggcgaccgtggcagtggctgcgctggcggcctgcctatgggtcaacccataggacgctctaatgtggacacggtgcgaagagtctattgagctagttagtagtcctccggcccctgaatgcggctaatcctaactgcggagcacatgcccccgaaccagggggtggtgtgtcgtaacgggcaactctgcagcggaaccgactactttgggtgaccgtgtttccttttgttcttattatggctgcttatggtgacaattgaagaattgttaccatatagctattggattggccatccagtgtctaacagagctatcatatacctatttgttggattcgttctattgtcatacacatcactcaatacattacattttattgtgagattaaatacaagaaa

SEQ ID NO: 1127 - DNA, 746 bp, Enterovirus A
  source 1..746: mol_type = genomic DNA
tttaaaacagcctgtgggttgtacccacccatagggcccactgggcgccagcactctgattctgcggaatctttgtgcgcctgttttatcaccctctccctaaattcgtaacttagaagcaacactctactgaccaatagcgggcgtggcgcaccagccatgtctaggtcaagcacttctgtctccccggactgagtatcaataggctgctcacgcggctgaaggagaaaacgttcgtcatccggctaactacttcgagaagcctagtagcaccgttgaaactgcagagtgtttcgctcagcactttccccgtgtagatcaggtcgatgagtcactgcactccccacgggcgaccgtggcagtggctgcgttggcggcctgcctatgggtcaacccataggacgctctaatgtagacacggtgcgaagagtctatcgagctagttagtagtcctccggcccctgaatgcggctaatcctaactgcggagcacatgcccccgagccagagggtggtgtgtcgtaacgggtaactctgcagcggaaccgactactttgggtgtccgtgtttccttttattcttgatatggctgcttatggtgacaattgaagaattgttaccatatagctattggattggccatccggtgtctaacagagctattgtatacctgtttgttggatttgttccattatcacaaacatcactcaacacactacacttcattgtgagattgaacgcaagaaa

SEQ ID NO: 1128 - DNA, 746 bp, Enterovirus A
  source 1..746: mol_type = genomic DNA
ttaaaacagctctggggttgtacccacccgcagggcccactgggcgctagcacactgattctacggaacctttgtgcgcctgttttatatccctcccccgaaacagcaacttagaagttgaacatttacacgaccaatagtgggcatggcgcgccagccatgtcttggtcaagcactcctgtttccccggactgagtatcaataggctgctcacgtggctgaaggagaaagagttcgttacccggctaactacttcgagaaacttagtaacaccatgaatgttgcagagtgtttcgctcagcacttcccccgtgtagatcaggctgatgagccactgcaaaccccacgggcgaccgtggcagtggctgcgttggcggcctgcctatggggcaacccataggacgctctaatacagacatggtgcgaagagtctattgagctagttagtattcctccggcccctgaatgcggctaatcccaactgcggagcacatgccctcaatccagagggtggtgtgtcgtaacgggcaactctgcagcggaaccgactactttgggtgtccgtgtttccttttattcttatattggctgcttatggtgacaattgaaagattgttaccatatagctattggattggccacccggtgactaacagagctttaatttaccaattcactgggtttgtacctttatcacctacagtttatcagactttggtgtatctgttatatctcaacagtaagaa

SEQ ID NO: 1129 - DNA, 746 bp, unidentified
  source 1..746: mol_type = unassigned DNA; note = unclassified Enterovirus sequence
ttaaaacagctctggggttgttcccaccccagaggcccacgtggcggccagtacaccggtaccacggtacccttgtacgcctgttttatactcccctccccgtaaactagaagcacgaaacacaagttcaatagaagggggtacagaccagtaccaccacgaacaagcacttctgttcccccggtgaggtcacatagactgtccccacggtcaaaagtgactgatccgttatccgctcacgtacttcggaaagcctagtaccaccttggaatctacgatgcgttgcgctcagcactcgaccccggagtgtagcttaggctgatgagtctggacgttccccactggtgacagtggtccaggctgcgttggcggcctacctgtggtccaaaaccacaggacgctagtagtgaacaaggtgtgaagagcccactgagctacctgagaatcctccggcccctgaatgcggctaatcccaaccacggagcaggtaatcgcaaaccagcggtcagcctgtcgtaacgcgtaagtctgtggcggaaccgactactttgggtgtccgtgtttccttttatttttatggtggctgcttatggtgacaatcatagattgttatcataaagcaaattggattggccatccggagtgagctaaactatctatttctctgagtgttggattcgtttcacccacattctgaacaatcagcctcattagtgttaccctgttaataagacgatatcatcacg

SEQ ID NO: 1130 - DNA, 746 bp, Enterovirus C
  source 1..746: mol_type = genomic DNA
ttaaaacagctctggggttgttcccaccccagaggcccacgtggcggccagtactccggtatcacggtacccttgtacgcctgttttatacccccttccccgcaacttagaagctttaaattcaagttcaatagaaggtggtacaaaccagtatcgccacgaacaagcacttctgttgccccggtgaaattgcataagctgtccccacggctgaaggcgattgatccgttacccgctcttgtacttcgagaagcctagtaccaccttggaattttcgatgcgttgcgctcagcactcaaccccagagtgtagcttaggctgatgagtctggacataccccaccggcgacggtggtccaggctgcgttggcggcctacctgtggcccaaagccacaggacgctagttatgaacaaggtgtgaagagcctattgagctacaagagagtcctccggcccctgaatgcggctaatcctaaccacggatcaggcgattgcaacccagcaattagcctgtcgtaatgcgcaagtctgtggcggaaccgactactttgggtgtccgtgtttctttttattcttacattggctgcttatggtgacaatcttagattgttatcataaagcaagttggattggccatccggtgaaagtcaaagttactatctatttatctgttggattttaccctaagaccactcatttacctgacttaattagaataattatactacttggaaattactatcaca

SEQ ID NO: 1131 - DNA, 746 bp, Enterovirus C
  source 1..746: mol_type = genomic DNA
ttaaaacagctctggggttgttcccaccccagaggcccacgtggcggctagtacaccggtatcacggtacccttgtacgcctgttttatattcccttccccgtaacttagaagcaataaactcaagttcaatagaagggggtgcaaaccagcaccaccacgaacaagcacttctgtttccccggtgagattgcatagactgtccccacggttgaaagcgattgatccgttaaccgctcttgtacttcgagaagcctagtaccatcctggaatctacgatgcgttgcgctcagcactcaatcccagagtgtagcttaggtcgatgagtctggatactccccaccggcgacggtgatccaggctgcgttggcggcctacctgtggtccaaagccacaggacgctagtagtgaacagggtgtgaagagcctattgagctacatgagagtcctccggcccctgaatgcggctaatcccaaccacggagcaggtggctacaacccagtaactggcctgtcgtaacgcgcaagtctgtggcggaaccgactactttgggtgtccgtgtttccttttatttttataatggctgcttatggtgacaatcattgattgttatcataaagcgacttggattggccatccagcgagaatcagatcgattatttatttgtttgttggattcaccaccttatctacatacacaccaaacttaattagaatcactttattgattaggtatcattatcacg

SEQ ID NO: 1132 - DNA, 746 bp, Enterovirus C
  source 1..746: mol_type = genomic DNA
ttaaaacagctgtggggttgttcccaccccagaggcccacgtggcggctagtactccggtatcacggtacccttgtacgcctgttttatactccctcccccgtaacttagaagcaatcaaatcaagttcaataggagggggtacaaaccagtaccaccacgaacgagcacttctgtttccccggtgaagttgcatagactgttaccacggttgaaagcgaccgatccgttatccgctcatgtacttcgagaagcctagtacctccttggaatcttcgatgcgttgcgctcagcactcaaccccggagtgtagcttaggctgatgagtctggacagccctcaccggcgacggtggtccaggctgcgttggcggcctacctgtggcccaaagccacaggacgctagttgtgaacaaggtgtgaagagcctattgagctacatgagagtcctccggcccctgaatgcggctaatcctaaccacggagcaggcgatcgcaaaccagcaattagcctgtcgtaacgcgaaagtctgtggcggaaccgactactttgggtgaccgtgtttctcttatttttattcatggctgcttatggtgacaatcatagattgttatcataaagcgagttggattggccatccggtaaaagtcaagtatatcatttacttgtttgtaggatttattcctttgaacgtccatttactcaatcttatcagagtcacattactagtaagatctcactatcaca

SEQ ID NO: 1133 - DNA, 746 bp, Enterovirus C
  source 1..746: mol_type = genomic DNA
ttaaaacagcctgtgggttgttcccaccccagaggcccacgtggcggctagtactctggtatcacggtacctttgtacgcctgttttatatcccttcccccgtaacttagaagctttgtaccaacaagttcaatagaaggggtacaaaccagtaccaccacgaacaagcacttctgtttccccggtgcgatgacatagactgtacccacggtcaaaagtcaccaatccgttacccgctttggtacttcgagacgcctagtattgccttggaattctcgatgcgttgcgctcaacactcgaccctggagtgtagcttaggctgatgagtctgggcattccccaccggtgacggtggcccaggctgcgttggcggcctacccatagctattgctatgggatgctagagttgaacaaggtgtgaagagccaattgagctactaaagagtcctccggcccctgaatgcggctaatcccaaccacggatcaagtgcgtgcaacccagcacgtagcttgtcgtaatgcgcaagtctgtggcggaaccgactactttgggtgtccgtgtttccttttatttttatcgtggctgcttatggtgacaatcatagattgttatcataaagcgaattggattggccatccagtgagaatcaagtcgctgatatatttatttgttggatttaccaaaatcaaccacagaacaccagttttaattcgtattgtgttactaattagatttcactactaca

SEQ ID NO: 1134 - DNA, 746 bp, Enterovirus C
  source 1..746: mol_type = genomic DNA
ttaaaacagcctgtgggttgttcccaccccagaggcccacgtggcggctagtactccggtattacggtacccttgtacgcctgttttatacccccttcccccgcaacttagattcaaacaaacacaagttcaataggagggggtacaaaccagtaccaccacgaacaagcacttctgtttccccggtgaggttgtatagactgttaccacggttgaaagcgactgatccgttatccgccttagtacttcgagaagcctagtatcaccttggaatctccgatgcgttgcgctcagcaatgtacccccattgtagcttaggccgatgagtctgggcattccccaccggcgacggtggcccaggctgcgttggcggcctacctatggtgaaaaccataggacgctagttgtgaacaaggtgcgaagagcctattgagctactaaggagtcctccggcccctgaatgcggctaatcccaaccacggagcaggtagttgcaaaccagcaaccagcctgtcgtaatgcgcaagtctgtggcggaaccgactactttgggtgtccgtgtttccttttattcttataatggctgcttatggtgacaatcatagattgttatcataaagcgaattggattggccatccggtgagaatcagatcgatcatttacctgtttgtcggatttaccccattggcatcgcacacgagtgacctaatcagaatagtgttgttgataaggtactactatcaca

SEQ ID NO: 1135 - DNA, 746 bp, Enterovirus C
  source 1..746: mol_type = genomic DNA
ttaaaacagctctggggttgttcccaccccagaggcccacgtggcggccagtactctggtactacggtacctttgtacgcctgttttatactccctcccccatgcaacattagaagcaattcacaaagttcaatagagggggtacaaaccagtaccaccacgaacaagcacttctgtttccccggtgatctcgtataggccgtacccacggctgaaaacaagtgatccgttatccgcttaggtacttcgagaaacctagtatcaccttgggatcttcgacgcgttgcactcagcactctaccccgagtgtagcttaggctgatgagtctgggcattccccaccggtgacggtggcccaggctgcgttggcggcctacccatggctaacgccatgggacgctagttgtgaacaaggtgtgaagagcctattgagctacctaagagtcctccggcccctgaatgcggctaatcccaaccacggagcaagtgccttcaatccagagggtggcttgtcgtaacgcgcaagtctgtggcggaaccgactactttgggtgtccgtgtttccttttatttttattacggctgcttatggtgacaatcattgattgccatcataaagcgagttggattggccatccggtgaaagttaagtatctcgtccacttatctgttggacttactccattaactcaactcacgcctgatttgatatctatagtgttattgatttggaaaaagctatcata

SEQ ID NO: 1136 - DNA, 746 bp, Enterovirus C
  source 1..746: mol_type = genomic DNA
ttaaaacagctctggggttgttcccaccccagaggcccacgtggcggctagtactccggtatcacggtacccttgtacgcctgttttatactcccttccccgtaacttagaagtatacaaaccaagttcaatagaagggggtacaaaccagtaccaccacgaacaagcacttctgtttccccggtgaagttgcatagattgtccccacggtcgaaagcgactgatccgttatccgctcttgtacttcgggaagcctagtatcaccttcggatcttcgatgcgttgcgctcagcactcaaccccagagtgtagcttaggtcgatgagtctggacgaacctcactggtgacagtggtccaggctgcgttggcggcctacctgtggcccaaagccacaggacgctagttgtgaacaaggtgtgaagagcctactgagctacatgagagtcctccggcccctgaatgcggctaatcccaaccacggagcaggtggtcacaaaccagtggtttgcctgtcgtaacgcgaaagtctgtggcggaaccgactactttgggtgtccgtgtttccttttattcttattatggctgcttatggtgacaatcttagattgttatcataaagcgaattggattggccatccggggaaaattaagcatatcatacacttgtttgttggattcacccctctgattacacatactcttggcttgattaggattgttgcattgataagacactattgttgca

SEQ ID NO: 1137 - DNA, 746 bp, Enterovirus C
  source 1..746: mol_type = genomic DNA
ttaaaacagcctgtgggttgttcccaccccagaggcccacgtggcggccagtactccggtatcacggtacccttgtacgcctgttttatactcccttccccagtaatttagaagcaattaaaccaagttcaatagaagggggtacaaaccagtaccaccacgaacaagcactcctgtttccccggtgacgttgtatatactgtacccacggtagaaagcgaccgatccgttatccgctcttgtacttcgagaagcccagtaccatcttggaatcttcgatgcgttgcgctcagcactcaaccccagagtgtagcttaggtcgatgagtctggacaatcctcaccggcgacggtggtccaggctgcgttggcggcctacctgtggcccaaagccacaggacgctagttgtgaacaaggtgcgaagagcctattgagctacaagagagtcctccggcccctgaatgcggctaatcccaaccacggagctggtgaccacaaaccagtggttaacctgtcgtaatgcgcaagtctgtggcggaaccgactactttgggtgtccgtgtttcctttatttttattatggctgcttatggtgacaatcatagattgttatcataaagcgacttggattggccatccagtgaaagcaaaacaatttatctacttgtttgttgaattcactctattgaccacccacttactaagtcttattaaaattctcttgttgattagattaacacaccaca

SEQ ID NO: 1138 - DNA, 746 bp, Enterovirus C
  source 1..746: mol_type = genomic DNA
ttaaaacagctctggggttgttcccaccccagaggcccacgtggcggctagtactccggtatcacggtacccttgtacgcctgttttatactcccttcccccgtaacttagaagaaataaaccaagttcaatagaagggggtacaaaccagtaccaccacgaacaagcacttctgtttccccggtgaagttgtataaactgtatccacggttgaaggcgactgatccgttatccgcttttgtacttcgagaagcctagtatcatcttggaatcttcgatgcgttgcgctcagcactcaaccccagagtgtagcttgggctgatgagtctggacacccctcaccggtgacggtggtccaggctgcgttggcggcctacctgtggcccaaagccacaggacgctagttgtgaacaaggtgtgaagagcctattgagctacgaaagagtcctccggcccctgaatgcggctaatcctaaccacggagcaagggtgcgcaaaccagtgcatgccttgtcgtaacgcgcaagtctgtggcggaaccgactactttgggtgtccgtgtttccttttattcttataatggctgcttatggtgacaatcatagattgttatcataaagcgaattggattggccatccggcgaaagtgaaatacattgtttatctttttgttggattcactccaaacacttccccttcttttaaactcatcactacggtcttgttgatcagagactcatatcaca

SEQ ID NO: 1139 - DNA, 746 bp, Enterovirus C
  source 1..746: mol_type = genomic DNA
ttaaaacagctctggggttgttcccaacccagaggcccacgtggcggctagtactctggtatcatggtacccttgtacgcctgttttatactcccttaccccgtaacttagaagcaataaaccaagttcaatagaagggggtacaaaccagtaccaccgcgaacaagcacttctgttgccccggtgaagttgcatagactgtgcccacggttaaaagcgactgatccgttatccgctcttgtacttcgagaaacctagtatcatcttggaatcttcgatgcgttgcgctcaacactcgaccccagagtgtagcttaggtcgatgagtctggacactcctcactggtgacagtggtccaggctgcgttggcggcctacctgtggcccaaagccacaggacgctagtagtgaacaaggtgtgaagagtctattgagctacaagtgagtcctccggcccctgaatgcggctaatcccaaccacggagcaagtgctcacactccagtgagtagcttgtcgtaacgggtaactctgtggcggaaccgactactttgggtgtccgtgtttccttttattcttataatggctgcttatggtgacaatcatagattgttatcataaagcgaattggattggccatccggtgaaagtgaaatactttgcttaactttttgttggattcactccagtcactttcctttcttttaaactcatcaccacagtcttgttgttcagagactcatatcaca

SEQ ID NO: 1140 - DNA, 746 bp, Enterovirus C
  source 1..746: mol_type = genomic DNA
ttaaaacagctctggggttgttcccaccccagaggcccacgtggcggccagtactctggtattacggtacctttgtacgcctgttttatactccctccctcgtaacttagaagaaacaaatcaagttcaacaggagggggtacaaaccagtaccaccacgaacaagcacttctgtctccccggtgacgttgcatagactgtacccacggtcgaaagcgattgatccgttatccgctcttgtacttcgagaagcctagtatcatcttggaatcttcgatgcgttgcgctcagcactcaaccccagagtgtagcttaggtcgatgagtctggacgttccccaccggcgacggtggtccaggctgcgttggcggcctacctgtggcccaaagccacaggacgctagttgtgaacaaggtgtgaagagcctattgagctacaggagagtcctccggcccctgaatgcggctaatcccaaccacggagcaggggtgcataaaccaatgcataccttgtcgtaacgcgcaagtctgtggcggaaccgactactttgggtgtccgtgtttccttttattttttcattggctgcttatggtgacaatcatagattgttatcataaagcgacttggattggccatccggtgagagtgaaatacattgtttacttgttcattggatttactccactcaactctttcgcttacaaactcattacaacaactctgttgattgaaacaacaatactaca

SEQ ID NO: 1141 - DNA, 746 bp, Enterovirus C
  source 1..746: mol_type = genomic DNA
ttaaaacagctctggggttgttcccaccccagaggcccacgtggcggctagtacactggtatcacggtacccttgtacgcctgttttatactcccttccccgtaacttagaagtatacaagccaagttcaatagaagggggtacaaaccagtaccaccacgaacaagcacttctgtttccccggtgaagttgcatagattgttcccacggtcgaaagcgactgatccgttacccgctcatgtacttcgggaagcctagtatcacttcggactcttcgatgcgttgcgctcagcactcaaccccagagtgtagcttaggtcgatgagtctggacaaacctcactggcgacagtggtccaggctgcgttggcggcctacctgtggcccaaagccacaggacgctagttgtgaacaaggtgtgaagagcctactgagctacatgagagtcctccggcccctgaatgcggctaatctcaaccacggagcaggtagtcacaaaccagtgatttgcctgtcgtaacgcgaaagtctgtggcggaaccgactactttgggtgtccgtgtttccttttattctcattatggctgcttatggtgacaatcctagattgttatcataaagtgagctggattggccatccggtgaaaatcaagcacattatatatttgtttgttgggtttaaccctctgattgcacgcactcttggcttggttaggattattgtgtggaaaaggcaccatagttaca

SEQ ID NO: 1142 - DNA, 746 bp, Enterovirus B
  source 1..746: mol_type = genomic DNA
ttaaaacagcctgtgggttgctcccacccacagggcccactgggcgtcagcacactggtatcaaggtacctttgtgcgcctgttttacaaaccctccccccccttgtaacaaacttagaagcaatgcacaccgatcaatagcgggcgcggcacgccagctgcgtcttgatcaagcacttctgtctccccggaccgagtatcaatagactgcttgcgtggttgaaggagaaagcgtccgttacccgaccaactacttcgagaagcccagtagcgccatggaagctgcgaagcgtttcgctcagcacacccccagtgtagatcaggtcgatgagtcaccgcattccccacgggcgaccgtggcggtggctgcgttggcggcctgcctacggggtaacccgtaggacgcttcaatgtagacatggtgcgaagagtcgattgagctagttggtaatcctccggcccctgaatgcggctaatcctaactgcggagcacgtgccttcaacccagagggtggcgtgtcgtaacgggcaactctgcagcggaaccgactactttgggtgtccgtgtttctttttattttgtactggctgcttatggtgacaattgaaggattgttaccatatagctattggattggccatccggtgcctaacagagcaattatttacctctttgttgggttcgtaccattcaataaggctaattaccaaatcttgtgttacatcctcagattgaacacatcgaa

SEQ ID NO: 1143 - DNA, 747 bp, Cosavirus D
  source 1..747: mol_type = genomic DNA
tggcagtccttgaaacgtgtggtgcgacgtctaaccattatggcagtgggtggagtactgcaaagatgtcaccgtgctttacacggtttttgaaccccacaccggctgtttggcgcttgcaggacagtaggtatattttctttcatttctcttttctagccgcgtaggttctatctacgcgggcggagtgatactcccgctccttcttggacaggcggcctccacgctctttgtggatcttaaggctgccaagtcactggtgtttgaagtgaagaatggagagacactagggcgtttcatgtggctttgccagggattgtagcgatgctgtgtgtgtgtgcggatttcccctcgtggcgacacgagcctcacaggccaaaagccctgtccgaaaggacccacacagtggggttgccccgacccctcccttcaaagctttgtgtaaacaaacttttgtttagactttcttaagcttctctcacatcaggccccaaagatgtcctgaaggtaccctgtgtatctgaggatgagcaccaccaactacccggacttgtgggacgtgtcccacagacgcatgtggtattccagccccctccttttgaggagggggcttttgctcgctcagcacaggatctgatcaggagattcatctctggtgctttacaccagagcatggatttaaaaattgcccaaggcctggcaaacaacctaggggactaggttttctctattttaaaagatgtcaat

SEQ ID NO: 1144 - DNA, 747 bp, Enterovirus A
  source 1..747: mol_type = genomic DNA
ttaaaacagcctgtgggttgcacccactcacaggacccacgtggtgctagcactctggttccacggaacctttgtgcgcctgttttacgtcccctccccaatttgtaacttagaagcaatttacaacactgatcaatagcaggcatggcgcaccagctatgtcttgatcaagcacttccgtttccccggaccgagtatcaatagactgttcacacggttgaaggagaaagcgtccgttatccggctaactacttcgagaaacccagtagcgccattgaaactgcagagtgtttcgctccacacttcccccgtgtagatcaggtcgatgagtcactgtaatccccacgggcgaccgtgacagtggctgcgttggcggcctgcctatggggcaacccataggacgctctaatgtggacatggtgcgaagagtctattgagctagttagtagtcctccggcccctgaatgcggctaatcctaactgcggagcacatgccttcaatccagagggtagtgtgtcgtaatgggcaactctgcagcggaaccgactactttgggtgtccgtgtttccttttattctcacattggctgcttatggtgacaattacagaattgttaccatatagctattggattggccatccggtgtgcaatagagctattatatacctatttgttggctttgtaccactaaccttaaaatctgcaaccactctcgagtatatattgacccttaatacaatcaaac

SEQ ID NO: 1145 - DNA, 747 bp, Enterovirus A
  source 1..747: mol_type = genomic DNA
tttaaaacagcctgtgggttgtacccacccacagggcccactgggcgctagcactccgattctgcggaatctttgtgcgcctgttttataaccctcccccgaaacttgcaacttagaagttatgtacgttactgatcaacagcaggcgtggcacaccagccatgtcttgatcaagcacttctgtacccccggactgagtatcaatagactgctcacgtggtcgaaggagaaaacgttcgttatccggctaactacctcgagaaacctagtaacgccattgaaactgcggagtgtttcgctcagcacttcccccgtgtagatcaggtcgatgagtcactgcttaccccacgggcgaccgtggcagtggctgcgttggcggcctgcctatggggcaacccataggacgctctaaagtggacatggtgcgaagagtctattgagctagttagtagtcctccggcccctgaatgcggctaatcctaactgcggagcgcatgccttcaaaccagaaggtggtgcgtcgtaacgggtaactctgcagcggaaccgactactttgggtgtccgtgtttctcttattctcataatggctgcttatggtgacaatcgaggaattgttaccatatagctattggattggccatccggtgtgcaacagagctattatctacttgtttattggatacattccattaacacttaaatccttcaatacattgcactatattctaacactgaacgcaagaaa

SEQ ID NO: 1146 - DNA, 747 bp, Enterovirus A
  source 1..747: mol_type = genomic DNA
tttaaaacagcctgtgggttgtacccacccacagggcccactgggcgccagcactctgattctacggaatctttgtgcgcctgttttacaacccttcccaaaatctgcaacttagaagttatgcacattattgatcaatagcaggcgtggcacaccagtcatgtcttgatcgagcacttctgtatccccggactgagtatcaatagactgctcacgtggtcgaaggagaaaacgttcgttatccggctaactacttcgagaagcctagtaacaccgttgaaactgcggagcgtttcgttcagcacttcccccgtgtagatcaggtcgatgagtcactgcttaccccacgggcgaccgtggcagtggctgcgttggcggcctgcctatggggcaacccataggacgctctaaagtggacatggtgcgaagagcctattgagctagttagtagtcctccggcccctgaatgcggctaatcctaactgcggagcgcatgccctcacgccagagggtggtgcgtcgtaacgggcaactctgcagcggaaccgactactttgggtgtccgtgtttctttttattctcattatggctgcttatggtgacaattaaggaattgttaccatatagctattggattggccatccggtgtgcaacagagctattatctacttatttgttggatacattccattaacacttaaatcccttaacacattgcaatacattctaacactgaacgcaagaaa

SEQ ID NO: 1147 - DNA, 747 bp, Enterovirus A
  source 1..747: mol_type = genomic DNA
ttaaaacagcctgtgggttgtacccacccacagggcccaccgggcgctagcactctgattccacggaatctttgtgcgcctgttttataacccccctccccacctcgcaacttagaagcaacgcgcatcactgatcaacagcaggcatggcgcgccagccatgtcttgatcaagcacttctgtttccccggactgagtatcaatagactgcttacgcggttgaaggagaaaacgttcgttacccggctaactacttcgagaaacttagtaacaccatcgaagctgcagggtgtttcgctcagcacttcccccgtgtagatcaggccgatgagtcaccgcaatccccacgggcgaccgtggcggtggctgcgttggcggcctgcctatggggcaacccataggacgccctaaagtggacatggtgcgaagagtctattgagctagttagtagtcctccggcccctgaatgcggctaatcctaactgcggagcacataccctcaagccagagggtggtgtgtcgtaacgggtaactctgcagcggaaccgactactttgggtgtccgtgtttccttttattcttactgtggctgcttatggtgacaattcaagagttgttaccatatagctattggattggccatccggtgtctaacagagctattgtgtacttatttgttgggtacgttccattatcttacacatcccttgacacattacattttattgtgaagctaaatacaagaag

SEQ ID NO: 1148 - DNA, 747 bp, Enterovirus A
  source 1..747: mol_type = genomic DNA
tttaaaacagcctgtgggttgtacccacccacagggcccactgggcgctagcactctggtactgcggtacctttgtgcgcctgttttatctccccagacccccgcaacgtcacattagaagatagacaatacgaccaatagtcagtggggcaacccagcctcactttggtcaagtacctctgtttccccgggcttagtaccaataggctgcttgcgcggctgaaggggaacgcgcccgttatccggctaactacttcgagaaacctagtaccaccatggaagttgccgagtgtttcgctcagcacaaccccagtgtagatcaggtcgatgagtcaccgtacaccccacgggcgaccgtgacggtggctgcgttggcggcctgcccatggtgcacaccatgggacgctctaatacagacatggtgcgaagagtctattgagctagttagtagtcctccggcccctgaatgcggctaatcctaactgtggagcatgcgctctcaacccagagagtagcgtgtcgtaacgggcaactctgcagcggaaccgactactttgggtgtccgtgtttccttttattcttatattggctgcttatggtgacaattgagagattgttaccatatagctattggattggccatccggtgtgcaatagagctattgtatattcttttgttggctttgtgccattagattatactgcaattgctactttaagatacatcttgtttctgaacacagcaaa

SEQ ID NO: 1149 - DNA, 747 bp, Enterovirus A
  source 1..747: mol_type = genomic DNA
tttaaaacagcctgtgggttgtacccacccacagggcccactgggcgctagcacactggtattacggtacccttgtgcgcctgttttatcctccctggcccccgtaataatgtattagaagtcttgcaacgtgaccaatagctagtaaagcaacccagctttacttgggtcaagtacttctgttaccccggacctagtaccaataggctgctcgcgcggctgaaggggaaaacgttcgttatccggctaactacttcgggaaacccagtaccatcatgaatgttgcggagtgtttcgctcagcactaccccagtgtagatcaggccgatgagtcaccgtacaccccacgggcgaccgtgacggtggctgcgttggcggcctgcccatggcacctgccatgggacgctctaatacggacatggtgtgaagagtctactgagctagttagtagtcctccggcccctgaatgcggctaatcctaactgcggagcacgcgcccccaatccagagggtagcgtgtcgtaatgggcaactctgcagcggaaccgactactttgggtgtccgtgtttccttttattcttacactggctgcttatggtgacaattgagagattgttgccatatagctattggattggccatccggtgagcaatagagcgattatctattcttttgttggatttgtgccattagattacactgccatcatcacactgaagtacattttattgttaaacacaacaaa

SEQ ID NO: 1150 - DNA, 747 bp, Enterovirus A
  source 1..747: mol_type = genomic DNA
ttttaaaacaggctgtgggttgtacccacccgcagggcccactgggcgctagcactctggtaccacggtacctttgtgcgcctgttttatctccccaaaccccgtaacgctacattagaagttaaacaatatgaccgatagtcagtggggcaacccagcctcactttggtcaagcacttctgttctcccgggcttagtaccaataagctgctcgcgcggctgaaggggaacgcgcccgttatccggctaactacttcgagaaacctagtaccaccatggaagttgcagagtgtttcgctcagcactaccccagtgtagatcaggctgatgagtcaccgtgcaccccacgggcgaccgtgacggtgactgcgttggcggcctgcccatggtgtataccatgggacgctctaatacagacatggtgcgaagagtctattgagctagttagtagtcctccggcccctgaatgcggctaatcctaactgcggagcacgcgctctcaacccagagagtagcgtgtcgtaacgggtaactctgcagcggaaccgactactttgggtgtccgtgtttctttttattcttacattggctgcttatggtgacaattgagagattgttaccatatagctattggattggccatccggtgtgtaacagagctatcatatattcttttgttggcttcgtgccactagattatactgcaattgttactttaaggtacatcttacttctgaatacggtaaa

SEQ ID NO: 1151 - DNA, 747 bp, unidentified
  source 1..747: mol_type = unassigned DNA; note = unclassified Enterovirus sequence
tttaaaacagcctgtgggttgtacccacccacagggcccactgggcgttagcacactgattctacggaatctttgtgcgcctgttttatatccctcccctaaaatagtaatttagacgttgaacatttacacgaccaatagtgggcgtggcgcaccagtcacgtcttggtcaagcactcctgttcccccggaccgagtatcaataggctgctcacgtggctgaaggagaaagtgttcgttatccggctaactacttcgggaaacccagtaacaccatgaaagttgcagagtgtttcgttcagcacttcccccgtgtagatcaggctgatgagtcactgcaaaccccacgggcgaccgtggcagtggctgcgttggcggcctgcctatggggtaacccataggacgctctaatacagacatggtgcgaagagtctactgagctagttagtattcctccggcccctgaatgcggctaatcctaactgcggagcacatgccctcaatccagagggtggtgtgtcgtaatgggcaactctgcagcggaaccgactactttgggtgtccgtgtttccttttattcttatactggctgcttatggtgacaattgaaaagttgttaccatatagctattggattggccatccggtgaataacagagctttggtttatcagttcattgggttcgtgcccttatcatctacagcttacacaactttggtgtacttgttatatcttaatagtaagaa

SEQ ID NO: 1152 - DNA, 747 bp, Enterovirus A
  source 1..747: mol_type = genomic DNA
ttaaaacagcctgtgggttgttcccactcacagggcccactgggcgctagcacactgattctccggtacctttgtgtgcttgttttagtatccctcccccaaactcgtaacttagaagaataacacgctatcgatcaatagcaggcatggcgcaccagccatgtctcgatcaagcacttctgtttccccggacagagtatcaatagactactcacgtggttgaaggagaaaacgtccgttatccggctaactacttcgagaaacctagtaacaccattgaagctgcagagcgtttcgttcagcacttaccccgtgtagatcaggtcgatgagtcactgcattccccacgggcgaccgtggcagtggctgcgttggcggcctgcctatggggtcacccataggacgctctaatgtggacatggtgcgaagagtctattgagctagttagtagtcctccggcccctgaatgcggctaatcctaactgcggagcgcataccctcaaaccagggggtagtgcgtcgtaacgggcaactctgcagcggaaccgactactttgggtgtccgtgtttccttttattttcttactggctgcttatggtgacaattgaagaattgttgccatatagctattggattggccatccggtgtgtaacagagcaatcatctatttgtttgccgggtacatcccattaacgctcaactcttttagtacattacagtatatactaatcctgaatacaagaaa

SEQ ID NO: 1153 - DNA, 747 bp, Enterovirus A
  source 1..747: mol_type = genomic DNA
ttaaaacagcctgtgggttgttcccacccacagggcccactgggcgctagcactctggttctccggaacctttgtgcgcctgttttgaaaccccctcccccaactcgaaacgtagaagtaatgtacactactgatcagtagcaggcgtggcgcaccagccatgtctcgatcaagcacttctgtttccccggactgagtatcaatagactgctcacgcggttgaaggtgaaaacgtccgttacccggctaactacttcgagaaacctagtagcaccatagaaactgcagagtgtttcgctcagcacttcccccgtgtagatcaggtcgatgagtcactgcaatccccacgggtgaccgtggcagtggctgcgttggcggcctgcctatggggcaacccataggacgctctaaggtggacatggtgtgaagagtctattgagctagttagtagtcctccggcccctgaatgcggctaatcctaactgtggagcgcatactcccaaaccagggagcagtgcgtcgtaacgggcaactccgcagcggaaccgactactttgggtgtccgtgtttccttttattcctatactggctgcttatggtgacaattgagagattgttaccatatagctattggattggccatccagtgtgtaatagagcaatcatttaccaatttgttggatttactccattaacccacacgtctctcaacacactacatttcatcttactactgaacactagaaa

SEQ ID NO: 1154 - DNA, 747 bp, Enterovirus C
  source 1..747: mol_type = genomic DNA
ttaaaacagctctggggttgttcccaccccagaggcccacgtggcggccagtacaccggtattacggtacccttgtacgcctgttttatactccctacccctgcaacttagaagcaaataatccaagttcaatagtagggggtacaaaccagtaccaccacgaacaagcacttctgtttccccggtgatgttgtatagactgtacccacggttgaaaacaattgatccgttacccgctcttgtacttcgagaagcctagtatcatcttggaaccttcgatgcgttgcgctcagcactcaaccccagagtgtagcttgggtcgatgagtctggacaatccacaccggcgacggtggtccaggctgcgttggcggcctacctgtggcccaaagccacaggacgctagttgtgaacaaggtgtgaagagcctattgagctacaagagagtcctccggcccctgaatgcggctaatcccaaccacggagcaggtgatcacaacccagtgattagcctgtcgtaatgcgtaagtctgtggcggaaccgactactttgggtgaccgtgtttccttttatttttattgtggctgcttatggtgacaatcttagattgttatcataaagcgatttggattggccatccggtgaaagttaaacacattatttacttgtttgttggattcactccgttgtcctctcgcactacgtatattattaacgctgtgctattaattaggtcaatacatcaca

SEQ ID NO: 1155 - DNA, 747 bp, Enterovirus C
  source 1..747: mol_type = genomic DNA
ttaaaacagcctgtgggttgttcccaccccagaggcccacgtggcggccagtacaccggtattacggtacccttgtacgcctgttttatacttccttcccccgtaacttagaagtttacaaaccaagttcaatagaagggggtacaaaccagtaccaccacgaacaagcacttctgtttccccggtgagtttgcatagactgtatccacggttgaaagtgaacgatccgttacccgctcttgtacttcgagaagcctagtaaccccttggaatcttcgatgcgttgcgctcagcactcaaacccagagtgtagcttaggtcgatgagtctggacactcctcaccggtgacggtggtccaggctgcgttggcggcctacctgtggtccaaagccacaggacgctagttgtgaacaaggtgtgaagagcctattgagctacttgagagtcctccggcccctgaatgcggctaatcctaaccatggatcaggtggtcacaatccagtgactggcctgtcgtaatgcgcaagtccgtggcggaaccgactactttgggtgtccgtgtttccttttattcttataatggctgcttatggtgacaatcatagattgttatcatatagcgaattggattggccatccggtgtgaacaaaacacttgattcacttgttggttgaatttgtttcattaattgaacacataccagagctcatttgattggcatttttgcttagacaattgtaccaca

SEQ ID NO: 1156 - DNA, 747 bp, Enterovirus C
  source 1..747: mol_type = genomic DNA
ttaaaacagctctggggttgttcccaccccagaggcccacgtggcggctagtacaccggtatcacggtacccttgtacgcctgttttatactcccttcccccagtaacttagaagtaataaaccaagttcaatagaagggggtacaaaccagtaccaccatgaacaagcacttctgttcccccggtgaggttgtatagactgtgcccacggttgaaagcgaccgatccgttatccgctcttgtacttcgagaagcctagtatcaccttggaatcttcgatgcattgcgttcagcacttgatcccggagtgtagcttaggccgatgagtctggacgttccccaccggtgacggtggtccaggctgcgttggcggcctacctgtggtccaaagccacaggacgctagttgtgaacaaggtgtgaagagcctattgagctacatgagagtcctccggcccctgaatgcggctaatcccaaccacggagcagatggttgcaatccagcggctagtctgtcgtaacgcgcaagtctgtggcggaaccgactactttgggtgtccgtgtttccttttatctttataatggctgcttatggtgacaatcattgattgttgccataaagcgacttggattggccatccggtgaaaatcagatcgattatctacttgtttattggattcacacccttatctatatacacgctaagtttgatcagagtcaccttgttaattagatattattaccacg

SEQ ID NO: 1157 - DNA, 747 bp, Enterovirus C
  source 1..747: mol_type = genomic DNA
ttaaaacagctctggggttgttcccaccccagaggcccacgtggcggctagtactccggtatcacggtacccttgtacgcctgttttatactccctacccctgcaacttagaagctagtaactcaagttcaatagtagggggtacaaaccagtaccaccacgaacaagcacttctgtttccccggtgatgccgtatagactgtgcccacggttgaaaacgactgacccgttatccgctcttatacttcgagaagcctagtatcatcttggaatcttcgatgcgttgcgctcagcactcaaccctagagtgtagcttaggtcgatgagtctggacattcctcaccggcgacggtggtccaggctgcgttggcggcctacctgtggcccaaagccacaggacgctagttgtgaacaaggtgtgaagagcctattgagctacaagagagtcctccggcccctgaatgcggctaatcccaaccacggagcaagtgatcacgaaccagtgattggcttgtcgtaacgcgcaagtctgtggcggaacccgactactttgggtgtccgtgtttcctttatttcatatatggctgcttatggtgacaattatagattgtcatcatagagcgaattggattggccatccggtgaaagttagacatattgtttacctatttgttggctttacatccttcaacctccacaccccgtattttgttaaggttgtgttgtcgatcagatcactataccaca

SEQ ID NO: 1158 - DNA, 747 bp, Enterovirus C
  source 1..747: mol_type = genomic DNA
ttaaaacagcctgtgggttgttcccaccccagaggcccacgtggcggccagtactccggtatcacggtacccttgtacgcctgttttatacccccttccccgtaacttagaagtaaacaaaaccaagttcaatagaaggcggtacaaaccagtgccaccatgaacaagcacttctgtttccccggtgatgttgtatagactgtttccacggttgaaagcgactgatccgttatccgctcaagtacttcgggaagcctagtatcatcttggaatcttcgatgcgttgcgttcagcactcaacccccgagtgtagcttaggtcgatgagtctggacattcctcaccggtgacggtggtccaggctgcgttggcggcctacctgtggcccaaaaccacaggacgctagttgtgaacaaggtgtgaagagcctactgagctacttgagagtcctccggcccctgaatgcggctaatcctaaccacggatcaggtgattgcaaaccagcagttggcctgtcgtaacgcgcaagtctgtggcggaaccgactactttgggtgtccgtgtttccttttatttttccattggctgcttatggtgacaatcgtagattgttgtcataaagcgaattggattggccatccggtgaaagtcaagtacattatttatttatttgtgggttttactcctataacagcaaatacccttcatcttatcaccatcacactactgattagatatcactaccaca

SEQ ID NO: 1159 - DNA, 747 bp, Enterovirus C
  source 1..747: mol_type = genomic DNA
ttaaaacagctctggggttgttcccaccccagaggcccacgtggcggccagtacactggtattacggtacctttgtacgcctgttttatgctcccttcccctgcaacttagaagattacaaaccaagttcaatagaagggggtgcaaaccagtaccaccacgaacaagcacttctgtttccccggtgaacttgtatagactgtacccacggtcgaaaacgagtgatccgttatccgctcttgtacttcgagaagcccagtaccttcttgggatcattgatgcgttgcgctcagcactcgaccccggagtgtagcttaggctgatgagtctggacatccctcaccggcgacggtggtccaggctgcgttggcggcctacctgtggtccaaagccacaggacgctaaatgtgaacaaggtgtgaagagcctattgagctacatgagagtcctccggcccctgaatgcggctaatcctaaccacggagcaggtggttgcaaaccagcaattggcctgtcgtaatgcgtaagtctgtggcggaaccgactactttgggtgtccgtgtttctctttatttttacaatggctgcttatggtgacaatcttagattgttgtcataaagcgaattggattggccatccggtgaagataaagcatatcatttatctatttattggattcactccattaaactcttggacttatcatttaatacaagtagtgttattgataagaagtgttcaccaca

SEQ ID NO: 1160 - DNA, 747 bp, Enterovirus C
  source 1..747: mol_type = genomic DNA
ttaaaacagcctgtgggttgttcccaccccagaggcccacgtggcggctagtactccggtattacggtacccttgtacgcctgttttatacccccttcccccagaaacttagacgctatgaaaccaagttcaataggagggggcacgaaccagtgtcaccacgaacaagcacttctgtttccccggtgattttacataagctgtacccacggctgaaagtgaatgatccgttatccgcttgggtacttcgagaagcctagtaccacctttggatcttcgatgcgttgcgctcagcactctaccccgagtgtagcttaggtcgatgagtctgggcataccccaccggtgacggtggcccaggctgcgttggcggcctacccatggttaacaccatgggacgctagttgtgaacaaggtgtgaagagcctattgagctactcaagagtcctccggcccctgaatgcggctaatcctaaccatggagcaggtgctttcaatccagaaagtggcctgtcgtaatgcgtaagtccgtggcggaaccgactactttgggtgtccgtgtttccttttttacttttgtatggctgtttatggtgacaatcatagattgttatcataaagcgaattggattggccatccggtaaaaattaaacacatcatttatctatttgttggattcgctccaatcacttctaaaacacttcagttgatacgtgtagtattaataatcaggctattgtatcaca

SEQ ID NO: 1161 - DNA, 747 bp, Enterovirus C
  source 1..747: mol_type = genomic DNA
ttaaaacagcctgtgggttgttcccaccccagaggcccacgtggcggctagtacaccggtatcacggtacccttgtacgcctgttttatactcccttcccccgtaacttagaagtataacaaccaagttcaatagaagggggtacaaaccagtaccaccacgaacaagcacctctgtttccccggtgaacttgcatagactgtgcccacggttgaaagcgagcgatccgttacccgctcttgtacttcgagaagcctagtattatcttggaatcattgatgcgttgcgctcagcactcaaccccagagtgtagcttaggtcgatgagtctggacactcctcaccggtgacggtggtccaggctgcgttggcggcctacctgtggcccatggtcacaggacgctaaatgtgaacaaggtgtgaagagcctattgagctacatgagagtcctccggcccctgaatgcggttaatcctaaccacggagcaggcggttacaaaccagtaactagcctgtcgtaatgcgcaagtctgtggcggaaccgactactttgggtgaccgtgtttccttttatttttacaatggctgcttatggtgacaatctcagattgttatcataaagcgagttggattggccatccggtaaagataaagtgtattatctatctatttgttggatttactccgttaaataccagaacatatcacttgatacaagcggtattactaattaggaacttctatcaca

SEQ ID NO: 1162 - DNA, 747 bp, Enterovirus C
  source 1..747: mol_type = genomic DNA
ttaaaacagctctggggttgttcccaccccagaggcccacgtggcggctagtactccggtattgcggtacccttgtacgcctgttttatactcccttcccccgtaacttagaagcaatcaaacaaagttcaatagaagggggtacaaaccagtaccaccacgaacaagcacttctgtttccccggtgaagttgtatagactgtacccacggttaaaagcaattgatccgttacccgctcttgtacttcgagaagcctagtactaccttggaatcttcgatgcgttgcgctcaacactcaaccccagagtgtagcttgggctgatgagtctggacgttccccaccggcgacggtggtccaggctgcgttggcggcctacctgtggcccaaagccacaggacgctagttgtgaacaaggtgcgaagagcctattgagctacaagagagtcctccggcccctgaatgcggctaatcccaaccacggagcaggtagttgcaagccagcaatcgacctgtcgtaacgcgtaagtctgtggcggaaccgactactttgggtgtccgtgtttccttttaattttaaactggctgcttatggtgacaatcattgattgttatcataaagcgaattggattggccatccggtgagaatcagatccattatctacttgttcattggatttactccattgacaacatacacatacgaccttattagagtcaatttactattgagacatctccaccata

SEQ ID NO: 1163 - DNA, 747 bp, Enterovirus C
  source 1..747: mol_type = genomic DNA
ttaaaacagctctggggttgttcccaccccagaggcccacgtggcggccagtacactggtatcacggtacccttgtacgcctgttttatactcccttcccccgtaacttagaagccataaatccaagttcaacagaagggggcacaaaccagtgccaccacgaacaagcacttctgtctccccggtgaagttgcatagactgtaaccacggttaaaagcgattgatccgttatccgctcatgtacttcgagaagcctagtaccaccttggaaccttcgacgcgttgcgctcagcactcaaacccagagtgtagcttaggccgatgagtctggacgttccccaccggcgacggtggtccaggctgcgttggcggcctacctgtggctcaaagccacaggacgctagttgcgaacagggtgtgaagagcctattgagctacatgagattcctccggcccctgaatgcggctaatcctaaccgcggagcaggtagttgcaagccagcaactggcctgtcgtaacgcgtaagtctgcggcggaaccgactactttgggtgtccgtgtttcctttatttcttataatggctgcttatggtgacaatcatagattgttatcataaagcgaattggattggccatccagtgaaagtcagactgattatccttctgtttgttgggtttgttccactcaattcacacactttgcacttaatcagaattgtcttattgacacgacaatatcatcact

SEQ ID NO: 1164 - DNA, 747 bp, Enterovirus C
  source 1..747: mol_type = genomic DNA
ttaaaacagctctggggttgttcccaccccagaggcccacgtggtggccagtactctggtattacggtacctttgtacgcctgttttatactcccttcccctgtaacttagaagcaatctaacctagttcaataggagggggtacaaaccagtaccactacgaacaagcacttctgttaccccggtgaagttgtatagactgtgcccacggtcgaaaatgactgatccgttatccgctcatgtacttcgggaagcctagtaccatcttcggatcttcgatgcgttgcgctcagcactcgaccccagagtgtagcttaggtcgatgagtctggacaatcctcactggcgacagtggtccaggctgcgttggcggcctacctgtggtccaaagccacaggacgctagttgtgaacaaggtgtgaagagcctactgagctacttgagagtcctccggcccctgaatgcggctaatcccaaccacggagcaagtagttgcaaaccagcaaccagcttgtcgtaacgcgtaagtctgtggcggaaccgactactttgggtgtccgtgtttccttttatttttacactggctgcttatggtgacaatcatagattgttatcataaggcgaattggattggccacccggtgtaagtcagatcaattgtctactcgtttgttggatatactccaataacgcactacactcttgagcttaacagagttgttctgctggcgagaagttgctatcgca

SEQ ID NO: 1165 - DNA, 747 bp, Enterovirus C
  source 1..747: mol_type = genomic DNA
acagtaaaacagctctggggttgttcccaccccagaggcccacgtggcggctagtactctggtatcgcggtacctttgtacgcctgttttatacccctaccccatgtaactttagaagcagttcaacaagttcaatagggggggtgcaaaccagcaccaccacgaacaagcacttctgtaaccccggtgaccttgtataagctgtacccacggctgaaagcgagtgatccgttatccgcttaagtacttcgagaagcctagtatcaccttagaatcttcgatgcgttgcgctcagcactctatcccgagtgtagcttaggctgatgagtctgggcgttcctcaccggcgacggtggcccaggctgcgttggcggcctacccatggctaacgccatgggacgctagatgtgaacaaggtgtgaagagcctattgagctacttaagagtcctccggcccctgaatgcggctaatcccaaccacggagcaggtgccttcaacccagagggtggcctgtcgtaacgcgcaagtctgtggcggaaccgactactttgggtgtccgtgtttccttttatcttttatatggctgcttatggtgacaatcatagattgttatcataaagcgacttggattggccatccggtaaaatacaaacacatcatttacttgtttgttggatttactccactctcccaatttactcctagcataatatccattgttttgttaacaagacattactatcaca

SEQ ID NO: 1166 - DNA, 747 bp, Enterovirus C
  source 1..747: mol_type = genomic DNA
ttaaaacagctctggggttgttcccaccccagaggcccacgtggcggccagtacactggtattgcggtacctttgtacgcctgttttatactcccttcccccgtaacttagaagcacaatgtccaagttcaataggagggggtacaaaccagtaccaccacgaacaagcacttctgttcccccggtgaggctgtataggctgtttccacggctaaaagcggctgatccgttatccgctcatgtacttcgagaagcctagtatcaccttggaatcttcgatgcgttgcgctcaacactcaaccccagagtgtagcttaggtcgatgagtctggacgttcctcaccggcgacggtggtccaggctgcgttggcggcctacctgtggcccaaagccacaggacgctagttgtgaacaaggtgtgaagagcctattgagctacctgagagtcctccggcccctgaatgcggctaatcctaaccacggagcaggcagtggcaatccagcgaccagcctgtcgtaacgcgcaagttcgtggcggaaccgactactttgggtgtccgtgtttccttttatttttacaatggctgcttatggtgacaatcattgattgttatcataaagcaaattggattggccatccggtgagaatttgattattaaattactctcttgttgggattgctcctttgaaatcttgtgcactcacacctattggaattacctcattgttaagatatcatcaccact

SEQ ID NO: 1167 - DNA, 747 bp, Enterovirus C
  source 1..747: mol_type = genomic DNA
ttaaaacagcctgtgggttgttcccaccccagaggcccacgtggcggctagtactctggtacccggtacccttgtacgcctgttttatatcccccttcccatgtaactttagaagcaattcactaagttcaacagggggggtgcaaaccagtaccaccacgaacaagcacttctgtttccccggtgatttcacataagctgtgcccacggccgaaagtggatgatccgttacccgcttgggtacttcgagaagcctagtatcaccttggaatcttcgacgcgttgcgttcagcgctctaacccgagtgtagcttaggctgatgagtctgggcgatccccaccggtgacggtggcccaggctgcgttggcggcctacccatggttaacgccatgggacgctagttttgaacaaggtgtgaagagcctattgagctactcaagagtcctccggcccctgaatgcggctaatcccaaccacggagcaagtgtcctcaaaccagagggtggcttgtcgtaacgcgcaagtctgtggcggaaccgactactttgggtgaccgtgtttccttttatttcatatttggctgcttatggtgacaatcacggattgttatcataaagcgaattggattggccatccggtgaaatacaagcacattatttacctttttgtcggattcattccaatagaatattcttcgccaaagttgatccaaataatcttagtgattagaagttattatttcagca

SEQ ID NO: 1168 - DNA, 747 bp, Enterovirus C
  source 1..747: mol_type = genomic DNA
ttaaaacagctctggggttgttcccaccccagaggcccacgtggcggccagtactccggtattacggtacccttgtacgcctgttttatactcccttcccctgtaacttagaagcatacaaaccaagttcaatagaagggggtacaaaccagtaccaccacgaacaagcactcctgtttccccggtgacattgcatagactgtacccacggttgaaagcgatcgatccgttacccgctcctgtacttcgagaagcctagtatcatcttggaatcttcgatgcgttgcgctcagcactcaaccccagagtgtagcttaggctgatgagtctggacgtcccccaccggcgacggtggtccaggctgcgttggcggcctacctgtggcccaaagccacaggacgctagttgtgaacaaggtgtgaagagcctattgagctacaagagagtcctccggcccctgaatgcggctaatcctaaccacggagcaggcagttgcaaaccagcaaccggcctgtcgtaacgcgcaagtctgtggcggaaccgactactttgggtgtccgtgtttccttttatttttacaatggctgcttatggtgacaatcatagattgttatcataaagcgacttggattggccatccggtgaaagtaaaacacattgtttacttgtttgttggattcactccaattaacacttttacttacaaactcattacaacaactctattaattagagataagcatcaca

SEQ ID NO: 1169 - DNA, 747 bp, Enterovirus C
  source 1..747: mol_type = genomic DNA
ttaaaacagctctggggttgttcccaccccagaggcccacgtggcggctagtacactggtattacggtacccttgtacgcctgttttatactcccttccccgtaacttagaagctatgtaatccaagttcaatagaagggggtacaaaccagtaccaccacgaacgagcacttctgtttccccggtgagattgtataagctgttcccacggccgaaaacgatcgatccgttacccgctcttgcacttcgagaagcctagtatcatcttgggatcttcgatgcgttgcgctcagcactctaccccagagtgtagcttaggtcgatgagtctggacattcctcaccggcgacggtggtccaggctgcgttggcggcctacctgtggtccaaagccacaggacgctagttgtaaacaaggtgtgaagagcctattgagctgcaagagagtcctccggcccctgaatgcggctaatcccaaccacggagcaggtggttgcaacccagtaactggcctgtcgtaacgcgtaagtctgtggcggaaccgactactttgggtgtccgtgtttccttttatttctataatggctgcttatggtgacaatcatagattgttatcataaagcgaattggattggccatccggtgagagttaagacaattatccacttgtttgttggatttacccctctgactaattacacactcaactttattaggattgtcattctagtgagatattaccatcaca

SEQ ID NO: 1170 - DNA, 747 bp, Enterovirus C
  source 1..747: mol_type = genomic DNA
ttaaaacagctctggggatgtacccaccccagaggcccacgtggcggctagcactccggtatcacggtacccttgtgcgcctgttttatactcccttcccgtaacttagaagcacgaaaccaagttcaatagaagggggtacaaaccagtaccaccacgaacaagcacttctgtttccccggtgatgttgcatagactgctcacgcggttgaaagcgactgatccgttatccgcttgtgtacttcgagaagcctagtatcaccttggaatcttcgtcgcgttgcgctcggcacccgaccccggggtgtggcttaggctgatgagtctggacattcctcaccggtgacggtggtctaggctgcgttggcggcctacctatggctaacgccataggacgctagatgtgaacaaggtgtgaagagcctattgagctacgcaagagtcctccggcccctgaatgcggctaatcccaaccacggagcaagcgatcgcaaaccagcgattggcttgtcgtaacgcgtaagtctgtggcggaaccgactactttgggtgtccgtgtttcctgttatttttatcatggctgcttatggtgacaatctgagattgttatcataaagcgaattggattggccatccggtgagtactgtctcaggtatactgctgcttaacggaaccgctaagttattcctactcctcatttagccaactcttccagaataatacgagggtaaaataacaatactata

SEQ ID NO: 1171 - DNA, 747 bp, Enterovirus C
  source 1..747: mol_type = genomic DNA
ttaaaacagctctggggttgttcccaccccagaggcccacgtggcggctagtactccggtatcacggtacccttgtacgcctgttttacactcccttcccccgtaacttagaagaaacaaacaaagttcaatagaagggggtacaaaccagtaccaccacgaacaagcacttctgtttccccggtgacgttgtatagactgtacccacggtcgaaaacgattgatccgttatccgcttttgtacttcgagaagcctagtatcatcttggaatcttcgatgcgttgcgctcagcactcaatcccagagtgtagcttaggtcgatgagtctggacgttcctcaccggcgacggtggtccaggctgcgttggcggcctacctgtggcccaaagccacaggacgctagttgtgaacaaggtgtgaagagcctattgagctacaagagagtcctccggcccctgaatgcggctaatcctaaccacggagcaagggtgtgtgagccaacacataccttgtcgtaatgcgtaagttcgtggcggaaccgactactttgggtgtccgtgtttccttttattcttgtattggctgcttatggtgacaatcatagattgttatcataaagcgacttggattggccatccagtggaagtgaaataccttgtctacctgtctgttggttttactccatttgactaattcacttacaagcttattgctataatttttattgactaaacaacaatactaca

SEQ ID NO: 1172 - DNA, 747 bp, Enterovirus C
  source 1..747: mol_type = genomic DNA
ttaaaacagctctggggttgttcccaccccagaggcccacgtggcggctagtactctggtatcgcggtacctttgtacgcctgttttatactccccttccctgtaacttagaagcaaacaagccaagttcaatagaagggggtacaaaccagtaccaccacgaacaagcacttctgttaccccggtgaagttgtataaactgtccccacggttgaaaacgactgatccgttacccgcttttgtacttcgagaagcctagtaccatcttggaatcttcgatgcgttgcgctccgcactcaatcccagagtgtagcttaggtcgatgagtctggacagtcctcaccggcgacggtggtccaggctgcgttggcggcctacctgtggcccaaagccacaggacgctagttgtgaacaaggtgtgaagagcctattgagctacaaaagagtcctccggcccctgaatgcggctaatcctaaccatggagcaggtggttacaaaccagtaattgacctgtcgtaacgcgtaagtccgtggcggaaccgactactttgggtgtccgtgtttccttttatttttaatgcggctgcttatggtgacaatcattgattgttatcataaagcgaattggattggccatccggtgtgaataaaacttattgtctacttgtttgttggatacactccactaaacgcattcacccctagcattatttctatagtgatcaaaatcagacaattacattaca

SEQ ID NO: 1173 - DNA, 747 bp, Enterovirus C
  source 1..747: mol_type = genomic DNA
ttaaaacagctctggggttgttcccaccccagaggcccacgtggcggctagcactctggtatcacggtacccttgtgcgcctgttttacaccccctccctgcaatttagaagcacaaaactaagttcaatagaagggggtacaaaccagtaccaccacgaacaagcacttctgtttccccggtgacattacatagactgctcacgcggttgaaagtgatcgatccgttacccgcttgtgtacttcgagaagcctagtatcactttgggatcttcgacgcgttgcgcccagcactcaaacccagggtgtagcttaggccgatgagtctggacgctcctcaccggcgacggtggtccaggctgcgttggcggcctacctatggctgacgccataggacgctagatgtgaacaaggtgtgaagagcctattgagctacgcaagagtcctccggcccctgaatgcggctaatcccaaccacggagcaggcggtcacaaaccagtgactggcttgtcgtaacgcgcaagtctgtggcggaaccgactactttgggtgtccgtgtttcctgttatctttattatggctgcttatggtgacaatcagagattgttaccataaagcgaattggattggccatccggtgtgtattgcattggatatacaactgtttactaaaattactgtgttatctctactttccatttaactggttaatcaggaacgatacgagaataaaacaacaacatcacg

SEQ ID NO: 1174 - DNA, 747 bp, Enterovirus B
  source 1..747: mol_type = genomic DNA
tttttaaaacagccctgtgggttgttcccacccacggggcccattgggcgctagcacactggtatcacggtacccttgtgcgcctgttttatccaccccctccccaatgtaacatagaagcacaaactaagtggtcaatagacggctcagtgcaccaactgggtttagaccaagcacttctgttaccccggactgagtatcaataggctgctcacgcggctgaaggagaaaacgttcgttacccggccaactacttcgagaagcccagtaccaccatgaaggttgcgcagtgtttcgttcagcacaaccccagtgtagatcaggtcgatgagtcaccgcaatccccacgggcgaccgtggcggtggctgcgctggcggcctgcccatggggtgacccatgggacgcttcaattccgacatggtgcgaagagcctattgagctagttggtagtcctccggcccctgaatgcggctaatcccaactgcggagcaagcacccacaaaccagtgggctgtttgtcgtaacgggcaactctgcagcggaaccgactactttgggtgtccgtgtttccttttattcctacactggctgcttatggtgacaattgaaagattgttgccatatagctattggattggccatccggtaacaaacagagctattattcacttatttgttggctttgtgccgttgaatttcaaagttataaaaaccataacctccatcttgacactcaacacagcaaa

SEQ ID NO: 1175 - DNA, 748 bp, Enterovirus A
  source 1..748: mol_type = genomic DNA
ttaaaacagcctgtgggttgcacccactcacagggcccacgtggcgctagcactctggttctacggaacctttgtgcgcctgttttacgccccttcccccaatttgcaacttagaagcaatacacaacactggtcaacagtaggcatggcgcaccagccatgtcttgatcaagcacttctgtttccccggaccgagtatcaatagactgctcacgcggttgaaggagaaagcgtccgttatccggctaactacttcgagaaacttagtaacaccattgaagctgcagagtgtttcgctcggcacttcccccgtgtagatcaggtcgatgagtcactgcaatccccacgggtgaccgtggcagtggctgcgctggcggcctgcctatggggtaacccataggacgctctaatgcggacatggtgcgaagagtctattgagctagttagtggtcctccggcccctgaatgcggctaatcctaactgcggagcacatgccttcaatccagagggtagtgtgtcgtaatgggcaactctgcagcggaaccgactactttgggtgtccgtgtttccttttattcttatattggctgcttatggtgacaattacagaattgttaccatatagctattggattggccatccggtgtgcaatagagctattatatacctatttgttggctttgtgccactaaccttaaaatctataaccaccctcgactttatactaaccctcaatacagtcaaac

SEQ ID NO: 1176 - DNA, 748 bp, Enterovirus A
  source 1..748: mol_type = genomic DNA
tttaaaaccaagctgtgggttgtacccactcacagggcccactgggcgctagcactctgattccgcggaatctttgtgcgcctgttttataacccctcccccgatttgtaatttagaagtaatgcacaccactgatcaacagcaagcgtggcgcgccagccatgttcagatcaaatacttctgttttcccggactgagtatcaatagactgctcacgcggttgaaggagaaaacgttcgttacccggctaactacttcgagaaacctagtagcaccatcgaaactgcagagtgtttcgctcagcactttccccgtgtagatcaggtcgatgagtcactgcaatccccacgggcgaccgtggcagtggctgcgttggcggcctgcctatgggcttgcccataggacgctctaatgtggacatggtgtgaagagtctattgagctagttggtagtcctccggcccctgaatgcggctaatcctaactgcagagcgcataccctcaatccagggggtggtgcgtcgtaacgggcaactctgcagcggaaccgactactttgggtgtccgtgtttccttttattcttatattggctgcttatggtgacaattgagagattgttgccatatagctattggattggccatccagtgtctaacagagcaattgtatacttgtttgttggattcgttccactgtcatatacatccactaacaccttatactatattacaaaattgaacacaagaaa

SEQ ID NO: 1177 - DNA, 748 bp, Enterovirus A
  source 1..748: mol_type = genomic DNA
tttaaaacagctctagggttgttcccaccctagaggcccaagtggcggctagcactctggtattacggtacctttgtgcgcctgttttatatcccttcccccatgtaacttagaagatattaaacaaagttcaataggagggggtacaaaccagtgccaccacgaacaaacacttctgtttccccggtgaagctacatagactgttcccacggttgaaagtggcagatccgttatccgctttggtacttcgagaaacctagtaccaccttggaatcttcgatgcgttgcgctcagcactcaaccccagagtgtagcttaggtcgatgagtctggacgatcctcactggcgacagtggtccaggctgcgttggcggcctacctgtggcgaaagccacaggacgctagttgtgaacaaggtgtgaagagtctattgagctaccaaagagtcctccggcccctgaatgcggctaatcccaaccacggagcaagtgcccacaaaccagtgggtggcttgtcgtaatgcgtaagtctgtggcggaaccgactactttgggtgtccgtgtttccttttatttttatcatggctgcttatggtgacaatctaagattgttatcatatagctattggattggccatccggtgactaacagagatcttgcatacctgtttgttggttttactaaactagatatagttacatttaaaactcttctttatatcatacagttgaatagtagaaagagaaa

SEQ ID NO: 1178 - DNA, 748 bp, Enterovirus A
  source 1..748: mol_type = genomic DNA
ttaaaacagcctgtgggttgcacccacccacagggcccactgggcgctagcaccctgattctgcggaatctttgtgcgcctgttttacaacccttcccccgatttgtaatttagaagcaacgaacctcaccgatcaatagtaggcgtggcgcgccagctacgtcttgatcaagcacttctgtttccccgggctgagtatcaatagactgcttgcgcggtcgaaggagaaaacgctcgttatccggctaactacttcgagaaacccagtaacaccattgaaactgcagagtgtttcgctcagcacttcccccgtgtagatcaggtcgatgagtcactgcaatccccacgggcgaccgtggcagtggctgcgttggcggcctgcctatggggcaacccataggacgctctaaggtggacatggtgtgaagagtctattgagctagttagtagtcctccggcccctgaatgcggctaatcctaactgcggagcgcatgccctcaaaccagagggtggtgcgtcgtaatgggcaactctgcagcggaaccgactactttgggtgtccgtgtttccttttattctcttaatggctgcttatggtgacaattaaggaattgttaccatatagctattggattggccatccggtgtgtagtagagctattatttatctatttgttggttttgtaccattaaacttaaggtctgtcaccactttacaatatatactgatcctcaatacggttaagc

SEQ ID NO: 1179 - DNA, 748 bp, Enterovirus A
  source 1..748: mol_type = genomic DNA
gcgcccagtgggccctgtgggttgcacccacccacagggcccactgggcgctagcactctggcactaaggtacctttgtgcgcctgttttatttcccttcccccaaagtaatttagaagttatgcaccaacgatcaatagcaggtgtgacacaccagtcatatcttgatcaagtactcctgtttccccggaccgagtatcaataagctgctcgcgcggctgaaggagaaaacgttcgttacccgaccaactacttcgagaagcttagtaccaccatgaacgaggcagagtgtttcgttcagcacaaccccagtgtagatcaggctgatgagtcactgcaaaccccatgggcgaccatggcagtggctgcgttggcggcctgcccatggagaaatccatgggacgctctaattctgacatggtgtgaagagcctattgagctagttggtagtcctccggcccctgaatgcggctaatcctaactgcggagcacatgctcacaaaccagtgggtggtgtgtcgtaatgggtaactctgcagcggaaccgactactttgggtgtccgtgtttccttttattcttatgttggctgcttatggtgacaatcaaagaattgttaccatatagctattggattggccatccggtgtgcaacagagcaattgtttacctatttgttggttttgtaccactatcactgaagtctgtgatcactctcaaattcattctgaccctcaactcaatcaaac

SEQ ID NO: 1180 - DNA, 748 bp, Enterovirus C
  source 1..748: mol_type = genomic DNA
ttaaaacagctctggggttgttcccaccccagaggcccacgtggcggccagtacaccggtatcacggtacccttgtacgcctgttttatactccctttcccccgtaacttagaagcaataaaaccaagttcaatagaaagggggtacaaaccagtaccaccacgaacaagcacttctgtttccccggtgatgttgtatagactgtttccacggttgaaaacgactgatccgttatccgctcttgtacttcgagaagcctagtatcatcttgggatcttcgatgcgttgcgctcaacactcgaccccggagtgtagcttaggccgatgagtctggacgttccccaccggcgacggtggtccaggctgcgttggcggcctacctgtggtccaaagccacaggacgctagttgtgaacaaggtgtgaagagcctattgagctacttgagagtcctccggcccctgaatgcggctaatcccaaccacggagcaggtggttgcaatccagcaactagcctgtcgtaacgcgcaagtctgtggcggaaccgactactttgggtgtccgtgtttccttttatttttcattggctgcttatggtgacaatctcagattgttatcataaagcgagttggattggccatccggtgaaaatcagatcgattatttacctttttgttggatttacacctttaacattacacactttgaaactcattgaaattgtactgttgatacggtattactatcaca

SEQ ID NO: 1181 - DNA, 748 bp, unidentified
  source 1..748: mol_type = unassigned DNA; note = Human coxsackievirus A13 isolate CV-A13_67001, complete genome.1 sequence
ttaaaacagctctggggttgttcccaccccagaggcccacgtggcggccagtacaccggtatcgcggtacccttgtacgcctgttttatactccctttccccgtaacttagaagcaatgaaaccaagttcaatagaaagggggtacaaaccagtaccaccacgaacaagcacttctgtctccccggtgaggtcgtatagactgttcccacggttgaaaatgactgatccgttatccgctcttgtacttcgagaagcctagtaccaccttggaatcttcgatgcgttgcgctcagcactcaaccccggagtgtagcttgggctgatgagtctggacattccccaccggcgacggtggtccaggctgcgttggcggcctacctgtggcccaaagccacaggacgctagttgtgaacaaggtgtgaagagcctattgagctacatgagagtcctccggcccctgaatgcggctaatcccaaccacggagcaggcgattgcaatccagcaattagcctgtcgtaacgcgtaagtctgtggcggaaccgactactttgggtgaccgtgtttccttttattcttacattggctgcttatggtgacaatcatagattgttatcataaagcgagttggattggccatccagtgagaattagatcgatcatctacctttttgttggatttacacctttaaaaccacacagcttgaatctcatcaaaattgtattgttgatacgacattattatcatt

SEQ ID NO: 1182 - DNA, 748 bp, Enterovirus C
  source 1..748: mol_type = genomic DNA
ttaaaacagctctggggttgttcccaccccagaggcccacgtggcggccagtacaccggtatcgcggtacccttgtacgcctgttttatactcccttccccccgtaacttagaagcatataacacaagttcaatagaagggggtgcaaaccagcaccaccacgaacaagcacttctgtttccccggtgagatcacatagattgttcccacggtcgaaagtgatcagtccgttatccgctcttgtacttcgagaagcctagtaccttcttggaatcttcgatgcgttgcgctcagcactcaaacccagagtgtagcttaggccgatgagtctggacattccccaccggtgacggtggtccaggctgcgttggcggcctacctgtgacccaaagtcacaggacgctagttgtgaacaaggtgagaagagcctattgagctacaagagattcctccggcccctgaatgcggctaatcccaaccatggagcaggtggctgcaaaccagcagacggcctgtcgtaacgcgcaagtccgtggcggaaccgactactttgggtgtccgtgtttcctttattttttattgtggctgcttatggtgacaatcattgattgttatcataaagcgaattggattggccatccagcgataattaaccagaccatttactagtttgttggatttactccactgacattctaaacactcaatctcatagaagtggtgaaattaattggataatttaactaca

SEQ ID NO: 1183 - DNA, 748 bp, Enterovirus C
  source 1..748: mol_type = genomic DNA
ttaaaacagcctgtgggttgttcccaccccagaggcccacgtggcggctagtactccggtattacggtacccttgtacgcctgttttatactcccttcccccgcaacttagaagttttacaaaactcgttcaacagaagggggtacaaaccagtaccaccacgaacaagcacttctgtttccccggtgacgttgtatagactgttcccacggtcgaaagcgactgatccgttatccgctctggtacttcgggaagcctagtagcaccttgggatcttcgacgcgttgcgttcaacactcaaccccggagtgtagcttaggtcgatgagtctggacgctcctcaccggcgacggtggtccaggctgcgttggcggcctacctgtggtccaaagccacaggacgctagttgtgaacaaggtgtgaagagcctactgagctacctgagagtcctccggcccctgaatgcggctaatcctaaccacggatcaggtgattgcaaaccagcaattggcctgtcgtaatgcgcaagtctgtggcggaaccgactactttgggtgtccgtgtttccttttattttaaaaatggctgcttatggtgacaatcatagattgttatcataaagcgagttggattggccatccggtgaaagtaaagtatattatctacttgtttgtgggatttactcctataactgcatacacttatcatctcattacgatcacactattgattagatcctgttaccaca

SEQ ID NO: 1184 - DNA, 748 bp, Enterovirus C
  source 1..748: mol_type = genomic DNA
ttaaaacagcctgtgggttgttcccaccccagaggcccacgtggcggctagtactctggtatcgcggtacctttgtacgcctgttttatactcccttccccatgtaactttagaagcaattcaccaagttcaatagagggggtacaagccagtaccaccacgaacaagcacttctgttaccccggtgagtttgcataagctgtgcccacggctgaaagtaaatgatccgttatccgcttgagtacttcgagaagcctagtatcaccttggaatcttcgacgcgttgcgctcaacactctaccccgagtgtagcttaggctgatgagtctgggcatcccccaccggcgacggtggcccaggctgcgttggcggcctacccatggccaacgccatgggacgctagttgtgaacaaggtgtgaagagcctattgagctactcaagagtcctccggcccctgaatgcggctaatcctaaccatggagcaagtggccccaacccaggggatggcttgtcgtaacgcgcaagtccgtggcggaaccgactactttgggtgtccgtgtttccttttattttatatatggctgcttatggtgacaatcacagattgttatcataaagcgaattggattggccatccggtgaaatataagcacattatttatatctttgctggattcgctccgttgacacattcttcaccaaagttgatttatacagtcttagtaattagaaatcaccacttcagtc

SEQ ID NO: 1185 - DNA, 748 bp, Enterovirus C
  source 1..748: mol_type = genomic DNA
ttaaaacagcctgtgggttgttcccaccccagaggcccacgtggcggctagtactccggtattacggtacccttgtacgcctgttttatactcccttcccctgtaacttagaagcaccgaacacaagttcaatagaagggggtacaaaccagtaccaccacgaacaagcacttctgtttccccggtgaagttgtattaaactgttcccacggttgaaagcggctgatccgttatccgctcatgtacttcgggaagcctagtaccatcttggaatcttcgatgcgttgcgctcagcactcaaccccagagtgtagcttaggtcgatgagtctggacaaacctcactggcgacagtggtccaggctgcgttggcggcctacctgtggcccaaagccacaggacgctagttgtgaacaaggtgtgaagagcctactgagctacatgagagtcctccggcccctgaatgcggccaatcccaaccacggagcaggcgactacaagccagtggttagtctgtcgtaatgcgcaagtctgtggcggaaccgactactttgggtgtccgtgtttccttttattttgacattggctgcttatggtgacaatcatagattgttatcataaagcgaattggattggccatccggtgagagtcaaaactattatctacctttttattggatttactccactgaacgcttataccccagtccttattagacttgcattgttgattagatatcactattata

SEQ ID NO: 1186 - DNA, 748 bp, Enterovirus C
  source 1..748: mol_type = genomic DNA
ttaaaacagctctggggttgtacccaccccagaggcccacgtggcggccagcactccggtattacggtacccttgtgcgcctgttttatactccctctcccgcaacttagaagcacgaaaccaagttcaatagaagggggtacaaaccagtaccaccacgaacaagcacctctgtttccccggtgacattgcatagactgctcacgcggttgaaagtgatcgatccgttacccgcttgtgtacttcgaaaagcctagtatcgccttggaatcttcgacgcgttgcgctcagcacccgaccccggggtgtagcttaggctgatgagtctggacattcctcaccggtgacggtggtccaggctgcgttggcggcctacctatggctaacgccataggacgctagttgtgaacaaggtgtgaagagcctattgagctacataagagtcctccggcccctgaatgcggctaatcctaaccacggagcaggcggtcgcgaaccagtgactggcttgtcgtaacgcgcaagtctgtggcggaaccgactactttgggtgtccgtgtttcctgttatttttatcatggctgcttatggtgacaatcagagattgttatcataaagcgaattggattggccatccggtgagtgttgtgtcaggtatacaaccgtttgttggaaccactgtgttagctttacttctcatttaaccagttaatcaaaaacaatacgaggacaaaacaacaatactaca

SEQ ID NO: 1187 - DNA, 748 bp, Enterovirus C
  source 1..748: mol_type = genomic DNA
ttccgctcctctggggttgttcccaccccagaggcccacgtggcggctagtactccggtattacggtacccttgtacgcctgttttatactcccttccccgcaacttagaagaattaaaccaagttcaatagaagggggtacaagccagtaccaccacgaacaagcacttctgtttccccggtgacgccgtatagactgtacccacggttgaaaacgactgatccgttatccgctttcgtacttcgagaagcctagtatcatcttgggatcatcgatgcgttgcgctcagcactcaaccccggggtgtagcttaggccgatgagtctggacattcctcaccggtgacggtggtccaggctgcgttggcggcctacctgtggcccaaagccacaggacgctagttgtgaacaaggtgtgaagagcctattgagctacgaaagattcctccggcccctgaatgcggctaatcccaaccacggagcaagtgctcgcacaccagtgagtagcttgtcgtaacgggtaactctgtggcggaaccgactactttgggtgtccgtgtttcctgttatttttatcatggctgcttatggtgacaatcagagattgttatcataaagcgaattggattggccatccggtgagcgttgtgtcaggtatacaactgtttgttggaaccactgtgttagctttacttctcatttaaccaatttatcaaaaataatacgaggataaaacaacaatactaca

SEQ ID NO: 1188 - DNA, 748 bp, Enterovirus C
  source 1..748: mol_type = genomic DNA
gttaaaacagctctggggttgttcccaccccagaggcccaagtggcggctagtactccggtatcacggtacccttgtacgcctgttttatactcccttcccccgtaacttagaagagttaaaccaagttcaatagaagggggtacaaaccagtaccaccacgaacaagcacttctgtttccccggtgatattgtatagactgtacccacggtcgaaaatgattgatccgttatccgctctcatacttcgagaagcctagtatcatcttggaatcttcgatgcgttgcgctcggcactcgatcccggagtgtagcttaggtcgatgagtctggacactcctcaccggtgacggtggtccagactgcgttggcggcctacctgtggtccaaagccacaggacgctagttgtgaacaaggtgtgaagagcctattgagctatgagagagtcctccggcccctgaatgcggctaatcccaaccacggagcgagagtgcgcaagccagcgtatatctcgtcgtaacgcgcaagtctgtggcggaaccgactactttgggtgtccgtgtttccttttatttttgtattggctgcttatggtgacaatcacagattgttatcataaagcgaattggattggccatccggtgaaagtgaaatacattatttgcttatttattggattcagtccacctaattgctatactcacgaacccaccacagccgttttgttaactgaaagccggtaccaata

SEQ ID NO: 1189 - DNA, 748 bp, Enterovirus C
  source 1..748: mol_type = genomic DNA
tggggttaaaacagctctggggttgttcccaccccagaggcccacgtggcggctagtactctggtatcatggtacctttgtacgcctgttttatacccctaccccacgtaactttagaagcaactcaacaagttcaatagggggggtacaaaccagtaccaccacgaacaagcactcctgttaccccggtgatcttgcataagctgtgcccacggctgaaggcgagagatccgttatccgcttgagtacttcgagaagcctagtatcaccttgggatcttcgacgcgttgcgctcagcactccacccgagtgtagcttaggctgatgagcctgggcattccccaccggcgacggtggcccaggctgcgttggcggcctacccatggctaacaccatgggacgctagatgtgaacaaggtgtgaagagcctattgagctactcaagagtcctccggcccctgaatgcggctaatcccaaccacggagcaggtgtcttcaacccagaaggtagcctgtcgtaacgcgtaagtctgtggcggaaccgactactttgggtgtccgtgtttccttttatcttttatatggctgcttatggtgacaatcacagattgttatcataaagcgatttggattggccatccggtgaagtacaaacacattatctacttgtttgttggatttactccactcacacaccccacccccaatataacatctattgttttgttaacaagaaattactttcgaa

SEQ ID NO: 1190 - DNA, 749 bp, Cosavirus B
  source 1..749: mol_type = genomic DNA
ttgccagttttttgaaacgtgtggtttgacgtctaaccattatggcagtgggtggagtactgcaaagatgtcaccgtgctttacacggtttttgaaccccacaccggctgtttggcgcttgcaggacagcaggtttattttcttttaactctctctttctagccacacacgatctatgtgtgtgggcggagtgatactcccgttccttcttggacaggcggcctccacgccctttgtggatcttaaggctaccaagtcactggtgttggaaagtgaagagaaaggagttccttgggaactacatgtggcattgacagaggttgtagcgatgctgtgtgtgtgtgcggattacccccgtggcgacacggaccccacaggccaaaagccctgtccgaaaggacccacacagtggagcaaccccagctcccctcttcaatgttttgtgttagcaaccttggtattattttctctcaagcttccaatacaccgggccccaaagatgtcctgaaggtaccccgtgtatctgaggatgagcaccatcaactacccggacttgttctttcgagaacagacgcatgtggtaacccagccccgatcctaaggggtcggggcttttgctcactcagcacaggatctgatcaggagacctcccccccctgctttacagggggcgggggtttaaaaattgcccaaggcctggcaaataacctaggggactaggttttcctttttattttaaagttgtcaat

SEQ ID NO: 1191 - DNA, 749 bp, Enterovirus A
  source 1..749: mol_type = genomic DNA
ttaaaacagctcttagggttgttcccaccctagaggcccacgtggcggctagcactctggtatcacggtacctttgtgcgcctgttttatacccccctcccccatgtaacttagaagctattaaataaagttcaatagaagggggtacaaaccagtaccaccacgaacaagcacttctgtttccccggtgaagctacatagactgttcccacggttgaaagtggcagatccgttatccgctttggtacttcgagaaacctagtatcatcttggaatcttcgatgcgttgcgttcagcactcaaccccagagtgtagcttaggtcgatgagtctggacgatcctcactggcgacagtggtccaggctgcgttggcggcctacctgtggcgaaagctacaggacgctagttgtgaacaaggtgtgaagagtctattgagctatcaaagagtcctccggcccctgaatgcggctattcccaaccacggagcaagtgctcacaaaccagtgagtggcttgtcgtaacgcgcaagtctgtggcggaaccgactactttgggtgcccgtgtttccttttatttttatcatggctgcttatggtgacaatctaagattgttatcatatagctattggattggccatccggtgactaacagagatatcatatattcatttgttggttttgttaaactagactcaactacattcaagtctcttctcttcatcatacaattgaataatagaaagagaaa

SEQ ID NO: 1192 - DNA, 749 bp, Enterovirus A
  source 1..749: mol_type = genomic DNA
ttaaaacagctctgggggttgttcccaccctagaggcccacgtggcggctagcactctggtatcacggtacctttgtgcgcctgttttatatccctttccccatgcaacttagaagttttttaaacaaagttcaatagaagggggtacaaaccagtgccaccacgaacaagcacttctgtttccccggtgaagctgcatagactgtccccacggttgaaagcggcagatccgtcatccgctttggtacttcgagaaacctagtatcaccttggaatcttcgatgcgttgcgctcagcactcaaccccagagtgtagcttaggttgatgagtctggacaatcctcactggcgacagtggtccaggctgcgttggcggcctacctgtggtgaaaaccacaggacgctagatgtgaacaaggtgtgaagagtctattgagctaccaaagagtcctccggcccctgaatgcggctaatcctaaccacggagcaagtacccacaaaccagtgggcagcttgtcgtaacgcgcaagtctgtggcggaaccgactactttgggtgtccgtgtttcctttttattttatcatggctgcttatggtgacaatctaagattgttatcatatagctattggattggccatccggtgactaacagagatattatatacctatttgttggttttgttagattaaatactatcacattcaaaactcttctttatatcatacaattgaacagtagaaagagaaa

SEQ ID NO: 1193 - DNA, 749 bp, Enterovirus A
  source 1..749: mol_type = genomic DNA
ttaaaacagcctgtgggttgttcccacccacagggcccactgggcgctagcactctgatttcacgaaatccttgtgcgcctgttttatatcccttccccccagtctgaaacatagaagcaatgcgcatcactgatcaatagcaggcgtaacgcgccagttacgtcatgatcaagcacatctgtctccccggaccgagtatcaatagactgcttgcgcggttgaaggagaaacagttcgttacccggctaactacttcgagaagcccagtagcaccatggaagctgcagggtgtttcgctcagcacttcccccgtgtagatcaggtcgatgagtcactgcaacccccacaggcgactgtggcagtggctgcgttggcggcctgcctatggggagacccataggacgctctaatgtggacatggtgtgaagagcctattgagctagttagtagtcctccggcccctgaatgcggctaatcctaactgcggagcacacgccctcaacccagagggtagtgtgtcgtaacgggcaactctgcagcggaaccgactactttgggtgtccgtgtttcttattattcttatattggctgcttatggtgacaattacagaattgttaccatatagctattggattggccatccggtgtgcaatagagctgttatatacctatttgttggttttgtgccactgactttaaaatctatagttactcttaatttcatattggctctcaacacaattaaac

SEQ ID NO: 1194 - DNA, 749 bp, Enterovirus A
  source 1..749: mol_type = genomic DNA
ttaaaacagcctgtgggttgttcccacccacagggcccactgggcgctagcactctggtattacggtacctttgtgcgcctgttttatgccccttaccccttaaattggtaacttagaagttttacatacctgcgaccaatagcgggcatgacgcaccagccatgtcttggtcaagcacttctgttcccccggactgagtatcaatagactgctcacgcggtcgaaggagaaaacgttcgttatccggctggctacttcgagaaacccagtaacaccatgaaagttgcagagtgtttcgctcagcactacccccgtgtagatcaggtcgatgagtcactgcgaaccccacgggcgaccgtggcagtggctgcgctggcggcctgcccatggggtgacccatgggacgctctaatacagacatggtgtgaagagtctattgagctagtcagtagtcctccggcccctgaatgcggctaatcctaactgcggagcacatgccctcaatccagggggtggtgtgtcgtaacgggtaactctgcagcggaaccgactactttgggtgtccgtgtttccttttattcctatcatggctgcttatggtgacaattgaaagattgttaccatatagctactggattggccacccggtgtctaacagagctattgtttatctatttgttgggtacgtccttcttgactataaggcccttcagactcttaagtacatcttgtacctcaatcaaaagag

SEQ ID NO: 1195 - DNA, 749 bp, Enterovirus A
  source 1..749: mol_type = genomic DNA
ttaaaacagcctgtgggttgtacccacccacagggcccactgggcgccagcactctgattctacggaatctttgtgcgcctgttttataatcccctccccccaagtttgtaatttagaagcaaagtaccgtaacgatcaacagcaggcgtggcgcaccagccatgtctcgatcaagcacttctgttcccccggacagagtatcaatagactactcacgtggttgaaggagaaaacgtccgttatccggctaactacttcgagaaacctagtaacaccattgaaactgcagagcgtttcgctcagcacttaccccgtgtagatcaggtcgatgagtcactgcattccccacgggcgaccgtggcagtggctgcgttggcggcctgcctatggggtcacccataggacgctctaatgtggacatggtgcgaagagtctattgagctagttagtagtcctccggcccctgaatgcggctaatcctaactgcggagcgtatgccctcaaaccagggggtggtgcgtcgtaacgggtaactctgcagcggaaccgactactttgggtgtccgtgtttccttttatttccttactggctgcttatggtgacaattgaagaattgttgccatatagctattggattggccatccggtgtgtaacagagcaatcatctatttgttcgtcgggtatatcccactaacgctcaactcttttaacacattacaatacatactaatcctaaatacaagaaa

SEQ ID NO: 1196 - DNA, 749 bp, Enterovirus C
  source 1..749: mol_type = genomic DNA
ttaaaacagcctgtgggttgttcccaccccagaggcccacgtggcggccagtactccggtattacggtacccttgtacgcctgttttatactccctttccctagtaacttagaagttgtacaattaagttcaatagaagggggtacaaaccagtaccaccacgaacaagcacttctgtttccccggtgaagttgcatagactgtccccacggttaaaagtgactgatccgttatccgctcatttacttcgggaagcctagtatcatcttgggatcttcgatgcgttgcgctcaacactcaaccccagagtgtagcttaggtcgatgagtctggacactccccactggtgacagtggtccaggctgcgttggcggcctacctgtggtccaaagccacaggacgctagtagtgaacaaggtgtgaagagcctactgagctaattgagagtcctccggcccctgaatgcggataatcctaaccacggagcaggtgatcacaatccagtgattggcctgtcgtaatgcgtgagtctgtggcggaaccgactactttgggtgtccgtgtttcctttttactcttattatggctgcttatggtgacaatcatagattgttatcataaagcgaattggattggccatccggtgagaattaaatcgctaatatatctatttgttggatttaccaaaatcaactacagaacactagccttaattcgaatcgtgttactgatcagattccaccatcaca

SEQ ID NO: 1197 - DNA, 749 bp, Enterovirus C
  source 1..749: mol_type = genomic DNA
ttaaaacagctctggggttgttcccaccccagaggcccacgtggcggctagtactctggtattacggtacctttgtacgcctgttttatactcccttcccctccgtaacttagaagcatgagaatcaagttcaatagaagggggtacaaaccagtaccaccacgaacaagcacttctgtcaccccggtgaggttgtatagactgtccccacggttgaaagcgactgatccgttatccgctcaattacttcgggaagcctagtaccatcctggaatcttcgatgcgttgcgctcagcactcaaccccagagtgtagcttaggccgatgagtctggacaatcctcactggcgacagtggtccaggctgcgttggcggcctacctgtggtccaaagccacaggacgctagttgtgaacaaggtgcgaagagcctactgagctaattgagagtcctccggcccctgaatgcggctaatcccaaccacggagcaggcggttgcaaaccagcaactggcttgtcgtaacgcgaaagtctgtggcggaaccgactactttgggtgtccgtgtttccttttattcttatgatggctgcttatggtgacaatcgttgattgttatcataaagcgaattggattggccatccggtgaaaatcaaatctattgtttacctgttcattgggttcactccactaacttcacacactatatatctcattaaggtcgtattactagtaaggaattatcaccaaa

SEQ ID NO: 1198 - DNA, 749 bp, Enterovirus C
  source 1..749: mol_type = genomic DNA
ttaaaacagctctggggttgttcccaccccagaggcccacgtggcggctagtactctggtattacggtacccttgtacgcctgttttatactcccttccccgtaacttagaagaaataaaccaagttcaatagaagggggcacaaaccagtgtcaccacgaacaagcacttctgtttccccggtgatattgtatagactgtacccacggttaaaagcgattgatccgttatccgctcttgtacttcgaaaagcctagtatcatcttggaatcttcgatgcgttgcgctcaacactcaaccccagagtgtagcttaggtcgatgagtctggacattccccaccggcgacggtggtccaggctgcgttggcggcctacctgtggcccaaagccacaggacgctagttgtgaacaaggtgtgaagagcctattgagctgcaagagagtcctccggcccctgaatgcggctaatcccaaccacggagcaagtgctcacacaccagtgagtggcttgtcgtaacgcgcaagtctgtggcggaaccgactactttgggtgtccgtgtttcctgttatttttatcatggctgcttatggtgacaatcagagattgttatcataaagcgaattggattggccatccggtgagtgttgtgtcaggtatacaactgtttgttggaaccactgtgttaactttacttctcatttaaccaattaatcaaaaacaatacgaggataaaacaacaatactaca

SEQ ID NO: 1199 - DNA, 749 bp, Enterovirus C
  source 1..749: mol_type = genomic DNA
ttaaaacagctctggggttgttcccaccccagaggcccacgtggcggccagtacaccggtattacggtacccttgtacgcctgttttatactcccttccccctgtaacttagaagctcaagaatccaagttcaatagaagggggtacaaaccagtaccaccacgaacaagcacttctgtttccccggtgaagttgcatagactgttcccacggttgaaagtgactgatccgttatccgctcaactacttcgagaagcccagtatcatcttggaatcttcgatgcgttgcgctcagcactcgaccccggagtgtagcttaggctgatgagtctggacgttccccactggtgacagtggtccaggctgcgttggcggcctacctgtggtccaaagccacaggacgctagttgtgaacaaggtgtgaagagcctattgagctaattgagaatcctccggcccctgaatgcggctaatcccaaccacggagcaggtggttacaacccagtaactggcctgtcgtaacgcgtaagtctgtggcggaaccgactactttgggtgtccgtgtttccttttattcctataatggctgcttatggtgacaatcacagattgttatcataaagcgaattggattggccatccggtgagagttaagacaattatccacttgttcattggatttacccctctgactaattacacactcaaccttattagaattgtagttctagtgagatactactgtcata

SEQ ID NO: 1200 - DNA, 749 bp, Enterovirus C
  source 1..749: mol_type = genomic DNA
ttaaaacagctctggggttgttcccaccccagaggcccacgtggcggctagtactccggtattacggtacccttgtacgcctgttttatactcccttccccgtaacttagaagcaataaatcaagttcaccaggagggggtacaaaccagtaccaccacgaacaagcacttctgtttccccggtgacgttgcatagactgtccccacggttgaaagcgactgatccgttatccgctcgtgtacttcgagaagcctagtatcatcttggaatcttcgatgcgttgcgctcagcactcgaccccggagtgtagcttaggctgatgagtctggacattcctcaccggcgacggtggtccaggctgcgttggcggcctacctgtggctcaaagccacaggacgctagttgtgaacaaggtgtgaagagcctattgagctacacgagaatcctccggcccctgaatgcggctaatcccaaccacggagcaagtgctcacaaaccagtgagtggcttgtcgtaacgggtaactctgtggcggaaccgactactttgggtgtccgtgtttcctttttatttttgtatggctgcttatggtgacaatcagagattgttatcataaagcgtattggattggccatccggtgagtgttgtgtcaggtatacaactgtttgttggaaccactgtgttagctttacttctcatttaaccaattaatcaaaaacaatacgaggataaaacaacaatactaca

SEQ ID NO: 1201 - DNA, 750 bp, Aichivirus E
  source 1..750: mol_type = genomic DNA
ttccccttcccccttttcacggcccggccgcccgccgggtcgtcacccgttcagacacctacgggttatctgttcgggctataaatatgggcattcctcttcccccttccccttttgaagatgagtgcgcatattcttgactccgcctggattggccgcccaaggcgtgaacaagcagctaggccaccatgacactgcggtggtgtccgaacccgcgggtgccttcacgggcacctgtggtatgtaggactcccaccgtggtcttccctttccccctcaatctttccccctggttcgactaacgggaccagtgctggaacctgtccggtgaacggtatagcaggcccccccggcagaaacacccggtgcttaccccttaaggctagcccccttccatgaatttggttggggcaactagtgggtgtacagttggcgtgaaccctccggtctaggagtgctcttgcccaatcctctgtgtgtgccttgcagtagggactggcaatccttcgcgtaggtgatccgctgtgccatgccatcctggcgacaggaggcccagtgtgcgcaacctacgtcccttctgggtgctgcattgcattacctttggagtaagcttggtgtgccgaaaccccagggtttacgtaccactcgtggtgtgaggaatgtgccgcaggtaccccatccttgaggtgggatctgagcggtagctaattgtctagcaccactttcttccttttttctttgctggtcacg

SEQ ID NO: 1202 - DNA, 750 bp, unidentified
  source 1..750: mol_type = unassigned DNA; note = Coxsackievirus A14 gene for polyprotein, polyprotein region, strain1 sequence
ttaaaacagctctggggttgtacccactcacagggcccactgggcgctagcactctgattctacggaatccttgtgcgcctgttttataaccccctcccaatatgtaacttagaagcagcacatactaccgatcaatagtgggcatggcgcaccagccatgtctcgatcaagcacttctgtttccccggactaagtatcaatagactgctcacgcggttgaaggagaaagcgtccgttacccggctaactacttcgagaaacccagtagcaccactgaagctgcagagtgtttcgctcagcacttcccccgtgtagatcaggtcgatgagtcaccgcaatccccacgggcgaccgtggcggtggctgcgtggcggcctgcctgtggggcaacccacaggacgctctaaagtggacatggtgcgaagagtctattgagctagttagtagtcctccggcccctgaatgcggctaatcctaactgcggagcgcatgccttcaaaccagatggtagtgcgtcgtaatgggcaactctgcagcggaaccgactactttgggtgtccgtgtttccttttattcttacattggctgcttatggtgacaatcacagaattgttaccatatagctattggattggccatccggtgtgtaatagagcaataatttactcttttgttgcttttgttccattgaccttcactacactgaacactttacagtacatacttcaactcaactccagaaagcaatc

SEQ ID NO: 1203 - DNA, 750 bp, unidentified
  source 1..750: mol_type = unassigned DNA; note = Enterovirus A120 strain TRT/2013-23196, complete genome.1 sequence
ttaaaacagcctatgggttgcacccacccatagggcccactgggcgctagcactctgattctacggaatctttgtgtgcctgttttatagtccctccccccgacttgtaacttagaagtaatgcaaaccactggtcaatagcaggcatgacgcaccagtcatgtcttgatcaagcacttctgtccccccgggctgagtatcaatagactgctcacgcggttgaaggagaaaacgctcgttacccggctaactacttcgagaaacctagtagcaccattgaaactgcagagcgtttcgctcagcactccccccgtgtagatcaggtcgatgagtcactgcactcctcacgggcgaccgtggcagtggctgcgttggcggcctgcctatggggtaacccataggacgctttaatgtggacatggtgcgaagagtctattgagctagttagtagtcctccggcccctgaatgcggctaatcctaactgcggagcacacgcccttaatccaaggggtagtgtgtcgtaatgggcaactctgcagcggaaccgactactttgggtgtccgtgtttccttttatttttatactggctgcttatggtgacaattgagagattgttaccatatagctattggattggccatccggtgtgcaacagagctattatctacctgtttgttggatatataccactcacagctgacaaaacccttatcacattattgtacatcctacacttgaactcaagaaa

SEQ ID NO: 1204 - DNA, 750 bp, Enterovirus C
  source 1..750: mol_type = genomic DNA
ttaaaacaagctgtggggttgttcccaccccagaggcccacgtggcggctagtactccggtattgcggtacccttgtacgcctgttttatactccctgcccccgtaacttagaagcacaaagaaatcaagttcaacagcagggggtacaaaccagtaccaccacgaacaagcacttctgttcccccggtgacgtcgcatagactgtgcccacggttgaaaacgattgatccgttaaccgctcttgtacttcgagaagcctagtatcacattggaatctacgatgcgttgcgctcagcactcaaccccagagtgtagcttaggctgatgagtctggacattcctcaccggtgacggtggtccaggctgcgttggcggcctacctgtggcccagagccacaggacgctagttgtgaacaaggtgtgaagagcctattgagctacaagagagtcctccggcccctgaatgcggctaatcccaaccatggagcaggtggtcacaatccagtgattggcctgtcgtaatgcgcaagtccgtggcggaaccgactactttgggtgtccgtgtttccttttattttacacttggctgcttatggtgacaatcatagattgttgtcataaagcaaattggattggccatccggtgaaaactaaatacgctatttacctgtttgttggatttataccttcaacttacaacacttattgtattatttgcattgtgttattgattagacaacaatactaca

SEQ ID NO: 1205 - DNA, 750 bp, unidentified
  source 1..750: mol_type = unassigned DNA; note = Human poliovirus 2 strain NIE0711199, complete genome.1 sequence
ttaaaacagctctggggttgttcccaccccagaggcccacgtggcggccagtactccggtattacggtacccttgtacgcctgttttatactcccttcccctgtaacctagaagaagtaaattaagttcaataggagggggtacaaaccagtaccaccacgaacaagcacttctgtttccccggtgacgttgtatagactgtgtccacggtcgaaagcaattgatccgttatccgctcttgtacttcgagaagcctagtaccagcttggaatcttcgatgcgttgcgttcagcactcaatcccagagtgtagcttaggttgatgagtctggacatccctcaccggcgacggtggtccaggctgcgttggcggcctacctgtggcccaaagccacaggacgctagttgtgaacaaggtgtgaagagcctattgagctacaagagagtcctccggcccctgaatgcggctaatcccaaccacggagcaagggtgcatgaaccaatgcatgccttgtcgtaatgcgtaagtctgtggcggaaccgactactttgggtgtccgtgtttccttttatttttatattggctgcttatggtgacaatcagagattgttatcataaagcgaattggattggccatccggtgagtgttgtgtcgggtatacaactgtttgttggaaccactgtgttaactttgcttcttatttaaccaattaatcaaaaacaatacgaggataaaacaacaataccaca

SEQ ID NO: 1206 - DNA, 750 bp, Enterovirus C
  source 1..750: mol_type = genomic DNA
ttaaaacagctctggggttgttcccaccccagaggcccacgtggcggctagtactccggtattccggtacccttgtacgcctgttttatactcccctcccccgtaacttagaagaaacaaaccaagttcactaggagggggtacaaaccagtaccaccacgaacaagcacttctgtttccccggtgatattgtatagactgtacccacggtcgaaaacgattgatccgttatccgcttctgtacttcgagaagcctagtaccactttggaatcttcgatgcgttgcgctcagcactcaaccccagagtgtagcttaggtcgatgagcctggactttcctcactggcgacagtggtccaggctgcgttggcggcctacctgtggcccaaagccacaggacgctagttgtgaacaaggtgtgaagagcctattgagctacaaaagagtcctccggcccctgaatgcggctaatcccaaccatggagcaagggtgtacgaaccagtacatatcttgtcgtaacgcgcaagtccgtggcggaaccgactactttgggtgtccgtgtttccttttattttcatactggctgcttatggtgacaatcatagattgttatcataaagcgaattggattggccatccggtgagtgttgtgtcaggtatacaattgtttgttggaaccactgtgtcagctttacttctcatttaaccaattaatcaaaaacaatacgaggataaaacaacaataccaca

SEQ ID NO: 1207 - DNA, 751 bp, Parechovirus B
  source 1..751: mol_type = genomic DNA
cgcggccatgtttgtaagcatggccgtagggaccccccggtgggctgggtgcacttctcgccttttaggtgggggtgtggctcggctaccaccactgggtggcaaccagttttcatgtaatagccaaacaagtaacattaacacctaagcttctggtgcaccaccctgtctggttgaagccgcttggaataaaattggatagctaaggtggattgtcaaacatgcatttctgtctcctggatatccttaatatccaggtaagggctgtacccgggcggtcctactcttcacaggagtctgcataggtggctttcacctctggacagtgcactccctcccgctccctcacccaagttagctggaacacagaatgaaaaatgagcgaacactagaaccaggtgtagcgaccacacatatgccagcggatttcccctagtggtaacactagcctctgggcccaaaaggcacgtctttgaccatatgtgtgcacaatcccagtgatggttctatctagtagtttatttagtaattttgtgaactggctcactgaacgtgagttggaggcttaggaatggcgggctgaaggatgccctgaaggtacccgtaggtaacgataagctcactatggatctgatcaggggcccaccagcatatttgctgggtagaagtcttcggaccttgggttaaaaaacgtctaggcccgtcccccagagggatctggggtttccctaataaccccaatactgacatt

SEQ ID NO: 1208 - DNA, 752 bp, unidentified
  source 1..752: mol_type = unassigned DNA; note = unclassified Rosavirus sequence
ggttcccgcccccacctccgtcacagcctttcgaggctgtgctggaacggcgacagggagtttagacttcttgccgctatgggttcttctgccccgtgttttggacgcccggcatggcgttaaactgtcattccccctaccctttccctatttgtaactaagttgtgcctcgcccagacaggctgctaagacgcttgttgctacagcatgtttggactagcgagctctccataagtaaacttttccacccccttgggtgtctttgcccttggggacggtctggagccccgttgtcttagacagagtgtgtcggtgcaggctttctgctctggacccatgccggccacaaactcccatcagtgttgtgaagacggtaggacacaagtgaacaggtacagggaactttcttggaatgtagcgattactgcaagtgagcggacctcccctggtggtaacaccagcctctcaggccaaaagccacggtgttaacagcacccttgcagtaggccactgccccgtggtctccaggatctttctctttactcctagtaatttgtgaatctagctgttctgaagcatactggtgcaaaggctaaggatgccctgaaggtacccacaggtaacgttaagacactgtggatctgatcaggggcctgaatactgaagctttacagaggtagttcaggttaaaaaacgtctatgcctttcccccacgggagtgggggttcccccacacttttatcacaggcact

SEQ ID NO: 1209 - DNA, 753 bp, Enterovirus A
  source 1..753: mol_type = genomic DNA
tttaaaacaagctctggggttgtacccacccacagggcccactgggcgctagcactcttattctacggaatatttgtgcgcctgttttatagccctcccccattaagtaacttagaagtgatgtgcagcacagatcaatagcaggcatagcgcaccagctgtgtcttgatcaagcactcctgtttccccggactgagtatcaataaactgctcacgcggttgaaggagaaaacgttcgttacccggctaaccacttcgagaaacttagtaacaccattgaagctgtagagtgtttcgctcagcacttccccagtgtagatcaggctgatgagtcactgcgaccctcacgggcgaccgtggcagtggctgcgttggcggcctgcctatggggcaacccataggacgctctaaagtggacatggtgtgaagagtctattgagctggttagtagtcctccggcccctgaatgcggctaatcctaactgcggagcgcatgccctcaaaccagggggtggtgcgtcgtaacgggtaactctgcagcggaaccgactactttgggtgtccgtgtttccttttattctcatattggctgcttatggtgacaattgaagaattgttaccatatagctattggattggccatccggtgtgtaacagagcgattatcttctcttttattgcctttgtcccattgaccccaactgcgttaaacactctgcaatatatactctatcttaactctaggaagcgaac

SEQ ID NO: 1210 - DNA, 753 bp, Enterovirus C
  source 1..753: mol_type = genomic DNA
ttaaaacagcctgtgggttgttcccaccccagaggcccacgtggcggctagtactctggtattacggtacccttgtacgcctgttttatactcccttcccatgtaacttagaagcaaataacacaagttcaatagaagggggtacaaaccagtaccaccacgaacaagcacttctgttaccccggtgaagttgcatagactgttcccacggttgaaagcgaccgatccgttatccgctcaagtacttcgagaagcctagtatcaccttggaatcttcgatgcgttgcgctcatcactcaaccccagagtgtagcttgggctgatgagtctggacgtccctcactggcgacagtggtccaggctgcgttggcggcctacctatggcccaaagccataggacgctagttgtgaacaaggtgtgaagagcctattgagctacttgagagtcctccggcccctgaatgcggctaatcccaaccacggatcaggtgattgcaaaccagcaattagcctgtcgtaacgcgcaagtctgtggcggaaccgactactttgggtgtccgtgtttccttttattttactattggctgcttatggtgacaatcattgattgttatcataaagcgaattggattggccatccggtgaaagtaaaacaggttatttacctttttgttggatttactgcattatctaagcacactccagatttaattcgtatcgttcttgcgattaggagagcacacttttccagca

SEQ ID NO: 1211 - DNA, 753 bp, unidentified
  source 1..753: mol_type = unassigned DNA; note = unclassified Enterovirus sequence
ttgatcaaggcccagttggtgcactgggttgatcccacccacagggcccactgggcgcatgcactctggtatcacggtacctttgtgcgcctgttttatctcccctcccccccgtgtaatttagaagcataagcacaatgatcaatagacaacccagtgcaccaactgggccttgatcaagcacttctgttaccccgggccgactatcaataggctgctcacgtggctgaaggagaaaacgctcgttacccggccagttacttcgagaagcctagtaccaccatgaacgttgcgcagtgtttcgctccgcacaaccccagtgtagatcaggtcgatgagtcaccgcatcccccacgggtgaccgtggcggtggctgcgttggcggcctgcccatggggtaacccatgggacgctacaatactgacatggtgtgaagagtctattgagctaactggtagtcctccggcccctgaatgcggctaatcccaactgcggagcacgtgcttccaatccaggaggtagcgtgtcgtaacgggcaactctgcagcggaaccgactactttgggtgtccgtgtttcctttatctctttattggctgcttatggtgacaattgaaagattgttgccatatagctattggattggccatccggtatctaacagagcaatcatatacctgtttgttggatttgttccacttaacaaaacagagttccgtactttgtgttatattattaggttgaacacatcaaa

SEQ ID NO: 1212 - DNA, 753 bp, unidentified
  source 1..753: mol_type = unassigned DNA; note = Human enterovirus C isolate V2-TOL cl1, complete genome.1 sequence
ttaaaacagctctggggttgttcccaccccagaggcccacgtggcggccagtacaccggtatcacggtacccttgtacgcctgttttatactccctctcccctgtaacttagaagcaaataaaccaagttcaatagaaagggggtacaaaccagtaccaccacgaacaaacacttctgtttccccggtgaggttgtataaactgtccccacggttgaaaacgactgatccgttacccgctcttgtacttcgagaagcctagtatcatcttggaatcttcgatgcgttgcgctcagcactcgaccccggagtgtagcttaggctgatgagtctggacgttccccaccggcgacggtggtccaggctgcgttggcggcctacctgtggcccaaagccacaggacgctagttgtgaacagggtgtgaagagcctattgagctacaagagagtcctccggcccctgaatgcggctaatcccaaccacggagcaggtggttgcaatccagcaactagcctgtcgtaacgcgcaagtctgtggcggaaccgactactttgggtgtccgtgtttccttttattcttacaatggctgcttatggtgacaatcatagattgttgtcataaagcgaattggattggccatccggtgaaagtcagatcaactatttatttgtttgttggagccactgtgttagctttacttctcatctaaccaattaatcaaaaacaatacgaggataaaacaacaacactaca

SEQ ID NO: 1213 - DNA, 753 bp, Enterovirus D
  source 1..753: mol_type = genomic DNA
ttaaaacagctctggggttgttcccaccccagaggcccacgtggcggctagtactccggtattacggtacccttgtacgcctgttttatactcccttcccccgtaacttagaagtaacacaaatccaagttcaatagaagggggtacaaaccagtaccaccatgaacaagcacttctgtttccccggtgaaatcatagactgtacccacggttgaaagtgatcgatccgtcatccgctcttgtacttcgagaagcctagtatcaccttggaatcttcgatgcgttgcgctcaacactcaaccccagagtgtagcttaggctgatgagtctggacactccccaccggcgacggtggtccaggctgcgttggcggcctacctgtggtccaaagccacaggacgctagttgtgaacaaggtgtgaagagcctattgagctacaggagagtcctccggcccctgaatgcggctaatcccaaccacggagcaggtggtcataatccaatgattggcctgtcgtaacgcgcaagtctgtggcggaaccgactactttgggtgtccgtgtttccttttattttatcattggctgcttatggtgacaatctaagattgccatcatatagcttttggattggccatccggtgatacttcgagttatttagcttgctgcttacatttattttaaacaacatccagttaccagcattcctattttgtttttctttcattctgagttatctaataagtagttaga

SEQ ID NO: 1214 - DNA, 754 bp, Enterovirus A
  source 1..754: mol_type = genomic DNA
gagttcagacgtgtgccttccgatgtgggttgcacccacccacagggcccactgggcgctagcactctgataccacggtacctttgtgcgcctgttttatcaccctaccccacacgaaacttagaagcaatacataactgaccaatagtaggtgtggcgcaccagccacatcttggtcaagcacttctgtctccccgggttgagtatcaataagctgttcacacggctgaaggagaaaacacccgttacccggccaactacttcgagaaacctagtatcaccatgaacgttgcgaggtgtttcgctcagcacttcccccgtgtagatcaggccgatgagtcaccgcattccccacgggtgaccgtggcggtggctgcgttggcggcctgcctatgggttagcccataggacgccttaatactgacatggtgcgaagagtctattgagctagttggtagtcctccggcccctgaatgcggctaatcctaactgcggagcacatacccacaaaccagtgggcggtgtgtcgtaacgggtaactctgcagcggaaccgactactttgggtgtccgtgtttccttttatctttatattggctgcttatggtgacaatcagagaattgttaccatatagctactggattggccatccggtgtccaatagagctattatatacctgtttgttggattcaccccattgacctacaaatccctaaatactttgtgttatattttgaacttaaatacacgaaa

SEQ ID NO: 1215 - DNA, 754 bp, Enterovirus C
  source 1..754: mol_type = genomic DNA
ttaaaacagcctgtgggttgttcccaccccagaggcccacgtggcggctagtactccggtattacggtacccttgtacgcctgttttatatccccttcccctgtaacttagaagcagacaacacaagttcaatagaagggggtacaaaccagtaccaccacgaacaagcacttctgttaccccggtgacgttgcatagactgttcccacggtcaaaagcgatcgatccgttatccgctcaagtacttcgaaaagcctagtatcaccttggaatcttcgatgcgttgcgctcggcactcgatcccggagtgtagcttaggccgatgagtctggacgatcctcactggcgacagtggtccaggctgcgttggcggcctacctatggcccaaagccataggacgctagttgtgaacaaggtgtgaagagcctattgagctacttgagaatcctccggcccctgaatgcggctaatcccaaccacggatcaggtgattgcaatccagcaattggcctgtcgtaacgcgcaagtctgtggcggaaccgactactttgggtgtccgtgtttccttttaattttattgctggctgcttatggtgacaatcgtagattgttatcatagagcgaattggattggccatccggtgagattaaaacacattatttacctttttgttggatttaccacactatctacgtacactccagacttaatccgcatagtacttttaattagaagatcttatcattataaca

SEQ ID NO: 1216 - DNA, 754 bp, Enterovirus C
  source 1..754: mol_type = genomic DNA
ttaaaacagctctggggttgttcccaccccagaggcccacgtggcggctagtactccggtatcgaggtacccttgtacgcctgttttatactcccttcccccgtaacttagaagccaaaaatacaagttcaatagaagggggtacaaaccagtaccaccacgaacaagcacttctgttaccccggtgatgttgcatagactgtccccacggtcgaaagcgattgatccgttatccgcttaggtacttcgagaagcctagtatcaccttggaatcttcgatgcgttgcgctcatcactcgaccccggagtgtagcttaggtcgatgagtctggacgatcctcactggcgacagtggtccaggctgcgttggcggcctacctatggcccaaagccataggacgctagttgtgaacaaggtgtgaagagcctattgagctacttaagagtcctccggcccctgaatgcggctaatcccaaccacggatcaggtgattgcaatccagcgattggcctgtcgtaacgcgcaagtctgtggcggaaccgactactttgggtgtccgtgtttccttttaattttattattggctgcttatggtgacaatcatagattgttatcataaagcgaattggattggccatccggtgaaaataaaacacattatctacctttttgttggatttactacactgtctacacacactccagatataatttatatagttcttttaatcaggagatcttatcattataaca

SEQ ID NO: 1217 - DNA, 754 bp, Enterovirus C
  source 1..754: mol_type = genomic DNA
tggggacaaagttaacagctctggggttgttcccaccccagaggcctacgtggcggctagtactccggtattacggtacccttgtacgcctgttttatactccccaccccgcaacttagaagaagctaatcaagttcaataggagggggtacaaaccagtaccaccacgaacaagcacttctgtctccccggtgacattgcatagactgtccccacggttgaaagcgatcgatccgttatccgctcttgtacttcgagaagcctagtaccatcttggaatcagcgatgcgttgcgctccgcactcaatcccagagtgtagcttaggctgatgagtctggacattcctcaccggcgacggtggtccaggctgcgttggcggcctacctgtggcccaaagccacaggacgctagttgtgaacaaggtgtgaagagcctattgagctataagagagtcctccggcccctgaatgcggctaatcccaaccacggatcaagggtgcacgaaccagtgtataccttgtcgtaacgcgcaagtctgtggcggaaccgactactttgggtgtccgtgtttccttttattgtttcaatggctgcttatggtgacaatcattgattgttatcataaagcgaattggattggccatccggtgaaagtgaaacatattgtttgcctccttattgggtctactccaatcgacctctttacctacaatcttattgccacagttttactggttagaagtgtgtttcaca

SEQ ID NO: 1218 - DNA, 755 bp, Aichivirus B
  source 1..755: mol_type = genomic DNA
cgcacgttcgcgtcgtcgtaagtctggattcccaaggccaacttggtttaacttcggtttctggacaaatacaaagaacctcagtcctcttggtactttctcgcctgagtcaacaaagcgagaaacctgcccctctaacgccagacgagcggcataaaacttgaacttctggcacgctccactcttccctctcccaatcccatccccatcgcgctctcaaggtcgcgcaattctgggactagcccagatttaaaagttcctggcaccctttgcccctttaggcccttaaggcaggaactgaccttgtgctgtgacctcggtgcggaagtgctactgcgtagtgattgtaagctcctcttatggttctgccctggcaaggctatagagtactgtgatccgctgcggatgccatcctggtaacaggacccccagtgtgcgtaacagtatgttcacggctcaccgtgttcaccatgactggaacactgctttcgtgaaacagtgtgtgtccaatccctgtgatcagtatcaaccacaccacctaggaatgctaggaaggtaccccggttcgccgggatctgatcctaggctaattgtctacagtggtgctcctttattttctctccaaccatttattgttcacaactgcttgatcttgtgtttgctgcctttctctgctctcactgccattctcaagtgttcacactgtccaagctcctttggttgttttcatccacttgccattgtcaactcttgtc

SEQ ID NO: 1219 - DNA, 755 bp, Enterovirus A
  source 1..755: mol_type = genomic DNA
ttaaaacagcctgtgggttgtacccacccacagggcccactgggcgctagcacactgattctgcgggatctttgtgcgcctgttttatatcccctccccccaaactaggtaacttagaagattagcacttgtatgaccaatagtaggcgtgacgcgccagtcatgtcttggtcaagcacttctgtttccccggactgagtatcaataagctgcttgcgcggctgaaggagaaaacgttcgttacccggctaactacttcgagaaacctagtaacaccatgaaagttgcggagtgtttcgctcagcacttcccccgtgtagatcaggtcgatgagtcactgcaaaccccacgggtgaccgtggcagtggctgcgttggcggcctgcctatgggtcaacccataggacgctctaatacagacatggtgtgaagagtctattgagctagttagtagtcctccggcccctgaatgcggctaatcctaactgcggagcacacgcttgcaaaccagtgagtagtgtgtcgtaatgggcaactctgcagcggaaccgactactttgggtgtccgtgtttccttttattctcatactggctgcttatggtgacaattgaagaattgttactatatagctattggattggccatccggtgtgtaacagagcgataatctactcctttgttgcatttgttccactaacccttactacattagacattctacaatacatactttatctcaactccaagaaacgaac

SEQ ID NO: 1220 - DNA, 758 bp, Enterovirus A
  source 1..758: mol_type = genomic DNA
aacacataaccgaccaataaaacagcctgtgggttgcacccacccacagggcccattgggcgctagcactctggtaccacggtacctttgtgcgcctgttttatcaccctaacccccacgaaacttagaagtaacacataaccgaccaatagtaggtgtggcgcaccagccgcatcttggtcaagcacttctgtttccccgggttgagtatcaataagctgttcacacggctgaaggagaaaacacccgttacccgaccaactacttcgagaaacctagtaccaccatgaacgttgcaaggcgtttcgctcagcacttcccccgtgtagatcaggccgatgagtcaccgcattccccacgggtgaccgtggcggtggctgcgttggcggcctgcctatgggttagcccataggacgccttaatactgacatggtgcgaagagtctattgagctagttggtagtcctccggcccctgaatgcggataatcctaactgcggagcacatactcacaaaccagtgagctgtgtgtcgtaacgggcaactctgcagcggaaccgactactttgggagaccgtgtttccttttatctttatattggctgcttatggtgacaatcagagaattgttgccatatagctattggattggccatccggtgtctaatagagctattatatacctgtttgttggattcactccgctgacacataaatcccttaatactttgtgttatatcttgaacttaaacacacgaaa

SEQ ID NO: 1221 - DNA, 758 bp, Enterovirus B
  source 1..758: mol_type = genomic DNA
tacaaaaaagcaggctttaaaacagctctggggttgttcccacccacagggcccactgggcgctagcactctggtatcacggtacctttgtgcgcctgtttttccacccctccccatacgcaacttagaagagagactcaaccggtcaatagacagcctagtacaccaactaggttctgaccaagaacttctgtttccccggaccgagtatcaataggctgcttacgcggctgaaggagaaaacgttcgttacccggccaattacttcgagaaacctagtatcaccatggaagttgcgcagtgtttcgctccgcacaaccccagtgtagatcaggtcgatgagtcaccgcattccccacaggcgactgtggcggtggctgcgttggcggcctgcccgtggggcaacccacgggacgcttcaataccgacatggtgcgaagagtctattgagctaattggtagtcctccggcccctgaatgcggctaatcctaactgtggagcagatacccacgcgccagtgggcagtctgtcgtaatgggcaactccgcagcggaaccgactactttgggtgtccgtgtttccttttatcctcataatggctgcttatggtgacaattgaaagattgttgccatatagctattggattggccatccggtgactaacagagcaattatttacttgtttgttgggtttgtaccattgaactacaaggtccttaatactctaaactacattataagtctcaatacagtgca

SEQ ID NO: 1222 - DNA, 759 bp, unidentified
  source 1..759: mol_type = unassigned DNA; note = unclassified Cosavirus sequence
acatgggggagactgcatgtggcagtcttgaaacgtgtggtttgacgtctaccttatatggcagtgggtggagtactgcaaagatgtcaccgtgctttacacggtttttgaaccccacaccggctgtttgacgctcgtagggcagcaggtttattttcattaaaattcttactttctagctgcatgagttctattcatgcagacggagtgatactcccgttccttcttggacaggttgcctccacgccctttgtggatcttaaggtgaccaagtcactggtgttggaggtgaagatagagagtcctcttgggaatgtcatgtggctgtgccaggggttgtagcgatgccattcgtgtgtgcggatttcctctcgtggtgacacgagcctcacaggccaaaagccccgtccgaaaggacccgaatggtggagtgaccctgactcccccctgcatagttttgtgattaggaacttgaggaatttctgtcataaatctctatcacatcaggccccaaagatgtcctgaaggtaccctgtgtatctgaggatgagcaccaccgactacccggacttgcattagcagacacatgtggttgcccagccccacctcttcagaggtggggctttgctcactcagcacaggatctgatcaggagccccgctcgtgtgctttacactcgacgcggggttaaaaattgcccaaggcctggcacaacaacctaggggactaggttttcctatttttgtaaattatgtcaat

SEQ ID NO: 1223 - DNA, 759 bp, Enterovirus A
  source 1..759: mol_type = genomic DNA
attggctcgagttacttaaaacagcctgtgggttgtacccacccacagggcccactgggcgctagcacactggttctgcgggacctttgtgcgcctgttttataacccttccctaagcagtaacttagaagctttgtacaatcatggccaatagtgggcgtggcgcgccagtcacgtcttggtcaagcacttctgtatccccggactgagtatcaatagactgctcacgtggttgaaggagaaaacgtccgttacccggctaactacttcgagaaacctagtagcaccatgaaagttgcggagtgtttcgttcagcacttcccccgtgtagatcaggtcgatgagtcactgtaaaccccacgggcgaccgtgacagtggctgcgttggcggcctgcccatggggtaacccatgggacgctctaatacagacatggtgcgaagagtctattgagctagttagcagtcctccggcccctgaatgcggctaatcctaactgcggagcgcgcaccctcaacccagggggcggcgcgtcgtaatgggcaactctgcagcggaaccgactactttgggtgtccgtgtttccttttattctttattggctgcttatggtgacaattgaaaagttgttaccatatagctattggattggccatccggtgtctaacagagctattgtttacctattcattggattcgtccctcttaatctcaaggtcattcaaactctcgattgcatattgctccttaactgtaagaa

SEQ ID NO: 1224 - DNA, 761 bp, Gallivirus A
  source 1..761: mol_type = genomic DNA
tccctacccaagccccagtacaccactatggagttctttatatcccagcgcgtggtggacgcactgtgaggtattccgataccaccccactcgcacttcctggatagtgcgttagatatgcccgacatatcgcttccaggaccaaagccccccttttctctttcccaaccagcttcgccactcaagctgtaattccatgtccggtctttccggccttagtatcatggaaatgtggtcgtgctcaaatgaaattgagttgacattgatcaatgaaagttgcactgaactttgctaaactggctagcgccacctggtgtgtgccgttggtctcctcacatggtaacatgtgccaacgggcccgaaaggctagtgggcaattaccgctccaagggaggggtacccaccccgacctgaacagcggtaatgaagctcacctcccaggctctgaccccgagaagtttagttatttagtaggtgtaattagtacttgtgattggtcaatttgatagtagtttgaaacgttatggatgaatgagtagaccccctgaaggtaccccattacatgggatctgatcagggccacattctgcgtgtctccccgcacttgtggttaaaaccatgaaagttcatcccaaacaatcttttcctcttctttttcttttagtggtgacaacctactggattggtgattaccaatctgtactagtgttgtattaagacttgttgtgtggagaaaatggactctttcaagaagatttttg

SEQ ID NO: 1225 - DNA, 762 bp, Parechovirus B
  source 1..762: mol_type = genomic DNA
ttgaaaggggggccctgtggccaattttggccacagggttcccctggtggggtgggtacacttctcgctcgatgagtgggggtgtggctcattgcccacacctggttggttcccaggttcatacaataaccatcaataaacttttaacatctaagatagtattatcccatactagactggacgaagccgcttggaataagtctagtcttatcttgtatgtgtcctgcactgaacttgtttctgtctctggagtgctttacacttcagtaggggctgtacccgggcggtcccactcttcacaggaatctgcacaggtggctttcacctctggacagtgcattccacacccgctccacggtagaagatgatgtgtgtctttgcttgtgaaaagcttgtgaaaatcgtgtgtaggcgtagcggctacttgagtgccagcggattacccctagtggtaacactagcctctgggcccaaaaggcatgtcatttgaccactcaggtacacaaccccagtgatgcacacgcttagtaatggcttagtaacaaacattgattgatcatttgaaagctgttaggaggtttaggtatgacgggctgaaggatgccctgaaggtacccataggtaaccttaagcgactatggatctgatcaggggcccaccatgtaacacatgggtagaagtcttcggaccttgggttaaaaaacgtctaggcccgccccccacagggatgtggggtttcccttataaccccaatattgtata

SEQ ID NO: 1226 - DNA, 762 bp, Enterovirus A
  source 1..762: mol_type = genomic DNA
tacaaaaaagcaggctttaaaacagcctgtgggttgttcccacccacagggcccactgggcgctagcacactgattctgcgggatctttgtgcgcctgttttataacccctcccctaagcagtaacttagaagcttcacactattacgaccaatagtaggcgtggcgcgccagtcacgttttggtcaagcacttctgtctccccggactgagtatcaatagactgctcacgcggttgaaggagaaaacgttcgttatccggctaactacttcgagaaacctagtagcaccgtgaaagttgcggagtgtttcgctcagcacttcccccgtgtagatcaggtcgatgagtcactgtgaaccccacgggtgaccgtgacagtggctgcgttggcggcctgcccatggggtgacccatgggacgctctaatacagacacggtgtgaagagtctattgagctagttagtagtcctccggcccctgaatgcggctaatcctaactgcggagcgcgcaccctcaatccagggggccagcgcgtcgtaatgggtaactctgcagcggaaccgactactttgggtgtccgtgtttccttttattccttattggctgcttatggtgacaattgaaaagttgttaccatatagctattggattggccatccggtgaccaacagagctattgtttacctgtttattggatacgtccctctcaatctcaaagccattcaaactcttgattacatattacttcttaactgtaagaa

SEQ ID NO: 1227 - DNA, 766 bp, Aichivirus A
  source 1..766: mol_type = genomic DNA
tttcacaccctcttttccggtggtccggacccagaccaccgttactccattcagctacttcggtacctgttcggaggaattaaacgggcaccctacccaagggttacatgggaccatattcctcctcccctgtaactttaagttttgtgcccgtattcttgactccaggcggatgttgtgtcgcccgtcctgtgaacaaacagctagacactttcctcccctccctctgggctgctccggcagtccactccctccccccagcgtaacatgccccgctggagtgatgcacctggaagtcgtggacgtgggttagtaacttcggtgaaaacccactataatgacaactggttgacccccacactcaaaggactcgagtctttctcccttaaggctagcccggccacatgaatttgcagctggcaactagtgagtccaccatgtcccgcaacctcggctgcggagtgctgttccccaagcgtatgccttccttctgtaagagtgcgcctggcaagcacatctgagaagtcgttccgctgcgtcgtgccaacctggcgacaggtgacccagtgtgcgtagacttcttccggattcgtccggctcttctctaggaaacatgcgtgtaaggttcatgtgccaaagccctgcgcgcggtgttcttctactgccctaggaatgtgccgcaggtacccctacttcggtagggatctgagcggtagctaattgtctacgggtagtttcatttccatcttctcttcaggtcgacatc

SEQ ID NO: 1228 - DNA, 768 bp, unidentified
  source 1..768: mol_type = unassigned DNA; note = unclassified environmental samples sequence
tatttgtttatttatcacaataagcattacatgagtttgtttaataacatactctgcaaatttattgtaggtgtttagagattaaaccaatctcttttcatttacaaaaccaataagtttgtaaaatagtaaaatttttagccattctgattcaggaatcaaaactgatgtaccactatctgtattttgtgaaaaatcaaaacgacagtagactagaaattactttgtatctaggaatctgtgtctaacgacgatagttaggaacgtgttgcacatttcatgtgcaggcctttatcactaggtctttattaaaaaagtggttgcaagttgtaattgacaacatgtgtttagttaagtttacttctattcatgattatcagggatctccttatcccgctattattagcaaaaggagccttgcaggttataccgacctgcatatgaagcctctacattaatttgtaatttttgtaggaaactgagagggaaagtggcataaccctcgtcctcgcggcgtataatgattcttcggaagaatacgacgtaacccagccgtcacaggtgcccattctctgggattgcatgcttgcatgtcgttctaggatttttcaggaacatttttgagctatagtagtttagatacgctatttgcaatgatgaaactacctagggtgggattatgagaaattcaactttgatctatttttcacaataggttgaggttggattttctcgtatttgggtttggggggtatactatttcaaatc

SEQ ID NO: 1229 - DNA, 769 bp, unidentified
  source 1..769: mol_type = unassigned DNA; note = unclassified Gallivirus sequence
ttgaccccggtatttctccgtctaaattagacggttcttttatatcccagtgcctgaagctggcactgtgaggttagtctactaaccaaggcttccgtgcagggcttgcacgttaggagttcatgttgattcatgctccaatgcccaaaactttgtgtgtttgtctgtgtctttcccaaagttcttcctaaggtttcggtactcaagccttaatctctggtcccagcttttgggccttagtatccagagaatgtacccgtgcttcgatgaacgtaagaaagctgtcttttaccgaaaaattttaatgaaataagtataactggctcgcgccacctggtgtgtgccgttggaattcccccatggtaacatggtccaacgggcccgaaaggctagtgggcaatcggtcctccaaggaaggggttcccaccccgacctgaacaggattcgatgaagctcacctcccaggctcctaaccccaaggaagtttacttaaagtaattaagatctagtacgtaattgctggcaattttgctagtagttgggaacgttatgacctaatgagtagacccccagaaggtaccccattttatgggatctgatctgggccctatactgtgtgtctccccacatatagggttaaaacaatgaaagttaggtccaaaatattcttttctttttattctttctttagtggtgacgccattatatcagcaatttgctgatgttttatagcgtacgcggcgatacgaacgattcatcactagagaaa

SEQ ID NO: 1230 - DNA, 770 bp, Aichivirus B
  source 1..770: mol_type = genomic DNA
cacccacttttccggcggcgcacgttcgcgtcgtcgtaagtctggactcccaaggccaactcggttcaacttcggtttccggacaaatacaagaacctcagtcctcttggtactttctcgcctgagtcaacaaagcgagaaacctgcccctctaacgccagacgagcggcatgaaacttgaacttctggcatgttccactttccctctccctcaccccaccccaccgcgctctcaaggtcgcgctcttccgggactagcccggttttaaaagttcctggcaccctttgcccctctaggcccttaaggtaggaactgaccttgtgctgtgatctcggtgcggaagtgctactgcgtagtgattgtaagatccctttgtggttctgccctggcaaggctacagagtactgtgatccgctgcggacgccatcctggtaacaggacccccagtgtgcgcaacagtatgtccacggtcttccgtgttcaccacattcggaacactgctctcgtgaaacagtgtgtgtccaatccctgtgaccagtattaaccacaccacctaggaatgctaggaaggtaccccggttcgccgggatctgatcctaggctaattgtctacagtggtgctccttttattttcccctcacttcattgactacaactgcttgatttccgtgtttgctgctcttcttagctctcactgccattctcaagtgttcacactgtccaagctcctttggttgtttgcctccacttgccactgtcaactcttgtc

SEQ ID NO: 1231 - DNA, 770 bp, unidentified
  source 1..770: mol_type = unassigned DNA; note = Coxsackievirus A10 strain 15-2711-1, complete genome.1 sequence
cacgtgagtgttgctcttacgtgtgctattccattctgtgggttgttcccacccacagggcccactgggcgccagcactctgattccacggaatctttgtgcgcctgttttataacccttccccaacttgtaacgtagaagtaatacacactacagatcaatagtaggcatggcgcgccagtcatgtctcgatcaagcacttctgtttccccgggctgagtatcaatagactgctcacgcggttgaaggagaaaacgtccgttacccggctaactacttcgagaaacctagtagcaccatagaagctgcagagtgtttcgctcagcacttcccccgtgtagatcaggctgatgagtcactgcaacccccacgggcgaccgtggcagtggctgcgctggcggcctgcctatggggcaacccataggacgctctaatgtggacatggtgcgaagagtctattgagctagttagtagtcctccggcccctgaatgcggctaatcctaactgcggagcacatgcctccaatccaggaggtggtgtgtcgtaacgggtaactctgcagcggaaccgactactttgggtgtccgtgtttctttttatctttatattggctgcttatggtgacaatcacggaattgttgccatatagctattggattggccatccggtgtctaatagagctattgtgtacctatttgttggatttactccactgtcatataaatctttgaacactttgtgctttatattgaacttaaacacacgaaa

SEQ ID NO: 1232 - DNA, 773 bp, unidentified
  source 1..773: mol_type = unassigned DNA; note = unclassified Sapelovirus sequence
gtggggtacatgcgttttaaggaacgcatgtatctcacactcatttctccccctcgcccccacaggcaacccccaccccttctcttacgggagttagggttaaggatctagtggtcaggcgttgtatcctcttacctttacccaccccacccacacggactggttaatggttttagactgaggttgtggatctgatttcaaatctgttacccattcagaggaaaaatggagtcatacattctggatttgacttgatatgaccaagagttaacaccttgcgtgttggccgtatggaatgttttaaggctactctatggattatgatttcagggttggccgcccaggataaaaggcaattgtggtaagtgatgttagtcattggtagttgaaagctgcccaagacatccgaggtctacgctttgcgggccggagtaagcttgggaacaacagtgagtatgctattttttgctttcacccaacacgaccgtgcatgaaagagctagaggcatctggaggcaaagggaaaagaatttcttatcccgaatgttcattcgagtccttgacgagtgcatccctactgtcccgtaggtgaggtgtatggcgcatgctcatggcattactccaaggtgtatctgtgaggggggggcccctcacacttagtctagtgctacctgacagggttgcggctggtcatttatgcatggtataaccagtagtaatcccccatggattgctttaactccccctccccccttacaaagacattctctaag

SEQ ID NO: 1233 - DNA, 773 bp, unidentified
  source 1..773: mol_type = unassigned DNA; note = unclassified Enterovirus sequence
ggcgtcagtacactggtacgtcagtacctttgtacgcctgtttttccctcccttaaataaattaagatcaccactactgaggggagtagtccgactccgctccggtaccgccgcaccagtattccggtacgcctagtaccctaatacggagtagatggtgtccctcacccgaaacttagaagaaagtaaactacccgaccaataggagcgcggcatccagtcgcgtatcggtcaagcacttctgtttccccggtctgcatagatcgttacccgcccgacccactgcgagaagcctagtagctggccaagcgaatgcgaggttgcgctcaaccacaaccccagtggtagctctggaagatggggctcgcaaactcccccgtggtaacacggttgcttgcccgcgcgtgcttccgggttcggtctcacgccgttcacctcaacctcgcgtaaccagtcaagagcttattgcgctggggcggttctcctccggggccgtgaatgctgctaatcctaacctctgagcgtgtgcgcacaaaccagtgttgctacgtcgtaatgcgcaagttggaggcggaacagactactttcggtaccccgtgtttcctttaattttatatttcaatttatggtgacattgactgacatttgccaagttgctcggttacctctgaacattgctttgtattatctgatagctttctacaaaaccacccagctttcacttgaactcattgagtttgtagtttatttgaaccaagcacacaaattctacg

SEQ ID NO: 1234 - DNA, 774 bp, unidentified
  source 1..774: mol_type = unassigned DNA; note = unclassified Enterovirus sequence
tattttccaggtggaatggggatgcaggcctgagttgtttttgcccccaaggaataaatcaatattcccagagccgaggggagtagtccgactccgctccactacggtgctccagtagattgctattgcggtagctctctacggggtggctggtattcctcaccctgaaacttagaagtttgtacacaccgaccaatagcggtctggcagccagccaggcaacggtcaagcacttctgtttccccggtccgcaaggatcgttacccgcccgaattgctacgaaaagcctagtaagtacccaagtttgtgcgaggttgcgttcagccacaatcccagtggtagctctgagtgatggggctcgtgattacccctctggtgacagagacacttgcccgcgcgtgcacttgggttcaccagaaatggtgttcacctcaatcaagcgcaagtactgaagagccaattgtgccaatttggtctcctccggggccgtgaatgctgctaatcctaacctccgagcgtgtgcgcacaatccagtgttgctacgtcgtaacgcgtaagttggaggcggaacagactactttcggtaccccgtgtttccttattttattcatttaaatttatggtgacaattgttgagatttgtgagctagcaaaattaccattgaatttggcattgtactgtctcattgcttttcacaaaacctcagatatcccacccagttacattgatcttttagttcatttgaatttacagttcaaactgagacaagtaaa

SEQ ID NO: 1235 - DNA, 775 bp, unidentified
  source 1..775: mol_type = unassigned DNA; note = unclassified Hepatovirus sequence
ttgaaaggtggccggagggtttcttgaagccctccgacgcctttcagcgcccggttcacaggggtgtaagtactgtgggcccgtttgccgtgggatacggctgcctgtgtctcaggggtaagtactggggccgtgttaaccgtgcgttacggttttgcttttagattaggatgtccgactgtccggcactctcttttgcttaaaatggccttaaatccatgggaggcgtaaccatgggccctttgttacctagacatgattgcattgggggccgtccttggggcttcggccccagccaatttcccttgactcgtctaagagtttgtttcatccttttcttttcttttattttccaggctctcggcatgccaacggctctgaccactgcgcccggtggggttaaccacacgactagcgtgtggctgtaggagttaaaagtgccgacaggccaattctgacgtaagttcattctatgttaacttgaccacgtaaggttgactgatctttgtgagagggtaggctacgggtgaaaccctctaggttaatactcatattgagagatacctccagaaggtgaaggttggcggatattggtgagttcttttaggacaaaaacctttcaacgcctgtgggcccacctcactggcacaatgctttcatccccaattgtgatgggtagtttggactgaaatcaggagtaacctgccctacgagtttaggggtagttcaggggtatttaggcttccacatttgatagagtttatgagagtgagcc

SEQ ID NO: 1236 - DNA, 775 bp, unidentified
  source 1..775: mol_type = unassigned DNA; note = Coxsackievirus A4 isolate 06/Taian/SD/2017, complete genome.1 sequence
tttcaaaagaatattaggaggggggggttttaaaacagcctgtgggttgtacccactcacagggcccactgggtgctagcactctgattctgcggaacctttgtgcgcctgttttaaaacccccccctcaattcgtgatttagaagtaatgcacaccattgatcaacagcaagcgtggcgcaccagccatgttcagatcaaacacttctgtttccccgggctgagtatcaatagactgctcgcgcggttgaaggagaaaacgctcgttacccggctaactacttcgagaaacctagtagcaccattgaaactacagagtgtttcgctcagcactttccccgtgtagatcaggtcgatgagtcactgcaatccccacgggcgaccgtggcagtggctgcgttggcggcctgcctatgggcttgcccataggacgctctaaagtggacatggtgtgaagagtctattgagctagttagtagtcctccggcccctgaatgcggctaatcctaactgcggagcgcatgccctcaatccagggggtggtgcgtcgtaacgggcaactctgcagcggaaccgactactttgggtgaccgtgtttccttttattcttatattggctgcttatggtgacaattgagagattgttaccatatagctattggattggccatccagtgtctaacagagcaatcgtatacttatttgttggattcatcccactatcatacatatccattaacaccttatactatattataagattgaacacaagaaa

SEQ ID NO: 1237 - DNA, 776 bp, Cadicivirus B
  source 1..776: mol_type = genomic DNA
agaaaaggccccccggggggataccgtctatggtatctctacgaggtcttttcgaacactccacatcatgagtgtataataaactgatgacctttaaatttcaccaacccttgacctgtaatgtcagtggacagagtgctcctctgttcccggttaccgtgttccaggacacgattgtaatcctgcgcctcaccagcgctgcgtgcacgtctgcataaggaaacgtgccttccccatgtctctatcaattctttggtgagtgaccgccctagttgctcatcctatgggattcttctctcatgggttctttgtggcatgcgaatgtcaccttaattggaggtctttaattagatatcctttcttcatctttgatatgagtgtcggaatttgattcctagtctctgcaaaacaaccccacttgatgaattcaacttttcaaccgcacaaacataatcaggtttttaaattgaatgtttctaaattctaaatttagtttatttaagtagtttgccatcttgactcgatgtaaaattgtcatacaagtcttcttttcttttctttacactttgaagtttgcacttagcagtcgttctgcacagctttcgagttttgtttgatcgacatcgcaacttccacccacctctctttttctagtgttgaatgcggctaatcctaacccgagagcaataaacccaggtttattgtcgtaacgcgcaagtcttggacggaaccgactatacacacacctctttaccctttagtacacccttggtacg

SEQ ID NO: 1238 - DNA, 776 bp, unidentified
  source 1..776: mol_type = unassigned DNA; note = unclassified Picornaviridae sequence
tgaaatggcctgggggtagcatgtacgctaaggcgtgcatgttactcccagaccatttctccccaccccctcaccttgccttttccccctcatttaatttttgtcgtaagtggcatcgacaaccacacaatttaaggagaggggcagccgtggaaactaaaagaccctaattggtatcttaatgtgctaaagccttgttctgaagaggggttccccaggccccatagtaggatcttggtgttccacattaagctctaccgaccacacatccaaacgataggcggtgtaagggctctctagctaagtgtttactcattgctagggaagtgttgcgacccgttatcaatagggatacaggaggtcttagttgcctaaccagataaagtggtgctgaaatattgcaagctcaatgtctggcgaacgacggactaccgttgaactgttgttaacgcccatatgtgtaggcaacatatgggttagtaggtcacttacattgacatccgtgccgggaaagcggatctgagctatcgattgcctgatagggtgccggcgggcgcggtacgtgtggtatagtccgctgttttggggtatggcgtctactcggttttgttgtcgtttcggaatgtcccatgtcggagatgtcgttaccggtgtttgttttacttgtgcacggataaggaagcaaagtttggagttctggaagctaatggataacattaagtttccgttgcgttcttcgtgcattttgggccagaaaatcgaccacaaaatcgaga

SEQ ID NO: 1239 - DNA, 779 bp, unidentified
  source 1..779: mol_type = unassigned DNA; note = unclassified environmental samples sequence
aataaggtatgctgtttatttattaaacagtgtatcttattttgccctcatcgagagttggaggttaactaacatcctttgccacatggagtctctgtggttggttccctggccatgtatttttacaaaacagatgtgccctttgcagcttatgcaattttcggttgtttccccttttgttcgcaagattgtctcttcatttgagattttgacgttttcactcgtagtactatatgagagtgatttattacattttattttgttagcaagattggtttagttccgtcttttcttagcggagttgcacacttttctttattgctaattgcattcaccctttactggtttttcctactagttcagatcattgcaatttgttaatttccttgtctgtttggcgacccccttagtagagaggttatgatgcatcaagtgaattatgaaacagggtgtctatttaagcatttgttcttaattacgttttctttgaaaaccatttcggtggtttggcttgaattggtccctagtcacgtagttggaatgtattaagtttatttatagtcccagtgttcacggtgtttttgatcctttttgaacgggattgtacccgttcagataattcagaatttagcaaagggatttgtaatttgttccctttattggttttacaccgagacaactaccggtgacctggacatcgacaacacatcctaggggaatggcatcaccttacgagccaccacaactaaaacacaaatatacattacaatttaattatt

SEQ ID NO: 1240 - DNA, 787 bp, Enterovirus A
  source 1..787: mol_type = genomic DNA
gtcaacacggtgttgtcggtattgtgtctaccggtggtaatgggcttgttggcttcgcagtgttcccacccacagggcccactgggcgccagcactctgattccacggaatctttgtgtgcctgttttacaaccctttcctaatttgtaacgtagaagcaatatacactactgatcaatagcaggcatggcgcgccagtcatgtctcgatcaagcacttctgtttccccggactgagtatcaatagactgctcacgcggttgaaggagaaaacgttcgttatccggctaactacttcgagaaacctagtagcaccatagaagctgcagagtgtttcgctcagcacttcccccgtgtagatcaggctgatgagtcactgcaatccccacgggcgaccgtggcagtggctgcgctggcggcctgcctatggggcaacccataggacgctctaatgtggacatggtgcgaagagtctattgagctagttagtagtcctccggcccctgaatgcggctaatcttaactgcggagcacatgccttcaacccaggaggtggtgtgtcgtaacgggcaactctgcagcggaaccgactactttgggtgtccgtgtttctctttatccttatattggctgcttatggtgacaattacggaattgttaccatatagctattggattggccatccggtgtctaatagagctattgtgtacctatttgttggatttactccgctatcatataaatctctgaacactttgtgctttatattgaacttaaacacacgaaa

SEQ ID NO: 1241 - DNA, 797 bp, unidentified
  source 1..797: mol_type = unassigned DNA; note = Kobuvirus sheep/TB3/HUN/2009, complete genome.1 sequence
tttgaaaagggggtgggggggcttcggccccctcaccctcttttccggcggcgcaagttcgcgtcgtcgtaagcctggacacccatgttcgcatcggtctccgggcaaatacaagaaccccagaccttctggtacttcttcgcctgggtcacaaaagcgaagaacctgcctctctaacgccagacgagcggcattaaacttgaacttctggcactctccactctcccttttccctgtccctttccccactgcgctctcaaggtcgcgcaatcctgggactagcccagttttaaaagttcctggcaccctttgcccctctaggcccttaaggtaggaactgaccttgtgctgtgatctcggtgcgggagtgctaccacgtagtcatcgtaagcctcgtttctggttctgccctggcaaggctacagagtaccgtgttccgctgtggatgccatccgggtaaccggacccccagtgtgtgtagcggtatgttcacggtccgccgtgttcaccagattcctgacctggctttgctagaaatggtgtgtgcccaatccctgtgaccagtatcaattacatcacctaggaatgctaggaaggtaccccagtcctgagctgggatctgatcctaggctaattgtctacggtgatgctccttttattttcttacaactgctattgactgtctgattgctgattctgctcttgtgctcttctgctctggctcattctcaagggttctctttgtccaagatcctttggttctctccttgttccacttgccactgccaacgcttgtc

SEQ ID NO: 1242 - DNA, 798 bp, unidentified
  source 1..798: mol_type = unassigned DNA; note = unclassified Enterovirus sequence
gggttgttcccaccccagggcccactgggcgccagtacactggtacgctagtaccttggtattacggtaccattgtacgccagtacctttgtacgcctgttttatattccctacccccacatgtaactttagaagtttaagtaacaaagaccaataggagtccaacatccagttggattgcggtcaagcacttctgtttccccggacctagtagtgataggctgtacccacggccgaagatgaacccgtccgttatccggccagctacttcgagaagcctagtagcatcaaagatctgtcttggcgtttcgctcagcgcgttccccccgcgtagatcgggctgatgggtctccgcattccccacgggcgaccgtggcggaggccgcgtggcggcccgcctatggcgaaagccataggacgccatttcagtgacagggtgtgaagagcctattgagctagttggtagtcctccggcccctgaatgcggctaatcctaaccactgagcgtccaccagcaaaccagctgggagggcgtcgtaacgggtaactcggtggcggaaccgactactttgggtgtccgtgtttccttttgatcctattgtggctgcttatggtgacaacttacagttgttatcataaagcttttggattggccatccggaaaaagttatcagtgtttgatattgttcggctttcacgcctaccaataagacaatcactttacttgttagttgcattttatcccactaaggatatcactgagttacatcttcaattgctcctaacattatcagcaca

SEQ ID NO: 1243 - DNA, 798 bp, unidentified
  source 1..798: mol_type = unassigned DNA; note = unclassified Enterovirus sequence
gggttgttcccacccgcggggcccactgggcgctagtacactggtacgccagtaccttggtattacggtaccattgtacgtcagtacctttgtacgcctgttttatatcccttcccccacatgtaacattagaagtcaagtaaacaaagaccaataggagcccaacaaccagttgggttgcggtcaagcacttctgtctccccggacctagtagtgataggctgtacccacggccgaagatgaacccgtccgttatccggccagctacttcgagaagcctagtaacatcaaagatctgtcttggcgtttcgctcagcgcgttccccccgcgtagatcgggctgatgggtctccgcataccccacgggcgaccgtggcggaggccgcgtggcggcccgcctatggcgaaagccataggacgccatttcagtgacagggtgtgaagagcctattgagctagttggtagtcctccggcccctgaatgcggctaatcctaaccacggagcatccaccagcaaaccagctgggagggtgtcgtaacgggtaactctgtggcggaaccgactactttgggtgtccgtgtttccttttgatcctattttggctgcttatggtgacaacgataagttgttatcataaagcttttgggttggccacctggaaaaaattgtcagtgtttgatatcgctcggctttcacgcctaccagtcaaacaagctctttatctccttgttggattctactcaataaaggacataactcagtttcacataaatctgttgctttcattgtcagcaaa

SEQ ID NO: 1244 - DNA, 800 bp, unidentified
  source 1..800: mol_type = unassigned DNA; note = unclassified Enterovirus sequence
ggggttgtacccacccctggggcccacgtggcgccagtaccctggtacgttagtacctttgtacgcctgttttccccccccttaaacaaattaagatcgctggtcctgtggggagtagtccgactccgcaccgatacgtcgcaccagcactccggtacgcctagtaccctagtgcggaggtaccagtgtccccccccctcgaaacttagaagcaatgaaccaaaccgacccaaaaggatgcgttgcacccagcagcgtaatggtcaagcacttctgtttccccggccgcaaggtcgttatccgcccgcaccactacgagaagcctattaggcagccaagcttgcaaagcgttgcgttcagccacaaccccagtggtagctctgagagatgggactcgttgttcccccatggtaacatggtgacttgtccgcgtgtgctctcgggttcgccatcaggcgttcacgctgcacaagtgtaactgctgaagagcctattgtgctggagcggttttcctccggaaccgtgaatgctgctaatcctaacctctgagcgtgtgcgcacaaaccagtgttgctacgtcgtaacgcgtaagtcggaggcggaacagactactttcggtactccgtgtttccttattttatatcgtttcatttatggtaacaattactgagattttaaagattgccaagctgcccttaaacattggtttgtattatctagttgcattttataaaacctctgagctttcacttgaattgattgatttcttagtctttctaaacaagcataaattgaggaca

SEQ ID NO: 1245 - DNA, 801 bp, unidentified
  source 1..801: mol_type = unassigned DNA; note = unclassified Enterovirus sequence
cctgtgggttgtacccacccacagggcccaccgggcgccagtacactggtacgccagtaccatggtattacggtaccatgttacgtcagtacctttgtacgcctgttttatatcccctccccgaagtaaccttagaagtttaagtaacaaagaccaataggagtccagcaaccagctggattgcggtcaagcacttctgtttccccggacctagtagtgataggctgtacccacggccgaagatgaacccgtccgttatccggccagctacttcgagaagcctagtagcatcaaagatctgtcttggcgtttcgctcagcgcgtttcccccgcgtagatcgggctgatgggtctccgcataccccacgggcgaccgtggcggaggccgcgtggcggcccgcctatggcgaaagccataggacgccatttcagtgacagggtgtgaagagcctattgagctagttggtagtcctccggcccctgaatgcggctaatcctaaccacggagcgtccaccagcaaaccagctggcggggcgtcgtaacgggtaactctgtggcggaaccgactactttgggtgtccgtgtttccttttgatcctattttggctgcttatggtgacaacaataagttgttatcataaagcttttgggttggccacctggaaaaagttatcagtgtttgatattgttcggctttcacgcctaccaacaaaacaagccttatatttattggttgccttttgtcccttggcggaaattactgattttcacctaaagcttctgattacattgacggcaaa

SEQ ID NO: 1246 - DNA, 803 bp, unidentified
  source 1..803: mol_type = unassigned DNA; note = unclassified Kobuvirus sequence
ttgaaaagggtgtggggggggataccctccccctccacactcttttcgacggcgcgcctcggcaaggccgccgataccgcactgtgctacttcggtaccactctgcgggaatgacaatatgcccggtgtatagtttgcctgtttctcgcaccgttaccgctcgttcgggaatgtgaaactggcacccctcctctcccctaccaccctttctccttcgcccccattcataatttacaacgccgcacacagcggcggccgccaagggctagcctggcggttataaaaggaacctgggtctttccctcttcaagccaaaaggtaggttccctgtgtccctgaatgctcggtgaggaatgctgcaccgtaacgctttgtgaagtgtttgcaagttctggcccggcaagcctacagagtgctgtgatccgctgcggacgccatcctggtaacaggacccccagtgtgcgcaacagtatgttcagacttcggtttgttcacttgctttcatggaccattgcgcgaaagtgcgtgcgccatatccctgtacttcaggtgtgcttctctggaccctaggaatgctgcgaaggtaccccgtttcggcgggatctgatcgcaggctaattgtctatgggttcagtttcctttttctttactccacaattgactgcttaactgactctggatcttgtgcttccactgctctttctgctctcaaaacggcttcacttaccaactctcacctttcgaccaacaccatttacacactaacttttttcgactcttctgactcctggcttggtgaagac

SEQ ID NO: 1247 - DNA, 804 bp, unidentified
  source 1..804: mol_type = unassigned DNA; note = unclassified Enterovirus sequence
ctgtgggttgttcccacccacagggcccactgggcgctagtacactggtatgcctaacctcggtattacggtaccgttgtttacagtacctttgtacgcctgttttatatcccctccccacaagcaactttagaagtatcaagcaaataaggaccaataggagtccaacacccagttggatcatggtcaagcacttctgtctccccggacctagtagtgataggctgtacccacggccgaagatgaaaccgtccgttatccggccagctacttcgagaagcctagtagcatcaaagatctgtcttggcgtttcgctcagcgcgttttcccccgcgtagatcgggctgatgggtctccgcataccccacgggcgaccgtggcggaggccgcgtggcggcccgcctatggcgaaagccataggacgccatttcagtgacagggtgtgaagagcctattgagctagttggtagtcctccggcccctgaatgcggctaatcctaaccacggagcgtttaccagcaaaccagctggcggaacgtcgtaacgggtaactctgtggcggaaccgactactttgggtgtccgtgtttccttttgatcctattgtggctgcttatggtgacaacttacggttgttatcataaagcttttggattggccatccggaaagagttatcagtgtttgatattgttcggctttcacgcctaccattaagacaatcactttatttgttagttgcattttatcctgccaaggacattactgagtttcacctacaactttactcatacaattacatcaagt

SEQ ID NO: 1248 - DNA, 808 bp, unidentified
  source 1..808: mol_type = unassigned DNA; note = unclassified Kobuvirus sequence
tttgaaaagggggtgggggggcttcggccccctcaccctcttttccggcggcgcatgttcgcgtcgtcgtaagtctggattcccaaggcccactcggttcaacttcggtttccggacaaatacaaagaacctcagtcctcttggtactttctcgcctgagtctacaaagcgagaaacctgcccctctaacgccagacgagcggcataaaactcgaacttctggcacgttccaccaccccttctcctatcccaacccccattgcgctctcaaggtcgcgcttttccgagactagctcggattcaaaaagttcctggcaccctttaccccttcaggcccttaaggtaggaactgaccttgtgctgtgatctcggtgcggaagtgctactgcgtagtgattgtaagatccttttgtggttctgccctggcaaggctacagagtgctgtgatccgctgcggatgccatcctggtaacaggacccccagtgtgcgcaacagtatgttcacggtcttccgtgttcaccacattcggaacactgctttcgtgaaacagtgtgtgtccaatccctgtgatcagtatcaaccacaccacctaggaatgctaggaaggtaccccggttcgccgggatctgatcctaggctaattgtctacggtggtgctcctttttattttccacttcaactcactggttacaactgcttgatttctgtgtttgctgcttttctctgctctcactgccattctcaagtgttcacactgtccaagctcctttggttgttcgcttccacttgccactgtcaactcttgtc

SEQ ID NO: 1249 - DNA, 809 bp, Enterovirus G
  source 1..809: mol_type = genomic DNA
ttaaaacagcctgtgggttgttcccacccacagggcccactgggcgctagtacactggtatgccttacctcggtattacggtaccgatgtatatagtacctttgtacgcctgttttatatccctcccccacatgtaaccttagaagtttacacaaacaaagaccaataggagtccaacacccagttggattgcggtcaagcacttctgtttccccggacctagtagtgataggctgtacccacggccgaagatgaacccgtccgttatccggctacctacttcgggaagcctagtaacattctgaagtctctgaggcgtttcgctcagcacgaccccggtgtagatcgggctgatgggtctccgcataccccacgggcgaccgtggcggaggccgcgttggcggcccgcctatggcgaaagccataggacgcctcttagatgacagggtgtgaagagcctactgagctgggtagtagtcctccggcccctgaatgcggctaatcctaaccacggagcgtccaccagcaatccagctggcagggcgtcgtaacgggcaactctgtggcggaaccgactactttgggtgtccgtgtttccttttgatcctattttggctgcttatggtgacaacgataagttgttatcataaagctcttgggttggccacctggaaaaagttatcagtgtttgatattgttcggctctcacgcctaccaataagacaagccctatatttacttgttgcattttactcgtcagaagaaatcacagagtatcatttggatttgttactcacattaaggacaag

SEQ ID NO: 1250 - DNA, 809 bp, unidentified
  source 1..809: mol_type = unassigned DNA; note = unclassified Enterovirus sequence
gggggttgttcccacccctggggcccacgtggcgccagtactctggtacgttagtacctttgtacgcctgttttcccctcccttaaacaaattaagattaccactactgaggggagtagtccgactccgctccagcactgctgcaccagtgaattggtacgctagtacctctgcacggagtagatggtatcccccccccgaaacttagaagtttgcaacaaacccgaccaataggtgcgtggcatccagctgcgtaaaggtcaagcacttctgtttccccggtccacaaggatcgttacccgcccaacccactgcgagaagcctattaactggccaaacaactgaagagttgcgctccgccacgacccctgtggtagctctggaagatggggctcgcacttcccccgtggtaacacggttgcctgcccgcgcgtgcttccgggttcgacctagtgtcgttcactccaaagttgcgtaaccagccaagagcctattgcgctgggatggttttcctccggggccgtgaatgctgctaatcctaacctccgagcgtgtgcgcacaaaccagtgttgctacgtcgtaacgcgtaagttggaggcggaacagactactttcggtaccccgtgtttcctcttatttttatataatattttatggtgacaattgctgagatttgtgatttggccaccctaccattgaatattgctttgtattatctggttgcatttcataaagcttcagaaatacctgcttcctatatcgatctacttgtattcctcaatttaaagcacaaattagagaacataag

SEQ ID NO: 1251 - DNA, 811 bp, Enterovirus G
  source 1..811: mol_type = genomic DNA
ttaaaacagcctgtgggttgttcccacccacagggcccactgggcgctagtacactggtatacttagcctcggtattgcggtaccggtgtatatagtacctttgtacgcctgttttatgtcccctcccccttaagtaacattagaagtttgaacaaacaaagaccaatagaggtccaacatccagttggattgcggtcaagcacttctgtctccccggacctagtagtgataggctgtacccacggccgaagatgaactcgtccgttatccggctatccacttcgggaagcctagtagcatcaaagctctgtcgaggcgtttcgctcagcacgtaaccccagtgtagatcgggctgatgggcctccgcataccccacgggtgaccgtggcggaggccgcgtggcggcccgcctatggcgaaagccatgggacgcctcttggatgacagggtgtgaagagcctactgagctgggtagtagtcctccggcccctgaatgcggctaatcctaaccacggagcgtccaccaacaaaccagttggcagggcgtcgtaacgggtaactctgtggcggaaccgactactttgggtgtccgtgtttccttttgatcctatgttggctgcttatggtgacaacgataagttgttatcataaagcttttgggttggccacctggaaaacgatatcagtgtttgacattgttcggctttcacgcctaccaacgagaaaagctctttattgctgagttgcattttatccaaaagaggtaataaccaccttccatttacaactcttactcacattatcatcaag

SEQ ID NO: 1252 - DNA, 812 bp, unidentified
  source 1..812: mol_type = unassigned DNA; note = unclassified Enterovirus sequence
ttaaaacagcctgggggttgtacccacccctggggcccacgcggcgccagtactctggttcgattagaacctttgtacgcctgttttcccctcccttaaacaaattaagatctctgccaatgtggggagtagtccgactccgcaccgatacgtcgcaccagcagaccggttcgcttaggacccttctgcggattggtatgagtccctctcccgaaacttagaagtttggacaaaccgaccaataggtgcgtggcatccagccatgttacggtcaagcacctctgtttccccggtcagaaatgatcgttacccgccctacccactacgaaaagcctattaaccattgaaagtgatgaggagttgcgctcagccatgaccccgatggtagctctgagggatggagctcgcagttcccccgtggtaacacggttgcttgctcgcgtgtgcccttgggttcgaccatttggtcgttcactccaaatcatcgtaaatggccaagagccaattgtgctggggaggttttcctccggagccgtgaatgctgctaatcccaacctccgagcgtgtgcgcacaatccagtgttgctacgtcgtaacgcgtaagttggaggcggaacagactactttcggtactccgtgtttccttttattttattattatattaatggtgacactgtttgagatttgcgagattgccaaattgccactcaacattgcactctattatttggtatcattctacaatacctcagaacttacggttgagctcattgatttcctcgtctttttgaataaaaataaattaaagaca

SEQ ID NO: 1253 - DNA, 813 bp, unidentified
  source 1..813: mol_type = unassigned DNA; note = unclassified Enterovirus sequence
taataacagtctatgggttgttcccacccacagggcccactgggcgtcagtacactggtatgccagtaccttggtatcacggtaccattgtacgccagtacctttgtacgcctgttttatattcccttccccatacgtaactttagaagtttaagcaaattaagaccaataggagtccaacaaccagttggattgcggtcaagcacttctgtttccccggacctagtagtgataggctgtacccacggccgaagatgaacccgtccgttatccggccagctacttcgagaagcctagtagcatcaaagatctgtcttggcgtttcgctcagcgcgttccccccgcgtagatcgggctgatgggtctccgcataccccacgggcgaccgtggcggaggccgcgtggcggcccgcctatggcgaaagccataggacgccatttcagtgacagggtgtgaagagcctattgagctagttggtagtcctccggcccctgaatgcggctaatcctaaccactgagcgtccaccaacaaaccagttgggagggcgtcgtaacgggtaactcggtggcggaaccgactactttgggtgtccgtgtttccttttgatcctattttggctgcttatggtgacaacgataagttgttatcataaagcttttgggttggccacctggaaaaagttatcagtgtttgatattgttcggctttcacgcctaccattcagactaactctttatttgcttattgcattttacccatcggaggatattacagacttccatctacaactcttattcacattatcaacaca

SEQ ID NO: 1254 - DNA, 814 bp, unidentified
  source 1..814: mol_type = unassigned DNA; note = unclassified Enterovirus sequence
ttaaaacaggctgggggttgtacccacccccggggcccacgcggcgccagtactctggttcgattagaacctttgtacgcctgttttccccacccttaaataaatcaagatctctgccaatgtggggagtagtccgactccgcaccgatacgtcgcaccagcagaccggttcgcttaggacccttctgcggattggtatgagttcccacccttgtaacttagaagttctcacaaaccgaccaatagcggcgttgcatccagcagcgcaacggtcaagcacttctgtttccccggcgcgtcgcgtcgttacccgcccggtctactacgggaagcccagtatggtcccaattgattgcgcagttgcgttcggccacaaccccagtggtagctctgaggaatggggctcgcccttcccccacagtaatgtggtggcctgcccgcgcgtgtcctcgggttcactcctagagtgttcactgcaattttgagtaagatctgaagagcctactgtgctaggttggttttcctccggagccgtgaatgctgctaatcccaacctccgagcgtgtgcgcacaatccagtgttgctacgtcgtaacgcgtaagttggaggcggaacagactactttcggtactccgtgtttccttattttattcacttattttatggtgacactgactgatatttgtgagtttgctcggctgcccttgaatattgctttgtactatttaatagcatttcatagaaccactcaactttcaattgagcttattgacttcgccgtctttctcaatcagatacacaaaaccacacata

SEQ ID NO: 1255 - DNA, 814 bp, Enterovirus G
  source 1..814: mol_type = genomic DNA
ctaaaacagcctgcgggttgtacccgcccgcagggcccactgggcgctagtactctggtacgctagtacactagcacgttagtgcttttgtacgccagtacctttgtacgcctgttttattttcccttccccacatgtaactttagaagtttagaaacaaacaatgaccaataggagtccagcatccagttggattgcggtcaagtacttctgtttccccggacctagtagtgataggctgtacccacggccgaagatgaacccgtccgttatccggctacctacttcgggaagcctagtaacattctgaagtctctgaggcgtttcgctcagcacgaccccggtgtagatcgggctgatgggtctccgcataccccacgggtgaccgtggcggaggccgcgttggcggcccgcctatggcgaaagccataggacgcctcttagatgacagggtgtgaagagcctactgagctgggtagtagtcctccggcccctgaatgcggctaatcctaaccacggagcgtccaccggcaaaccggtcgggagggcgtcgtaacgggtaactctgtggcggaaccgactactttgggtgtccgtgtttccttttgatcctattttggctgcttatggtgacaacgataagttgttatcataaagcttttgggttggccacctggaaaaagttatcagtgtttgatattgttcggctctcacgccttccaacaaaacaggccttacttcttttaattgcattttatccatcggaggttattacagatttccatctgaagcttcttctcacagtagcagtaaa

SEQ ID NO: 1256 - DNA, 814 bp, unidentified
  source 1..814: mol_type = unassigned DNA; note = unclassified Enterovirus sequence
aaaccagtctgtgggttgttcccacccacggggcctactgggcgccagtggactggtacgccagtaccttggtatcacggtaccactgtacgctagtacctttacacgcctgttttataccccttccccaaacgtaacattagaagtttaacaagcaaagaccaataggagtccaacacccagttggattgcggtcaagtacttctgtctccccggacctagtagtgataggctgtacccacggccgaagatgaaaccgtccgttatccggccagctacttcgagaagcctagtagcatcaaagatctgtcttggcgtttcgctcagcgcgttttcccccgcgtagatcgggctgatgggtctccgcataccccacgggcgaccgtggcggaggccgcgtggcggcccgcctatggcgaaagccataggacgccatttcagtgacagggtgtgaagagcctattgagctagttggtagtcctccggcccctgaatgcggctaatcctaaccacggagcgtttaccagcaaaccagctggcggaacgtcgtaacgggtaactctgtggcggaaccgactactttgggtgtccgtgtttcctgttgatcctattttggctgcttatggtgacaacgataagttgttatcataaagcttttgggttggccacctggaaaaaagttatcagtgtttgatattgttcggctttcacgcctaccattaagacaatcactttatttgttagttgcattttatcctgccaaggacattactgagtttcacctacaacttttactcatacaattacatcaagt

SEQ ID NO: 1257 - DNA, 814 bp, unidentified
  source 1..814: mol_type = unassigned DNA; note = unclassified Enterovirus sequence
ttcaaacagcctgggggttgtacccacccctggggcccacgtggcgctagcactctggtatgcttagtacctttgtgcgcctgttttcccctcccttaaacaaattaagattgccactactgaggggagtagtccgactccgctccggtacagccgcaccagtactccggtgcgcatagcaccctagtacggagtaggtggtatcccttcccgaaacttagaagttatgaaccaaaccgaccaataggagcgtggcatccagccatgttgtggtcaagcacttctgtttccccggtccgcaaggatcgttacccgcccgacccactacgagaagcctattaactggccaagcgattgcgaagttgcgctcagccacaatcccagtggtagctctggaagatggggctcgcactccccccgtggtaacacggttgcttgcccgcgtgtgcttccgggttcggtcaccgaccgttcacttcaatctcgcgtaaccagccaagagccgattgtgctgggacggttttcctccggggccgtgaatgctgctaatcctaacctccgagcgtgtgcgcacaaaccagtgttgctacgtcgtaacgcgtaagttggaggcggaacagactactttcggtaccccgtgtttcttttgatttattttgtattttaatggtgacactgactgacatttgtgagtttgctcgattgcctttgaatattgctctgtattatctaatagcatttcacaagactacccaactttcactcgagcttattgactttgctgtttacttgaaccgcatacacaaactcaaca

SEQ ID NO: 1258 - DNA, 815 bp, Enterovirus G
  source 1..815: mol_type = genomic DNA
taaacagtcagggggttgtacccacctccggggcccacgtggcgtcagtgctctggtgcgttagtacctttgcacgcctgttttcccttcccttaaacaaattaagatcgccagcgccgaggggagtagtccgactccgctccactacggtgctccagtggattgctattacggtagctcttcacggggtggctggtgtccccaaccccgcaacttagaagccagcacagatcgaccaatagcggctcggcagccagtcgggcaacggtcaagcacttctgtttccccggtccgtaaggatcgttacccgcccaggatgctacgagaaacttagtaaacacccaagcttgtgagaggttgcgctcagccacaaccccagtggtagctctgagtgatggggctcgtgactacccctctggtaacagagacacttgcccgcgtgtgcactcgggttcatcagaaatggtgttcacctcgaccaagcgtaagtgttgaagagtctattgtgccagcctggtttcctccggggccgtgaatgctgctaatcctaacctccgagcgtgtgcgcacaatccagtgttgctacgtcgtaacgcgtaagttggaggcggaacagactactttcggtaccccgtgtttcctcattcattatttcaatttatggtgacaattacagagatttgtgaattggcgaaactaccactgaatttggccttgtattgtcttattgccttccacaaaacttctgatattccacccagttatatcgatctcctggtttatctaaatttacaatataaattgaaccagataca

SEQ ID NO: 1259 - DNA, 816 bp, unidentified
  source 1..816: mol_type = unassigned DNA; note = unclassified Enterovirus sequence
ttaaaacagcctaggggttgttcccacccctggggcccacgcggcgctagtactctggtacgtcagcacccttgtacccccgtttttccctcccttaaacaaattaagattaccactactgaggggagtagtccgactccgctccggtactgccgcaccagtactccggtacgtttagtactctagtacggagtagatggtatcccccacccttgcaacttagaaggaatcaaactacccgaccaataggcgcgcggcatccagccgcgttacggtcaagcacttctgtttccccggtccgcaagggtcgttatccgcccgctccactacgaaaagcctagtagccaaccaaacgactgcgaagttgcgttcagccacaaccccagtggtagctctggaagatggggctcgcaatacccccgtggtgacacggttgcttgcccgcgcgtgcttccgggttcggtcatgtaccgttcactttaatgtcgtgtaattggtcaagagcctattgtgctggagcggttttcctccggggccgtgaatgctgctaatcccaacctctgagcgtgtgcgcacaaaccagtgttgctacgtcgtaacgcgtaagtcggaggcggaacagactactttcggtaccccgtgtttcacttatttttactttatattttatggtgacacttgctgatatttgtgaatttgctcgcttgccgttgaacatagccttgtattatttagtagcattttacaacacaagccagctttcagttgaactcattgattttgctgtttacctcaattacatacacaaacacaaca

SEQ ID NO: 1260 - DNA, 816 bp, unidentified
  source 1..816: mol_type = unassigned DNA; note = unclassified Enterovirus sequence
tttaaacagtctgggggttgttcccacccctggggcccacgtggcgctagcactctggtacgctagtacctttgtacgcctgttttccccacccttaaataaattaagattaccactaccgaggggagtagtccgactccgctccggcacagccgcaccagtgcactggtacgctagtaccttttcacggggtagtcggtatccccccccgtaacttagaagcatgtaacaaaccgaccaataggtgcgcggcagccagctgcgttgcggtcaagcacttctgtctccccggtccgcaaggatcgttacccgcccactccactacgaggagcctagtaactggccaagtgattgcggagttgcgttcagccacaaccccagtggtagctctggaagatggggctcgcacatcccccgtggtaacacggttgcttgcccgcgtgtgcttccgggttcagtctccgactgttcacttcaacatcacgcaaccagccaagagccgattgtgctggagtggtcttcctccggggccgtgaatgctgctaatcctaacctccgagcgtgtgcgcacaatccagtgttgctacgtcgtaacgcgtaagttggaggcggaacagactactttcggcaccccgtgtttcctttattttattcttattttatggtgacaattgcagagatttgtgatattgcgactttaccgttaaacatagcactgcattacctggttgcattccacaaaacttcagagattcctagttcctacattgacctacttgtttatttgaatcttaaatacaaacttgagcaagtgaa

SEQ ID NO: 1261 - DNA, 816 bp, unidentified
  source 1..816: mol_type = unassigned DNA; note = unclassified Enterovirus sequence
ttcaaacagcctgggggttgtacccacccctggggcccacgcggcgccagtactctggtacgctagtacctttgtacgcctgttttcccctcccttaaacaaattaagattgccactactgaggggagtagtccgactccgctccgacactgtcgcaccagtactccggtacgcttagtaccctagtacggagtaggtggcatccccaccccgaaacttagaagtatgcaaacaaaccgaccaataggcgcgcggtatccagccgtgtgaaggtcaagcacttctgtctccccggtccgtaaggatcgttacccgcccgacctactacgaaaagcctagtagttggccaagcgagcacgaggttgcactcaaccacaaccccagtggtagctctggaagatggggctcgcagttcccccgtggcaacacggttgcttgcccgcgtgcgcttccgggttcggacttgtgccgttcacctcaaactcgcgtaaccagcgaagagccgattgtgctaggacggttttcctccggggccgtgaatgctgctaatcccaacctccgagcgtgtgcgcacattccagtgttgctacgtcgtaatgcgtaagtcggaggcggaacagactactttcggtaccccgtgtttcctcttattttatttacattttatggtgacactgactgacattcgtgagctagcccgcttgcctctcaatattgcactttattatttggtagcattttacaatactctcgaacttacccttgagcttgttgatttcatcgtttacctaaatcggcttgacaaaggatacaata

SEQ ID NO: 1262 - DNA, 817 bp, unidentified
  source 1..817: mol_type = unassigned DNA; note = Enterovirus E3 polyprotein gene, partial cds.1 sequence
ttaaaacagcctgggggttgtacccacccctggggcccacgtggcgccagtactctggtacgctagtacctttgtacgcctgttttccccacccttaaataaattaagattaccactactgaggggagtagtccgactccgctccgacactgccgcaccagtattccggtacgcttagtaccctaatacggagtagatggtatccccaccccgcaacttagaagcatgcaaacaacccgaccgataggagcgcggcatccagtcgcgtataggtcaagcacttctgtttccccggtccgaaaggatcgttacccgcccaacccactacgagaagcctagtaactggccaaacaaccgcaaagttgcgctcagccacaaccccagtggtagctctggaagatggggctcgcacctcccccgtggtaacacggttgcttgcccgcgtgtgcttccgggttcggcctagtgccgttcactttaaagttgtgtaaccagcaaagagcctattgtgctgggatggttttcctccggggccgtgaatgctgctaatcccaacctccgagcgtgtgcgcacaaaccagtgttgctacgtcgtaatgcgtaagttggaggcggaacagactactttcggtaccccgtgtttccttttattgttatttacattttatggtgacactgactgacatttgtgaatttgctcgcttgcctctcaatattgcactatattacctgattgcatttcacaacactagtaaactaacccttgaacttatcgactttgctgtttacctaagtcacttaaatcacaagtacaata

SEQ ID NO: 1263 - DNA, 817 bp, unidentified
  source 1..817: mol_type = unassigned DNA; note = unclassified Enterovirus sequence
ttcaaacagcctgggggttgtacccacccctggggcccacgtggcgccagtactctggtacgttagtacctttgtacgcctgttttcccctcccttaaataaattaagattgccactactgaggggagtagtccgactccgctccggcactgccgcaccagtactccggtacgcctagtaccctagtacggagtagatggtatcccccccccgaaacttagaagtaatgagtctaaccgaccaataggcgcgcggcatccagccgtgttacggtcaagcacttctgtttccccggtccgcaaggatcgttacccgcccgacccactacgagaagcctattaactggccaagcgtcagtgaagttgcactcagccacaaccccagtggtagctctggaagatggggctcgcatctcccccgtggtaacacggttgcttgcccgcgcgtgcttccgggttcagcctcgcgctgttcacttcaatgacacgtaaccagccaagagccgattgtgctgggacggttttcctccggggccgtgaatgctgctaatcctaacctccgagcgtgtgcgcacaatccagtgttgctacgtcgtaacgcgtaagttggaggcggaacagactactttcggtaccccgtgtttcccttaaatttttccttaaatatatggtgacattgactgacatttgtgagtttgctcgcttgccaatcaacattgcactctattacctaatagcatttcacaatacttgtgaactcacccttgaacttgtcaatttctccgcctatttgaactacttaaatagaaagtataaca

SEQ ID NO: 1264 - DNA, 818 bp, Enterovirus E
  source 1..818: mol_type = genomic DNA
tttaaaacagctcgggggttgttcccactcccggggcccacgtggcgctagtactctggtacgttagtaccttgtacgcctgttttcccctccttaaacaaattaagattaccactactgaggggagtagtccgactccgctccagcactgctgcaccagtgaattggtatgattagtacctcttcacggagtagatggtattcctaccccgcaacttagaagtttattaacaaaccgaccaataggtgcacagtatccagctgtgtaacggtcaagcacttctgtttccccggtccaccaggatcgttacccgcccgacccactacgagaagcctagtaactagccaagtgactgcgaagttgcgctcaaccacaaccccagtggtagctctggaagatggggctcgcacctcccccgtggtaacacggttgcctgcccgcgtgtgcttccgggttcggccttgtgccgttcacttctacgtcatgtaactagccaagagcctattgtgctgggacggttttcctccgggaccgtgaatgctgctaatcctaacctccgagcgtgtgcgcacaatccagtgttgctacgtcgtaacgcgtaagttggaggcggaacagactactttcggtaccccgtgtttcctcttttattatattatttaatggtgacaattgcagaaatttgtgatttagcgactttaccattgcacatagcattatattgtttgattgctttccacaaaacatctgatatacccaactcttatatcgatctacttatctttctttgcttgaagaataaattaaagaaagcacg

SEQ ID NO: 1265 - DNA, 818 bp, unidentified
  source 1..818: mol_type = unassigned DNA; note = unclassified Enterovirus sequence
ttaaaacagcctgggggttgtacccacccctggggcccacgtggcgctagtactctggttcgttagaacctttgtacgcctgttttcccctccttaaacaaattaagatctctgccaatgtggggagtagtccgactccgcaccgatacgtcgcaccagtagaccggttcgcttaggacccttctacggattggtatgagttccccaccccgtaacttagaagtactagcaaaaccgaccaataggagcgtggcacccagctgcgttaaggtcaagcacttctgtctccccggccagaaatggtcgtcacccgccctctctactacgagaagcctattaaccattgaaggcgatgaggagttgcgctccaccacaaccccagtggtagctctgagagatggggctcgcagtcacccccgtggtaacacggttgcttgcccgcgtgtgctctcgggttcggccacttggccgttcactccaactcgttgtaagtggccaagagcctattgtgctagagaggttttcctccggagccgtgaatgctgctaatcccaacctccgagcgtgtgcgcacaatccagtgttgctacgtcgtaacgcgcaagttggaggcggaacagactactttcggtactccgtgtttccttattattttatacaacaatttatggtgacattgactgatactattgagttcgcccgcttgccattgaatattgccttgtattaccttatagcatttcaaaaagccacagatctcaccctcgagctcattcactttgcagtttgtttgaatcgcatacacaagacatttgaac

SEQ ID NO: 1266 - DNA, 818 bp, unidentified
  source 1..818: mol_type = unassigned DNA; note = unclassified Enterovirus sequence
ttaaaacagcctgggggttgtacccacccccggggcccacgtggcgccagtactctggtttgcttagaacctttgtacgcctgttttcccccccctttaaataaattaagatctctgccaatgtggggagtagtccgactccgcaccgatacgtcgcaccagcagaccggttcgcctagaacccttctgcggattggtatgagttcctccccgaaacttagaagcaccgcaccaaccgaccaataggagcgtggcacccagccatgttacggtcaagcacttctgtttccccggtcagaaatgatcgttatccgccctctcccctacgagaagcctattaaccaccgaacgtggtgaagagttgcgctcagccacaatcccagtggtagctctgagagatggggctcgcatttcccccgtggtaacacggttgcttgcccgcgcgtgctctcgggttcagtcttctgactgttcactctgaaccacggtaagtggccaagagcctattgtgctggagaggttctcctccggagccgtgaatgctgctaatcccaacctctgagcgtgtgcgcacaatccagtgttgctacgtcgtaacgcgtaagtcggaggcggaacagactactttcggtactccgtgtttccttattatctattaatcaatttatggtgacactgactgatattgttgagtttgctcgattgcccttgaacattgccttatactatcttattgcattttaatagagccacagagcttactgttgagcttattgactttgctgtttacttgaatcaaatatacgcattagataaac

SEQ ID NO: 1267 - DNA, 819 bp, unidentified
  source 1..819: mol_type = unassigned DNA; note = unclassified Enterovirus sequence
tttaaaacagcctgggggttgtacccacccctggggcccacgcggcgctagtactctggtacgttagtacctttgtacgcctgttttcccctcccttaaataaattaagattaccactactgaggggagtagtccgactccgctccgacaatgtcgcaccagtgcactggtacgctagtaccttttcacggagtagctggtattccctcccgaaacttagaagcacttaaatcaaccgaccaataggcgcgcggtagccagccgcgttacggtcaagcactcctgtttccccggtccacaaggatcgttacccgcccgacccactgcgagaaacctagtagttggccaagtggtaacgaggttgcgctcagccacaaccccagtggtagctccggaagatggggctcgcaccacccccgcggtaacgcggttgcttgcccgcgcgtgcttccgggtccggtctcgtaccgttcacctcaataccacgtaaccagcaaagagtctattgcgctgggacggttttcctccggggccgtgaatgctgctaatcccaacctccgagcgtgtgcgcacaatccagtgttgctacgtcgtaacgcgtaagttggaggcggaacagactactttcggtaccccgtgtttccctatcattccatttcattttatggtgacaattgctgagatctgtgatttggcgaccttaccactgaatattgccttatattacttggttgcattccacaaaacctctgacatacctgcttcctatatcgacctacttgttttcctcaatttaaagtatagactacaaatagcaga

SEQ ID NO: 1268 - DNA, 819 bp, Enterovirus F
  source 1..819: mol_type = genomic DNA
ttaaaacagcctgggggttgtacccacccctggggcccacgtggcgctagtactctggttcgtttagaacccttgtacgcctgttttcccctcccttaaacaaattaagatctctgccaatgtggggagtagtccgactccgcaccgatacgtcgcaccagcagaccggttcgcttagaacccttctgcggattggtatgagttccccccccttgcaacttagaagcatgagaacaaccgaccaataggagcatggcatccagccgtgtcacggtcaagcacttctgtttccccggccagagatggtcgttacccgccctacccactacgagaagcctattaactaccgaaatcagcgaagagttgcactcagccacaaccccggtggtagctctgagagatggggctcgcaacaacccccgtggtaacacggttgcttgcccgcgcgtgctctcgggttcagtctttgactgttcactccgacctgacgtaagtagccaagagcctattgtgctgggaaggttttcctccggagccgtgaatgctgctaatcctaacctccgagcgtgtgcgcacaaaccagtgttgctacgtcgtaacgcgcaagttggaggcggaacagactactttcggtactccgtgtttccttattttattaactccaatttatggtgacattgactgatattgttgtatttgcccgcctaccgttgaacatagctttatatcatctcattgcattcaagaaatccacagagcttaccctggaactccttgactttgcagttttcttaaatcggatacataaactcagtaaga

SEQ ID NO: 1269 - DNA, 819 bp, unidentified
  source 1..819: mol_type = unassigned DNA; note = unclassified Enterovirus sequence
ttcaaacagcctgggggttgtacccacccccggggcccacggggcgccagtactctggtatgcttaatacctttgtacgcctgtttttccctcccttaaataaattaagattaccactactgaggggagtagtccgactccgctccggtaccgccgcaccagtactccggtacgctcagtaccctagtacggagtagttggtattccctccctgtaatttagaagtatgaaattaaaccgaccaataggaggcgtggcatccagtcgcgttacggtcaagcacttctgtttccccggtccgtaaggatcgttacccgcccgacccactacggaaagcctagtaactggccaactggatgagaggttgcactcagccacaaccccagtggtagctctggaagatggggctcgcaccttcccccgtggtaacacggttgcttgcccgcgtgtgctcccgggttcggtccccgaccgttcacttcgattccaggtaaccagccaagagccaactgtgctgggacggttttcctccggggccgtgaatgctgctaatcctaacctccgagcgtgtgcgcgcaaaccagcgttgctacgtcgtaacgcgtaagttggaggcggaacagactactttcggtaccccgtgtttccttttattttacttattgtttatggttacactgactgatatttgtgagtttgctcgtttgcctttgaatattgctttgtattactttgttgcttttcacaaaacgacccagctcaccgttgaacttgtcgattttgctgtttttcttaatctaacctacaagaaacttaaca

SEQ ID NO: 1270 - DNA, 820 bp, unidentified
  source 1..820: mol_type = unassigned DNA; note = unclassified Enterovirus sequence
agtattaatgttgccgaattggactgacacaagttgaggagcacatagggcatggttgtaagaccactagcttgtacattccatgggcgatgctgggggtccacgtagccctcaggggaggcggtgacaagcagcgccccggccagtggcagacttgcaaaatttcctaccaaaccaccatctcactcctattaccccttccctctatacctttcgttatggtggttaccactgtttcattgccttggctgaaaatggccaccctctcgacacatgccccttgctgccccatcgtgcgactttccatttgtccactcagttagaaaagcacgggggtcctgtctgcgtcccgagcccggttggtgatcttcctcccccccgcccgattgatggcccggaggggtttgctgatgcgctttatgatgcttgcctgtccttcctccgtcggcgcgaacatgcgctcgttgagcttgcggaaatacagccttgcttccgtttctcccaccccgcataccctggccgcctcccgcttgaaattcgcttcgtccggcatcctggtgtgcctcccccgctgcgtgactttacccgtggcattcgacgccctggcattcagtacattccgctacctaacctaggcggtctcccccagtcccccgctcccccaattgcacacgtgatatccgccgctgtcaatgccgtgcgccgcggtagccactggcattgtcctctgcttcgtcaagtgtccactcacggctggctatttacctattctggctattggtgctctatcctgttgcatgaggggcgacatgaccacgac

SEQ ID NO: 1271 - DNA, 820 bp, Sicinivirus A
  source 1..820: mol_type = genomic DNA
tttaaaagagtcagggggttgtacccacccctggggcccacgtggcgctagtactctggtacgccagtacctttgtacgcctgttttcccctccctaaataaattaagattaccactactgaggggagtagtccgactccgctccggcaatgccgcaccagtgcactggtacgctagtaccttttcacggagtagatggtattcctcaccccgaaacttagaagcacgaaaacaaaccgaccaataggtgcatggcatccagccgtgttatggtcaagcacttctgtttccccggtccgcaaggatcgttacccgcccgacccactacgagaagcctagtaactgaccaagtagttgagaggttgcgctcagccacaaccccagtggtagctctggaagatggggctcgcacttcccccgtggtaacacggttgcttgcccgcgcgtgcttccgggttcggcctctgccgttcacctcgattctgcgtaatcagccaagagcctattgtgctgggacggtttcctccggggccgtgaatgctgctaatcccaacctccgagcgtgtgcgcacaatccagtgttgctacgtcgtaacgcgtaagttggaggcggaacagactactttcggaaccccgtgtttcctttgttttaattttaatgctttatggtgacaattgttgagatctgcgatctagcgaccttgccattgaacattgctttgtattatttggttgcattccacaaaacctctgacatacccagctcctatattgatcttttggtttatctaaacttaaaacacaaactcgaaggattgcg

SEQ ID NO: 1272 - DNA, 820 bp, Enterovirus F
  source 1..820: mol_type = genomic DNA
ttcaaacagcctgggggttgtacccacccctggggcccacgcggcgccagtactctggtacgcttagtacctttgtacgcctgttttccctttcccttaaacaaattaagattaccactgttgaggggagtagtccgactccgctccggcactgccgcaccagtactccggtatgcctagtaccctagtacggagcagatggtatccccctttccctgaaacttagaagtctgacgcaaacccgaccaataggagcgcggtatccaaccgcgtaacggtcaagcacttctgtttccccggtccgcaaggatcgttacccgcccgtcccactacgggaagcctagtaactggccaactgagtgagaggttgcgctcagccacatacccagtggtagctctggaagatggggctcgcactccccccgtggtaacacggttgcttgcccgcgtgtgcttccgggttcggtttcgaccgttcacctcaaccccaggtaaccagccaagagcctactgtgctggagcggttttcctccggagccgtgaatgctgctaatcccaacctccgagcgtgtgcgcacaaaccagtgttgctacgtcgtaacgcgtaagttggaggcggaacagactactttcggtactccgtgtttccttttgttttatctattgtttatggtgacactgtctgacatttgtgaatttgctcgcttacccttgaatattgcattgtattatctggttgcatttcacaacacaacccaactctccattgaactcatcaactttgctgtatttcttaacacaatacaaagaaagcgagata

SEQ ID NO: 1273 - DNA, 820 bp, unidentified
  source 1..820: mol_type = unassigned DNA; note = unclassified Enterovirus sequence
ttaaaacagcctgggggttgtacccacccccggggcccacgcggcgctagtactctggttcgtttagaacccttgtacgcctgtttttcccccccttaaataaattaagatctctgccaatgtggggagtagtccgactccgcaccgatacgtcgcaccaacagaccggttcgcctaggacccttctgcggattggtatgagtcccccccccgaaacttagaagcacattacaaactggccaataggagcgtggtatccaaccgcgttgcggtcaagcacttctgtttccccggtcagaaatgatcgttacccgccctccccactacgagaagcctattaaccactgaaagtgatgatgagttgcgctcagccacaaccccggtggtagctctgagagatggggctcgcaccacccccgtggtgacacggttgcttgcccgcgtgtgctctcgggttcagtcgcgagactgttcactctgactcattgtaggtggccaagagcctattgtgctggggaggttttcctccggagccgtgaatgctgctaatcccaacctccgagcgtgtgcgcacaatccagtgttgctacgtcgtaacgcgtaagttggaggcggaacagactactttcggtactccgtgtttccttaattttattgttcaaatttatggtgacattgtctgacatttgtgaattcgctcgcctgccacttaatatcgctttatatcatctgatagcattccataagactacagaactcactttggaactcatcgactttgctgttttcctgaatactgttcacaaccaaacaaaacaaa

SEQ ID NO: 1274 - DNA, 821 bp, unidentified
  source 1..821: mol_type = unassigned DNA; note = unclassified Enterovirus sequence
ttaaaacagcctgggggttgttcccacccccggggcccacgtggcgccagtactctggcacgttagtgcccttgtacgcctgttttcccctccttaaacaaattaagattgccactactgaggggagtagtccgactccgctccagtaccgctgcaccagtgagctggtacgctagtaccttcgcacggagtagatggcatcccccaccccgtaacttagaagcaaagtacacatctggccaatagtggcgctgcatccagccgcgcaacggtcaagcacttctgtttccccggtccgcaagggtcgttatccgcccagtccactacggaaagcctactaaccattgaagctatcgagaggttgcgctcggccacgaccccggtggtagctctgagtgatggggctcgcaaacacccccgtggtaacacggatgcttgcccgcgcgtgcactcgggttcagcctattggttgttcacctcaacatagtgtaaatggccaagagcctactgtgctggattggttttcctccggagccgtgaatgctgctaatcccaacctccgagcgtgtgcgcacaatccagtgttgctacgtcgtaacgcgtaagttggaggcggaacagactactttcggtactccgtgtttcttttgttttattttgaattttatggtgacaattgctgagatttgcgaattagcgactctaccgctgaacattgccctgtactacctaatcgcatttcacaaaacctcagagataccaagctcttacattgatctgcttgttttcctgaatctcaaatataaattggaacaagcaaa

SEQ ID NO: 1275 - DNA, 821 bp, unidentified
  source 1..821: mol_type = unassigned DNA; note = unclassified Enterovirus sequence
ttcaaacagcctgggggttgtacccacccctggggcccacgtggcgctagtactctggtacgttagtacctttgtacgcctgttttcccctcccttaaacaaattaagattaccactactgaggggagtagtccgactccgctccggtactgccgcaccagtactccggtacacttagtaccctagtacggagtagatggtatccccaccccgcaacttagaagcatgcaaacaaaccgaccaataggcgcacgatatccagtcgtgtttcggtcaagcacttctgtctccccggtccgaaaggatcgttacccgcccgacccactacgagaagcccagtaactggccaagtgattgcgaagttgcgctcagccacaaccccagtggtagctctggaagatggggctcgcgtctcccccgtggtgacacggtcgcttgcccgcgtgtgcttccgggttcggcctacgccgttcacttcaatgtcacgtaaccagccaagagcctattgtgctgggacggttttcctccggggccgtgaatgctgctaatcccaacctccgagcgtgtgcgcacaacccagtgttgctacgtcgtaatgcgtaagttggaggcggaacagactactttcggtaccccgtgtttcctttaaattttattcattattttatggtgacaattgctgagatctgcgaattagcgactctgccgttgaatattgctctgtactatttggttgcattccacaaaacctctgacatccccagtacatacattactttacttgtttacctcaatctaaagcacaagctagataatacaaa

SEQ ID NO: 1276 - DNA, 822 bp, unidentified
  source 1..822: mol_type = unassigned DNA; note = unclassified Enterovirus sequence
tttaaaagagcctgggggttgttcccacccccaggatgcccactcgtgggcatgtggtactgtggtatcgcggtaccacagtacgcctctttgaccgccctgacccaagaatcttttcctttaacagatctcttcgtaacaagggcctcagcctgacgcaagtgcctccattggagtctctccaagccctccggggcttggagggcgccgaccccctgcctagggggagcccacgacacggctggagtccattggcacaccgcagccacgattcaagccagaattgaaagcgggaagcacttctgtctccccggtgtggatcatacgctgtacccacggcgaaaagtgaagcatcgttacccgactcggtacttcgagaagcccagtacagttgtggatctctgcagggtatacgctcagcgtgacccctacgtagttccttgagatggctgagagaacaccccacgggcgaccgtgtctctcggcgcgtggctcaaggccgggccttcagtggctcggtgccttgcagagtgaagcctccgaacagcctattgagctaccgtttagcctccgccctcttgaatgcggctaatcctaaccatggagcgcccgcccacagtccagtgggtagagcgtcgtaacgcgcaagtccgtggcggaaccgactactttagagtggcgtgtttccaatttatcctttataaagttgcttatggtgacaccacaagagatccacgatttcttgtttcttatcactgagacacaagtcatattcatcaatctttattgcggaattaacttggtgcgtccaaacacatcagc

SEQ ID NO: 1277 - DNA, 822 bp, unidentified
  source 1..822: mol_type = unassigned DNA; note = unclassified Enterovirus sequence
tttaaaacagcctgggggttgtacccacccccggggcccacgtggcgccagtactctggtacgctagtacccttgtacgcctgtttttcccccccttaaataaattaagactgccactactgaggggagtagtccgactccgctccggcactgccgcaccagtacactggtatgttagtacctttgtacggagtaagtggtatccccaccctgaaacttagaagtatgcaaacaaaccgaccaataggtgcgcggtatccaaccgcgtaacggtcaagcacttctgtctccccggtccgaaaggatcgttatccgcccgacccactacgagaagcccagtagctggccaagtgaacgcgaggttgcgctcagccacaaaccccagtggtagctctggaagatggggctcgcacttcccccgtggtgacacggttgcttgcccgcgtgtgcttccgggttcggactcgtgccgatcacctcaaattcacgcaaccagtcaagagcctattgtgctgggacggttttcctccggagccgtgaatgctgctaatcctaacctccgagcgtgtgcgcacaatccagtgttgctacgtcgtaacgcgtaagttggaggcggaacagactactttcggtactccgtgtttcctttgaattttatcattattttatggtgacaattgctgaaatctgtgatttggcaactctcccactgaacatcgcactatactacctgattgcatttcacaaaacctccgatatccccagttcctatatcgacctacttgtttatctcaatttgaaacataaactaggacggttgaa

SEQ ID NO: 1278 - DNA, 822 bp, unidentified
  source 1..822: mol_type = unassigned DNA; note = unclassified Enterovirus sequence
tttaaaagagcctgggggttgtacccacccctggggcccacgtggcgctagtactctggtacgccagtacctttgtacgcctgttttcccctcccttaaataaattaagattgccactactgaggggagtagtccgactccgctccagcaatgctgcaccagtgcactggtacgccagtaccttttcacggagtagatggcatccccaccccgaaacgtagaagcatgcaaacaaaccgaccaccaggcgcgcggcatccaaccgcgttacggtcaagcacttctgtttccccggtccgcaaggatcgttacccgcccgacccactacgagaagcccagtaactggccaagtggtcgcgaggttgcactcagccacaaccccagtggtagctctggaagatggggctcgcagttcccccgtggtaacacggttgcctgcccgcgcgtgcttccgggttcggctctcgccgttcacctcaaccccacgtaaccagccaagagcctattgtgctgggacggtattcctccggggccgtgaatgctgctaatcccaacctccgagcgtgtgcgcacaatccagtgttgctacgtcgtaatgcgtaagttggaggcggaacagactactttcggtaccccgtgtttcctttatttttccttcaaaaattttatggtgacaattgttgagatttgcgatttggccactttaccattgaatattgccttgtattacttggttgcttttcacagaacctctgacatacccagttcgtatattgatcttcttgtttatttaaacctaaaacacaaacttagaaagctaag

SEQ ID NO: 1279 - DNA, 822 bp, Enterovirus F
  source 1..822: mol_type = genomic DNA
tttaaacagcctgggggttgttcccacccctggggcccacgtggcgctagtactctggtacgctagtacctttgtacgcctgtttttcccctcccttaaataaatcaaggttgccactactgaggggagtagtccgactccgctccagcaatgctgcaccagtgcactggtacgctagtaccttttcacggagtagatggtatcccttaccccggaacctagaagattgcacacaaaccgaccaataggcgcaccgcatccagccgtgcagcggtcaagcacttctgtctccccggtctgtaaagatcgttatccgcccgacccactacgaaaagcctagtaactggccaagtgaacgcgaagttgcgctccgccacaaccccagtggtagctctggaagatggggctcgcaccacccccgtggtaacacggttgcctgcccgcgtgtgcttccgggttcggtctcgtgccgttcacttcaacttcacgcaaccagccaagagcctattgtgctgggacggttttcctccggggccgtgaatgctgctaatcccaacctccgagcgtgtgcgcacaatccagtgttgctacgtcgtaacgcgtaagttggaggcggaacagactactttcggtaccccgtgtttcctctcattttatttaatattttatggtgacaattgttgagatttgcgctcttgcaacgttgccattgaatattggcttatactatttggttgccttttacaaaacctctgatatacccagttcttacattgatctgcttgtttttctcaatttgaagtatagactacaaatagcaaa

SEQ ID NO: 1280 - DNA, 822 bp, Enterovirus F
  source 1..822: mol_type = genomic DNA
tttaaaacagcctgggggttgtacccacccctagggcccacgtggcgccagtactctggtacattagtacctttgtacgcctgttttcccctcccttaaataaatcaagattaccactactgaggggagtagtccgactccgctccagcaatgctgcaccagtgcactggtacgctagtaccttttcacggagtagatggtatccccaccccgaaacttagaagcatgtgatcaaatcgaccaataggcgcgcggttgccagccgcgtttcggtcaagcacttctgtttccccggtccgcaaggatcgttacccgcccgacccactgcgagaagcccagtaactggccaagcggtagcgaggttgcactcagccacaaccccagtggtagctctggaagatggggctcgcagttcccccgtggtaacacggatgcctgcccgcgtgtgcttccgggttcggtctcgtgccgttcacctcaataccgcgtaaccagtgaagagcctattgcgctgggacggttttcctccggggccgtgaatgctgctaatcctaacctctgagcgtgtgcgcacaatccagtgttgctacgtcgtaacgcgtaagtcaggggcggaacagactactttcggtaccccgtgtttccttttattttatatttatcattttatggtgacaattgctgagatttgcgatttagcggttttgccattgaacattgctttgtactacttggttgcatttcacaaaacctccgacatacccagctcctacatcgacttgcttgtttttcttaattaagacataaactagagaacacaaa

SEQ ID NO: 1281 - DNA, 822 bp, unidentified
  source 1..822: mol_type = unassigned DNA; note = unclassified Enterovirus sequence
ttaaaacagcctgggggttgtacccacccctggggcccacgtggcgccagtactctggttcgcttagaacctttgtacgcctgttttcccctcccttaaacaaattaagattgccactactgaggggagtagtccgactccgctccagcactgctgcaccagtgaattggtacgctagtacctctccacggagtagataggaatccctacccgaaacttagaagcatgtaaataacccgaccaataggagcgtggtatccaaccatgttaaggtcaagcacttctgtttccccggccagaaatggtcgttacccgccctacccactacgagaagcccagtaactacccaaacaagtgagaagttgcactcatccacaaccccagtggtagctctgagagatggggctcgcatcttcccccgtggtaacacggttgcttgcccgcgtgtgctctcgggttcgaccccgtgtcgatcacctccgatctgacgtaaccagccaagagcctattgtgctgggaaggttttcctccggagccgtgaatgctgctaatcccaacctccgagcgcgtgcgcacaatccagtgttgctgcgtcgtaatgcgtaagttggaggcggaacagactactttcggtactccgtgtttccttttattcatttattgattttatggtgacattgctgagatttgtgatttggctgttttaccactgaacattgccctgtattacctgattgcattccacaaaacttctgagatacctacatcttatattgatttacttgtcttccttaacctgaggcacaaactagagaacacaaa

SEQ ID NO: 1282 - DNA, 823 bp, Enterovirus F
  source 1..823: mol_type = genomic DNA
tttaaaagagtcagggggttgtacccacccctggggcccacgtggcgctagtactctggtacgttagtacccttgtacgcctgtttttccctcccttaaataaattaagactaccactactgaggggagtagtccgactccgctccggcactgccgcaccagtacaccggtacgctagtacccttgtacggagtagatggtatccccacccccgaaacttagaagcaagcacacaaaccgaccattaggcgcgcggcatccagtcgcgtaacggtcaagcacttctgtttccccggtccgcaaggatcgttacccgcccgacccactacgagaagcctagtagttggccaagtgaacgcgaggttgcgctcagccacaaccccagtggtagctctggaagatggggctcgcacttcccccgtggtaacacggttgcttgcccgcgcgtgcttccgggttcggcttcgtgccgttcacctcaacttcacgtaaccagcaaagagcctattgtgctgggacggttttcctccggggccgtgaatgctgctaatcccaacctccgagcgtgtgcgcacaatccagtgttgctacgtcgtaacgcgtaagttggaggcggaacagactactttcggtaccccgtgtttccttttaattttattcattattttatggtgacaattgctgagatttgtgatttggcgactttaccattgaatattgcattctattaccttatagcatttcacaaaacttctgatattccaccctcctacatcgacctgcttgttttcctgaatctcaaatataaatttgaagagacaaa

SEQ ID NO: 1283 - DNA, 828 bp, Rosavirus A
  source 1..828: mol_type = genomic DNA
ttttcaaagccggggttgggggggctgcaccccatccccccttcttcccctcttcctccgttgcgcgcgttcctgacgcccgccgcggagttcctagctggctaacacccagttgggagggctctcactccctcacacctcgcgctttggacgccaggcatggcgttaaacatgcattcccttcccctagtaacctcccttcgccccttccccacgttgtaccccctccgagatggctgctaaggcgcttgctgctacagcagtctcgtgtttcgggtgttataagtgctttcttttccactccactccctgcctatggggagcggaacggccttgtctcggtcgttgcttcttgcagatcttcacccctccaggctttctggactcgccaggggtggagtagtaggcgcactgtctaagtgaaggtagcagtgttgttggcgaagagttgtggacctactttgagtttgtagcgatcatccagagctagcggatctccccacgcggtaacgcgtgcctctaggcccaaaaggcacggtgttcacagcaccctttggatggcgggggtgcccccctccgcacttaaagtagaaaaacagcttagtagtcaaataacatggctttcctcaagcattcagtgctacatgggactgaaggatgcccagaaggtacccgcaggcaacgataagctcactgtggatctgatctggggccctgggccaggtgctatacacctggttaaaaccaaatctggtagtcagggttaaaaaacgtctaagtcccacccccccggggacggggggttcccttaaaccctcaactgacacc

SEQ ID NO: 1284 - DNA, 830 bp, unidentified
  source 1..830: mol_type = unassigned DNA; note = unclassified Hunnivirus sequence
cccccctcccccccttcccttccctttgcaacgcaacaattgtaagtgccctcacctgtcaattgggaccaccactttcagtgaccccatgcgaagtgctgagagaaaggaagctttcttacccttcatttgtgaacccactggtctaagccgcttggaatacgatgagtggaaaagttcattcttaatggagtgaaacatgcttaaatttccagctcgtgctggtctttccagtacggggcggccctgtctggccgtaattcttcagagtgtcacgccacacttgtggatctcacgtgccacatgacagcgctacagctggaactgggtgcttggtgcccatggagtaacagcgaaaagtgttagatcaagccttgcttgggctatgagcctgcggaacaacaactggtaacagttgcctcaggggccgaaagccacggtgttaacagcaccctcatagtttgatccacctcagggtggtgatgtttagcagttagtagttgccaatctgtgttcactgaaatctcggcataccgtgtagtgtacaggggtgaaggatgcccagaaggtacccgtaggtaaccttaagagactatggatctgatctggggccttgtccggagtgctttacacacggctcaaggttaaaaaacgtctagccccacagagcccgagggattcgggttttccctttaaaaacccgactagagcttatggtgacaattattgctgttcagacgaacagtgtaattgttgtctattcacagcagttctatcagagcttttcccacaacggatcttcttggcaagcaaatacagcaggagtcaat

SEQ ID NO: 1285 - DNA, 837 bp, unidentified
  source 1..837: mol_type = unassigned DNA; note = unclassified Enterovirus sequence
atttaaggaggggaaaacagcctgggggttgtacccacccctggggcccacgtggcgctagtactctggtacgttagtacctttgtacgcctgttttcccctccttaaataaattaagattaccactactgaggggagtagtccgactccgctccagcaatgctgcaccagtgaattggtacgctagtacctctgcacggagtagatggtatccctttccccgaaacttagaagaaagcaaacaaaccgaccaataggagcgcggcaaccagccgtgttgcggtcaagcacttctgtttccccggtccgcaaggatcgttatccgcccgacccactacggaaagcctagtaactggccaaacagcaaagaagttgcgctcggccacaaccccagtggtagctctggaggatggggctcgcatctcccccgtggtaacacggttgcttgcccgcgtgtgcctccgggttcagtcatcgactgttcacttcaatgctgtgtaaccagccaagagcctactgtgctgggacggttttcctccggggccgtgaatgctgctaatcccaacctccgagcgtgtgcgcacaaaccagtgttgctacgtcgtaacgcgtaagtcggaggcggaacagactactttcggtaccccgtgtttcctttgatttttatttaatattttatggtgacaattactgagatttgtgatttggctgctttaccattgaatattgctctgtactatttagtcgcatttcacaaaacttctgagatccctgcgtcttttattgacttgcttgttttcctcaatttgaagtgcaaactagaaggcataaaaagag

SEQ ID NO: 1286 - DNA, 843 bp, unidentified
  source 1..843: mol_type = unassigned DNA; note = unclassified Picornaviridae sequence
cctatcgacagagtttgttgccgttaaaaagaggtcccaggggtgtttcccctggggcccctttttaacggcaacaaactctgtcgataggctaacgccgagcgttcacttagtgagggcgatttacatcacataacaccgccttgtttgacatgtttcactcaaggacaagatatggtaaatctgtgcactacttgaaaattctcgacgttagcggagctaaaacaacaccacaacacaacacaacaattaacaacacattagaaattcgaatttagaagttagaccccaatttttgatttaacatctgttattttgactttgggcaatccactgatctttgaatttcacacgacagccgtggagagacggcacacgctacttcagcatagatccaaggatagctggtagcggcgacgaagtccacaatcactctatattttcaggcttctgaaagtgctgataaattgattaagttcggtttatcggaattgccgaggtccctcgaagaaacccgcggaaatgagaatatagatgttggtatggcagccagaagacatgaactatgacaagtacgtacgagcgtgtgttcggacctggttccccgccttaggatcagcgccctgtgaggggaccctttggaaagatgatcactacatagactactcgaacgagaaactatgcaaataacagggaacgtttggccacccggatgaatccagtagtacggaaaagcttaggaattcgattttggatcttttacctgtgttttaataagaaatgcaggagttgataaatagggctcgactgggagcgagactgcagcggctaaagcagcagtaa

SEQ ID NO: 1287 - DNA, 847 bp, Enterovirus I
  source 1..847: mol_type = genomic DNA
ttaaaacagcctgggggttgttcccacccccagggcccacgtggcgcaagtactctgcttcgttagaagccttgtacgcctgttttcccctccttaaataaattaagattaccacttccgaggggagtagtccgactccgctccgatacgtcgctccagtgcgctagtacgcttagtactttctcacggggatagtggtacccctccctagtaatttagaagacttgaaaaaccgaccaataggcacctcgcatccagcggggtaaaggtcaagcacttctgtttccccgggtcgagtagcgatagactgtgcccacggtcgaaggtgaaacaacccgttatccgactttgtacttcgggaagcctagtaccaccaaagattatgcttggggtttcgctcagcacgaccctggtgtagatcaggctgatggatcaccgcgttcctcacaggcgactgtggcggtggtcgcgtggcagcctgccgatggggcaacccatcggacgccaagcatatgacagggtgtgaagagcctactgagctacaaagtattcctccggcccctgaatgcggctaatcccaaccacggagcatttgctaccaaaccaggtagtggaatgtcgtaacgggtaactctgtggcggaaccgactactttgggtgtccgtgtttccttttaatttatcattctgtgtatggtgacaactatagtgctatctcgatttgcattactattgttgagattgacactttattacattgttgcattttaccctttgagtgagttttcacctgaacagattaatttacttatcctgtttatatatcacaagcagaaatacttgcaaag

SEQ ID NO: 1288 - DNA, 867 bp, unidentified
  source 1..867: mol_type = unassigned DNA; note = unclassified Picornaviridae sequence
tttgcgcgcgggacctctgctacggccgggctcatattatcctccggggttttatgggtcgggcctagcccctttctgtaacggtctgtgtgagacctaaaaccacacataatatcgtgcctgatggttaacgcttgttagccgtctgtaaactaagaacctaccaacacactatgcacctcttggcgaagccgcttggaataagttgagaggaattatgcatgctagttgtgtttgtttacaactaattgttctaatccaagtgaagctcttcgcttggggcggcacgacacttgccgtaattcttctaccgtccctccacaccttgtggatgaagggccggatgtgtggcctctggctaacccctctctctggggtgatgctactggatgttttactcctagaccaaatcacatgaactcctcttgatccacttcggtggggctatgagcctgcggattaatagctggcgacagctaccccaggggccaaaagccacggtgttagcagcaccctcatagtctgatgcccaagggctgatgttgggagctagtagtgtgtgtctggcctatgtttaggacttctggccaagcgcagaggagtggggctgaaggatgcccagaaggtacccgtaggtaaccttaagagactatggatctgatctggggccccctcacgtggctttaccacgtgttgggggttaaaaaacgtctaggccccaccagcccacgggagtgggctttcccttaaaaagcccaacaatatttatggtgacaattcactgtttcttctttgcaatttttgtattcttggactccttattttttgtttgcttgattttagtggacattcagattcaaatacaaa

SEQ ID NO: 1289 - DNA, 891 bp, unidentified
  source 1..891: mol_type = unassigned DNA; note = unclassified environmental samples sequence
aagttgcattattaggtgcaaccataattgtttattttttcccgtgtgagacggaattctcatgacagggcagtcgagagagagcgatctctctctttgcctctaatagcaatattagcgttaccctttttcgataaaagagaaatatcaaaacgatagtagacgaaagttaatctatgtcctacatttgtagggaatgaaatactgattagttgtcattgacgacagatctaagctgtaatcaacagccggacttgtgcaaagttcgataagtagaataagtactagagattagtggatttgtgacccacaacttgaattaaaggcttgtatgtgcggaaatgctgtacaagaaaagagctaaaatgcgttttcctacgtgacgatataaacgatggaggtggggttcacttatttggagaaccgacctagacggctgtttttaacagcacccccagttgcctttctgggcttagtttcgggaataggaccccgaaacggcgtacgccactaaaaaggagaagacgtcaagcagcatgcgattaggacatgtatgtgtttttatccgattatggaaccaggtggttccgtaattgagacatatacccctatatttaaggtgtcgaaagatacccattatatgcaattactggagtattttgtatatatgtgctgtgagggcactatcctaggttaccgtgggatcgcaagatcaccttacggactgagcagtaaaagccattttggccgtctcttagcgtagagcacacactcatgcgaaacccaaactcgaaagagcgggctagtaggacttagggcagattgatgatcaaagaccccccaaaaggtctttttctctttctgcgtcttcatcttcctcatatgttttag

SEQ ID NO: 1290 - DNA, 899 bp, unidentified
  source 1..899: mol_type = unassigned DNA; note = unclassified Erbovirus sequence
ttttgtaactgaggttttaacatctcattgtttttgagccccaacgtcttggtggatgctcaaaagagattactcttgatgcttggctctcagaaagaatggcacctcaacgtgttgagacccgattcttttgagtcgagaccacttcccctcacccttaagattgcttttcttccaactaaacccctattgatgtgttggtcgtttgccaatcggagggcgacagatgcaggtcgctctgaggtctagtagtgtgggaacttgtcgctactaatgaaacgaggtagtgacacttagtacctacgaacaaatcttggagcaactccctttgcttccttcacccatctttcacttttcgttccgctttagcaggggtcttctttctgtccccctggcggcattggaactagccgtcgcgccttagcgcgcagccctgaaggccccacatcttgtggatctcgccgtgggcatgtttccggcatgtgtttctcaagcctgcaaccgaagaccgaacagccacttgaacggtttgagcgtggtagcgctgtgcgagttggcggtggactcccctcgtggcgacacgagcccccgcggccaaaagcccagtgtttgcagcacctctcgcatccaggacaaccccatcctggcgctcactcttagtagtgtggcttagtacgtattaggtggtaagccgagctctccctcggtcttgttctgaatgcacacatgtctaggggctaaggatgtcctacaggtacccgcacgtaaccttaagagagtgtggatctgagtaggagaccgtggtgcactgctttacagttgtagcccggtttaaaaaacgtctatgcccctacagggtagcggtgggccgcgccctttcctttaaaaatatttgtttt

SEQ ID NO: 1291 - DNA, 899 bp, unidentified
  source 1..899: mol_type = unassigned DNA; note = unclassified Sicinivirus sequence
ttacacgcgagttttgcctcgcgcgcccgtaagggcacaaacccccctaggacgtgcacttgcccattggtacgtccggaaaccgtctgcctcggcacgcggcttctccacggtcgcaagcgacccacaatgcttcctggccatggtgtcccccaggaagagcgaacttgtggtgcggcgacccgggagtcgcgtcggcagctcaagtttctctggcagcacaccattttcccctttgtaacctcccgaaaatggcccgggggtagtccgccccctcaaaatggaccgtgtgcacccctccccacgcgttaaagcgggaagggccctcagtcggcgcagggaagcgcgctgaccctgttaagtggataggtcaggaaaaacatgtccacatcataaccccaattcccacggtcgctgatggtctgaccgttaggggcggcccaccggcgctctttgccgggcgtggcttaaccacaccatctcctctagtggattcctagagttctcccacttagtaagctcattccccccactgctgatcccgcaagggagtacaagtgcccagtgagcccacctggtaacaggtgcactggggcccaaaaggctagtggacagggggaagaccccgaatgccgtgggttcccacctgcggtgaagggtttcccccgaagtccacctttgtacttggctatggcctgttggtagtgtggagagtggcgccgaaaggtctggatgtactctctgaggaaactagtaggatcggagaacgttagtagacccccactaggtacccgcgcaagcggatctgaggtgggcccggtgactatgccgttccggtaagtccgggttaaaacaatgaacgcgttctccacaaatcactttcctctctttcttattca

SEQ ID NO: 1292 - DNA, 900 bp, unidentified
  source 1..900: mol_type = unassigned DNA; note = unclassified Erbovirus sequence
ttttgtaactgaggttttgacatctcattgtttttgagccccaacgtcttggtggatgctcaaagaagattactcttgatgcttggctctcagaaagaatggcacctcaatgacttgagacccgattcttttgagtcgagacctttttccctctccccttttgaagattgctttcttccaactaaacccctattgatgtgttggtcgtttgccaatcggagggcgacaggcacaggtcgctcctgagctcagtagtgtgggaacttgttgctactaatgaaacgaggtagtgacacttagtacctgcgaacgactcaggtgcaatccctgtacttctttcaccaaccttccactttccgttccactttagcaggggtcttctttctgtccccctggcggcattggaactagccgttgcgccttagcgcacagccctgaaggccccacaccttgtggatcttgccgtgggcatgtttctggcatgtgtttctcaagcctgtaaccgacgaccgaacggtcacgtgaacagtttgagcgtggtagcgctgtgtgagttggcggtggactcccctcgtggcaacacgagcccccgtggccaaaagcccagtgtttgcagcacctctcacatccagggaaaccccaccctggcgctcactcttagtaacgtggcttagtacgtattaggtggtaagccgagctctccctcggtcttgtactgaatgcacacatgtctaggggctaaggatgtcctacaggtacccgtacgtaacctttagagagtatggatctgagtaggagaccgtggtgcactgctatacagatgtagcccggtttaaaaagcgtctatgcccctacagggtagcggtgggccgcgccctttcctttttaaaacttgttttt

SEQ ID NO: 1293 - DNA, 904 bp, Erbovirus A
  source 1..904: mol_type = genomic DNA
tatccccttgatgcaactgaggttttaacatctcattgtttttgagccccaacgtcttggtggatgctcaaagaagattactcttgatgcttggctctcagaaagaatggcacctcaacacttttgagacccgattcttttgagtcgagaccacttcccttcccctcaaggattgcttttcttccaactaaacccctattgatgtgttggtcgtttgccaatcggagggcgacagatacaggtcgctttggcgcttggtagtgtgggaacttgtcgctgctgatgaaacgaggtagtgacacttagtacctacgagaggcaacaaggcaataccccatcttccttcaccaactttttcttttcgttccactttagcggaggtcttctttctgtccctccggcggcattggaactagccgttgtgcctcagcacacagccctgaaggctccacaccttgtggatcttgccgtgggcatgtttctggcatgtgtttctcaagcctgcaaccgaagaccgaaccgttgcatgaacagtttgagcgtggtagcgctgtgcgagttggcggtggattcccctcgcggcaacacgagcccccgcggccaaaagcccagtgttcacagcacctctcgcatccaggaaaaccccctcctggcgctcactcttagtagtgtgacctagtacgtactaggtggtaagccgagctctccctcggtcttgttctgaatgcacacatgtctaggggctaaggatgtcctacaggtacccgtacgtaaccttcagagagtatggatctgagtaggagaccgtggtgcgctgctttacagtcgtagcccggtttaaaaagcgtctatgcccctacagggtagcggtgggccgcaccctttcctttgaaactattgtttt

SEQ ID NO: 1294 - DNA, 905 bp, Erbovirus A
  source 1..905: mol_type = genomic DNA
tatccccttgatgcaactgaggttttaacatctcattgtttttgagccccaacgccttggtggatgctcaaagaagattactcttgatgcttggctctcagaaagaatggcacctcaaagttttgagacccgattcttttgagtcgagaaccttacccccaacccttgagattgcttttcttccaactaaacccctattgatgtgttggtcgtttgccaatcggagggcgacaggcgcaggtcgccccaacagctagtattgtgggaacttgccactgctgatgaaacgaggtagtggcatttagtacctgagaacgctggaggagcatctccccctcttccttcattaatctttcacttttcgttcctctttagcgggggtcttcttgctatccccccggcggcattggaactagccgttgcgccttagcgcacagtcctgaaggccccacatcttgtggatcttgccgtggacatgtttctggcatgtgtttctcaagcctgcaaccgacgactgaacagacgtgtgaacagtttgagtgtggtagcgctgtgtgagttggcggtggaaccccctcgtggtgacacgagcccccgtggccaaaagcccagtgtttacagcacctctcacatccagggaaaccccaccctggcgctcactcttagtaacacttcctagtaggtattaggtggtaagccgagctcttcctcggtcttgttctgaatgcacacatgtctaggggctaaggatgtcctacaggtacccgcacgtaaccttcagagagtgtggatctgagtaggagactgtggtgcgctgctttacagacgtagcccagtttaaaaaacgtctatgcccctacagggtcgcggtgggccgcaccctttccttttacaaacttggtttt

SEQ ID NO: 1295 - DNA, 906 bp, unidentified
  source 1..906: mol_type = unassigned DNA; note = unclassified Sicinivirus sequence
gttgcgtgcctgcagccgctcagcgtccatccttcctgttacccacctaatttggtggtaccccccggtcccttccctatccccccatacagccggaacggaccacacacctccgggtctgtggcccaaccccgactcggggttgtggcggtggtcacagctccggctgtgacttcctaaccactcctttcacccacccctttcttacatctacttaagtttatgtttgccctctcatcccaaggccttggctcatgtcctttgaggctatctggcacaaacactctttgtttggcgtctggagacccactgagccaccacttatccatgctcaatgcaacccccattagtaaccacgcaaatctaatagtggttctgcctcggcagcacctaagtgcccagggagttcaactggcgacagttgccctggggcccaaaaggctaggtggtaagggtctggccaagcaaggggtccccaccccaagctgaacccatggccccgaagccaccctttaggtggaggttatgtacccgatcgctattctatttgtttggcgaacctggccggaaacatttagtttgtggattcgttggtttgtggtgattagtagaccccctggaggtacccgttttggatctgaccagggacccgtgactataccgctccggtaattcgggtttaaaaccatgaacgtcaccacttgtcttcttttcccattttattcttcttatagtggtctgtttaaatgctcttagaatttctgttggtgactacggcacttaccatagtggttctttcccccagtgagttgcatcagctgcttgctatttgcgtgtataattttgcattaattttcctctggttgctcggaattttggagttgcctagttaccccgctatacagc

SEQ ID NO: 1296 - DNA, 915 bp, Enterovirus A
  source 1..915: mol_type = genomic DNA
caggaacattcattagacgccatcagatccgtctcagggaaaagatcggtcgttgatctcctttctatgagacttcatgaagcgagggtttgtagttcgaagtggcatcagacacctcatggggttccgagaacttaattgggggacaaaagtgtacaaaaaagcaggctttaaaacagctctggggttgttcccacccacagggcccactgggcgctagcacactgattctgcgggatctttgtgcgcctgttttataaccctccccctaagcagcaacttagaagctctgtacaatcacgaccagtagtgggcgtggcgcgccagccatgtcttggtcaagcacttctgtatccccggactgagtatcaatagactgcttacgtggtcgaaggagaaaacgttcgttacccggctaactacttcgagaaacccagtagcactatgaaagttgcggagtgtttcgctcagcacttcccccgtgtagatcaggtcgatgagtcactgtaaaccccacgggcaaccgtgacagtggctgcgttggcggcctgcccatggggtaacccatgggacgctctaatacagacatggtgtgaagagtctattgagctagttagtagtcctccggcccctgaatgcggctaatcctaactgcggagcgcgcaccctcaacccagggggcggcgcgtcgtaatgggtaactctgcagcggaaccgactactttgggtgtccgtgtttccttttattccttattggctgcttatggtgacaattgagaagttgttaccatatagctattggattggccatccggtgtctaacagagccattgtttacctattcattggatacgtccctcttgatctcaaggccattcaaactcttgactatatattgctccttaactgcaagaa

SEQ ID NO: 1297 - DNA, 934 bp, unidentified
  source 1..934: mol_type = unassigned DNA; note = unclassified Picornaviridae sequence
ccgtgggaccggagatgtgtgtccgaaaggtggcccgtttcgtgggccagacgttgaaagggggatgcagggtatgctgttttaatacagcaaagacccacacatccccgctttcaacgtctggcccacgaaacgggccacctttcggactgaccattggtttattattgaaattggcttggaaatgctgacactgtaagctggtttgtgatttaaacaatggttgttctggactctctttgagagatttacctggtggcttggcacagcctccttaaggacgtctggtccagaaaggcccggtcaagacttatattggactggtcccctgtccactgagtattctgttctgaaccgtgtaggcagggctagcgccaccatgattgccaagggactgcctccctggtgacagggacccttgggcccaaaaggctaggtggcaactctcatgtcaagagaggggtatccaccccaatctgaatcatgtggagtgaagccactcgtcatggctctgaccccgagactgtctacatttagtaagatggatgaaaactggatttggagaccactttgattgtcttgatgagaaagtccgctatttgactgagtagatgccctccagctacccttacggatgtgaggaggggaccgtgactatagcgttccgctaaaccggtttaaaaaacatgaaaggtcaaatatgtggcgccattttccatttttactaataaccatatgcctgacgaagttgattgtgctgagtgctctaagccctcctggactgtcagattaaaattggcttttctgcaatattttggctgccagtttgtatgggtttatcactcaggaaagaatcaagagaaagattgaaaatcttggattgtgcaaccaaggctcatttttgtccttgtgaaggcaaccagagattgcagtc

SEQ ID NO: 1298 - DNA, 944 bp, unidentified
  source 1..944: mol_type = unassigned DNA; note = Mus musculus picornavirus strain Wencheng-Mm283 polyprotein gene,1 sequence
accccggtaaaggtcagggtgtacttgcccacgttggtcggcttgtcaacactggttccggctttatcctgatacgtcaccgtgtactcgctgccatcgatcacaaacccctcatcgtccttgacagtgaccgcaggctcctgcttctctccgttgaacgtcaccgagggcggcgtcacctggatggtgggcgcggtcacggtgttgctgatgatggacgcatctaccgaagcaggtgtgctgtcattgtggttgctgtcgccctgggccttgtaccagacagtgtaattgtccacagctttcccggtgggaatggttggagtatacgggccgtcctcagccagagcgtagaccatcgtgccgtcggaagcggtgcccgcctcaatcagcgcctgctcggtgccgttgtagggcagattttccaaacccttcggagccgttgccaccgatgcagcacccttcgcaatcacaaaggtccccgtaccgtttacgatgtagttgccgccgttggcgttggtgatgatgaccgtcgccgtaccggcgttgatgttgtcgcggtaggacagggtgtactcgtcgctggggatggtgttgccgccgtcctccaccttactgcgagactcctagtagggagtggacgtattttgtgtgtgacccggagtttcccccgctccagaaacctgtgatgagctatcctcacgcccacctggcaacaggcgaggacgctgcgttggcacaggacctcattgaggctcacaacttgctgaagcaaacgaagagacgattgcgctaaggtggtttcctccggcctcctgaatgcggctaatcccatcccttggtcatccgcccactagccagtgggtagggtgtcgtaacgcgcaagccgagggcggaaccgactactttggagtgtccgtgtttctattttattttatacggcagtc

SEQ ID NO: 1299 - DNA, 957 bp, Foot-and-mouth disease virus
  source 1..957: mol_type = genomic DNA
ctgtctgcctaatggaggtacgacagccagaggtctagccccagcgtcgcgtaacgaccgtccccggttgaaacgccactactcagacctctggctgtcgtacctccattaggcagacaggaaccacccttctggggcctacgctactgtgcccttttggggcccgcggtcgtcatcaccgcgcctccattaggctcgcagtcgtacctcctctaggctgacaactgtcgcccttttagggcctacgaccttcaagttacggttttggcgtccctcccgcggccgactcgcctacgtgaacgctagctcttcacccgaaggcccgcctttacgttaccgtcttttccgacgttaaaggattgcaaccacacgatttgccttcttttccgaagtaaaaggatacaagcacacagttttgcccgttttcatgagaaatgggacgtctgcgcacgaaacgcgctgttgctcttcgcattcttgtacaaacacgatcttgacgcaggaatcttagaccaacccaacccgtgcacctgcaagtttcgcccggtccttccgggtcttgagagacaaacagatgtactgagatcaactccacgattggtctactagcgggtactagtaacactcactttgcttcgtagcggagcacatgagcggtgggacctcccccatggtaacatggacccaccgggccaaaagccacgcctcacggcctcatgtgtgtgcaaccccagcacggcaacttgtttgtgaaacacaccttaaggtaacactgagactggtacttgatttctggagacaggctaaggatgcccttcaggtaccccgaggtaacaagagacactcgggatctgagaaggggaccaggagttctatcaaactgcccggtttaaaaagcttctatgcctggataggtgaccggaggccggcaccttttcctttatttaaactcacttt

SEQ ID NO: 1300 - DNA, 966 bp, unidentified
  source 1..966: mol_type = unassigned DNA; note = Canine picornavirus isolate A128thr polyprotein gene, complete cds.1 sequence
gggcctcctttcaccggggttcgcgtgacccggttataaaccacgtgacgtctttccagcgctgggttttgacgataaaataacccaggcactatagacagcgatgtctttaaacatccagacagaacagtctttaaaattacaagcttattcaattacaactagtggtgactcactttaaaatgtccaaatttaaggttggcagcttaactgcccgtgattgggctcacgtataaatggtcctggctggccgactacggccacacaatcaccgaatgatttaaacttcgggtgtgagctactaagctccttgtgtaagggtgacaccttgcccaagtatcttgtccccggtctgttgccgcttggaggcagatagggttattttccttgttactttctactcattggggatctatcccagtgaagggtcaagtggcaacccctctcttcttgaggagtggcatggcggtctttccgcatctcgaaccatgccacgcgccatgcacatatgtgacttataagtctgaagattttgaaacactttggttgacaagttgatgactgtagcgactccagtgtgcgagcggacttcccctcatggtaacatgagcctctcggaccaaaagtcaagcgttcatagcgccacactggacgggactttcctagtccctcatcaatgaaacacaatttgtgaatctttctttggacgaaagagtctgatgtgtaggatggagtgaagatggcctgaaggtaccccgtatacgggatctgatcaggtgcccctctcttggggttaaaaattactcggctcctcccacaaactggtggtccagtttttctctttaatttttactgcttatatggtgacagttattgacattctagtgttgattgcctattgttactttatattgttgttgtttttcctgaattgctttttacaaccttatactattacctttgaac

SEQ ID NO: 1301 - DNA, 970 bp, Ampivirus A
  source 1..970: mol_type = genomic DNA
ttaaaatgaaaatgtgcgagcatttagctcgcacttttcattttaaatatgtccacagccctcaagggacttagtcccttgtccgcctcggcgacttaatatttaacttgtagttacttatataaagcccgtaatttatacgatacatacaaaactccagcatccactctgactgccatagtggaataaaccaagaccactctctacatccggagagtcaaatccattggacgaccatttgatactattctacaaaatctattttgatcatattatattaagcattaagcgtcattgacttggttgattaattagtttcactgattaatcgagtcaacaaacaacttcctaaattaatataattttgctcaaacgagaatttcagaatattatgcgaccatttaactatgtttacttaagcatcattgacttttgagtcaacaaataccttaagtttccgctcatctccttaccttcatacgcaggcccataagcctatattatttacctctatttataattttaatcattaatctgcacaattccaccgtttagacattattagggtttataacaacactaataattattgtatgaaaaccagtagttccagcgcgtcgtggcctattgacccccatacaaagttcataagaatagttttgctgttttcagtcattcattctttcccttaaaaggtttggtcacctataagtccagctcattacatcgagtatggcaagtctgcccaacatttgttatatctgactctggtgataataaatgtggcgggataaagttacaagtctagttatatagacagctttagctcaaaaccccaatttccccccttgtgtattattattgtattattaattgtaattatgtatttaatgtaaattgtacttttatctatccaacttcttatttcaattttctatcaagacttttttcttgtcgaaactcaatatct

SEQ ID NO: 1302 - DNA, 975 bp, unidentified
  source 1..975: mol_type = unassigned DNA; note = Carfax virus polyprotein gene, partial cds.1 sequence
cacggggttaacacctcgtgcgatcttttcaaccacatatatatatattctgggcggaatattagaaaatcttgggattatatatatgtaattgatatattgggcggaatatttgaaaatcttgatatatctcttacaaaattttgaaaccaaccattttagaataggtttattagcgtgacaaactatgcgacctgtagagaaaaatgtcaaaatcaatacaaaattttaaaatgttaaaaatgtttatatatttagtaaactcaagttgaattgtgatagagaaggcaagtaactaccagatgactcttctcgcaacaggattatcccagactgttgttccagcaaattgatggatgtaaactaaatttataatgataaatagttaagtaggagacccttatggtactcaagcttgtattaaaatttttaactatagatatgtattattgaaatgtgttctgtctcttatatgtacacccacgtagtcgtggtaccgctataacgccaatcggactaaataacaagaatgtgaggttcctattgagatttcaaaatttatcatattgtcacgaccaatctctttgggtaaggacttgcatggtatgcgaaaggtcggattgccagaatctgcttgctgctttctggatgtgtacacattttaattttaagatttatgatagttaatttgataatacaaggacagtgcgttttgtgacgtgcttgtttgcatctctgtcttagatgacaggtttctacactaggcgatgtgtagaagtgtagacctctaatggtttggtgcatcgtgccccggttctttttcaaggcttctccggttcaaagatagcggaggacccccctttgtaatgcagacaccattgtggataatttatctacaattcgaagcgataatttttccattcatttttgtatctttaaaacttcttacggagattttcaatattaactagaaaa

SEQ ID NO: 1303 - DNA, 723 bp, unidentified
  source 1..723: mol_type = unassigned DNA; note = unclassified vectors sequence
cctcggccccctcaccctcttttccggtggtctggtcccggaccaccgttactccattcagcttcttcggaacctgttcggaggaattaaacgggcacccatactccccccaccccccttttgtaactaagtatgtgtgctcgtgatcttgactcccacggaacggaccgatccgttggtgaacaaacagctaggtccacatcctcccttcccctgggagggcccccgccctcccacatcctccccccagcctgacgtatcacaggctgtgtgaagcccccgcgaaagctgctcacgtggcaattgtgggtccccccttcatcaagacaccaggtctttcctccttaaggctagccccggcgtgtgaattcacgttgggcaactagtggtgtcactgtgcgctcccaatctcggccgcggagtgctgttccccaagccaaacccctggcccttcactatgtgcctggcaagcatatctgagaaggtgttccgctgtggctgccaacctggtgacaggtgccccagtgtgcgtaaccttcttccgtctccggacggtagtgattggttaagatttggtgtaaggttcatgtgccaacgccctgtgcgggatgaaacctctactgccctaggaatgccaggcaggtaccccacctccgggtgggatctgagcctgggctaattgtctacgggtagtttcatttccaatccttttatgtcggagtc

SEQ ID NO: 1304 - DNA, 712 bp, Aichivirus A
  source 1..712: mol_type = genomic DNA
tcaccctctttcccggtggtctggtcccggaccaccgttactccattcagcttcttcggaacctgttcggaggaattaaacgggcacccatactccccccacccccctttggtaactaagtatgtgtgctcgtgatcttggctcccacggagcggaccgatccgttggtgaacaaacagctaggtccacatcctcccttcccctgggagggcccccgccctcccacatcctccccccagcctgacgtatcacaggctgtgtgaagcccccgcgaaagctgctcacgtggcaattgtgggtccccccttcatcaagacaccaggtctttcctccttaaggctagccccggcgtgtgaattcacgttgggcaactagtggtgtcactgtgcgctcccaatctcggccgcggagtgctgttccccaagccaaacccctggcccttcactatgtgcctggcaagcatatctgagaaggtgttccgctgtggctgccaacctggtaacaggtgccccagtgtgcgtaaccttcttccgtctccggacggtagtgattggttaagatttggtgtaaggttcatgtgccaacgccctgtgcgggatgaaacctctactgccctaggaatgccaggcaggtaccccacctccgggtgggatctgagcctgggctaattgtctacgggtagtttcatttccaatccttttatgtcggagtc

SEQ ID NO: 1305 - DNA, 712 bp, unidentified
  source 1..712: mol_type = unassigned DNA; note = unclassified Kobuvirus sequence
tcaccctcttttccggtggtctggtcccggaccaccgttactccattcagcttcttcggaacctgttcggaggaattaaacgggcacccatacacccccatcccctttctgcaacttaagtatgtgtgctcgtgatcttgactcccacggaatggatcgatccgctggagaacaaactgctagatccacatcctcccttcccctgggaggaccttggtcctcccacatcctccccccagcctgacgtaccacaggctgtgtgaagcccccgcgaaagctgctcacgtggcaattgtgggtccccccttcatcaagacaccaggtctttcctccttaaggctagccccgatgtgtgaattcacattgggcaactagtggtgtcactgtgcgctcccaatctcggccgcggagtgctgttccccaagccaaacccctggcccttcactatgtgcctggcaagcatacctgagaaggtgttccgctgtggctgccagcctggtaacaggtgccccagtgtgcgtaaccttcttccgtcttcggacggtagtgattggttaagatttggtgtaaggtccatgtgccaacgccctgtgcgggatgaaacctctactgccctaggaatgccaggcaggtaccccacccccgggtgggatctgagcctgggctaattgtctacgggtagtttcatttccaattcttttatgtcggagtc

SEQ ID NO: 1306 - DNA, 712 bp, Aichivirus A
  source 1..712: mol_type = genomic DNA
tcaccctctttcccggtggtctggtcccggaccaccgttactccattcagcttcttcggaacctgttcggaggaattaaacgggcacccatacatccccatcccctttctgtaacttaagtatgtgtgcttgtaatcttgactcccacggaatggatcgatccgctggagaacaaactgctagatccacatcctcccttcccctgggaggaccttggtcctcccacatcctccccccagcctgacgtaccacaggctgtgtgaagcccccgcgaaagctgctcacgtggcaattgtgggtccccccttcatcaagacaccaggtctttcctccttaaggctagccccgatgtgtgaattcacattgggcaactagtggtgtcactgtgcgctcccaatctcggccgcggagtgctgttccccaagccaaacccctggcccttcactatgtgcctggcaagcatatctgagaaggtgttccgctgtggctgccagcctggtaacaggtgccccagtgtgcgtaaccttcttccgtctccggacggtagtgattggttaagatttggtgtaaggttcatgtgccaacgccctgtgcgggatgaaatctctactgccctaggaatgccaggcaggtaccccaccctcgggtgggatctgagcctgggctaattgtctacgggtagtttcatttccaatccttttatgtcggagtc

SEQ ID NO: 1307 - DNA, 679 bp, Aichivirus A
  source 1..679: mol_type = genomic DNA
gtgttactccattcagcttcttcggaacctgttcggaggaattaaacgggcacccatactcccccccaccccccttttgtaactaagtatgtgtgctcgtgaccttgactcccacggaacggaccgatccgttggtgaacaaacagctaggtccacatcctcctttcccctgggagggtccccgccctcccacatcccccccccagcctgacgtgtcacaggctgtgtgaagcccccgcgaaagctgctcacgtggcaattgtgggtccccccttcatcaagacaccaggtctttcctccttaaggctagccccggcgtgtgaactcacgttgggcaactagtggtgtcactgtgcgctcccaatctcggccgcggagtgctgttccccaagccaaacccctggcccttcactatgtgcctggcaagcacacctgagaaggtgttccgctgtggctgccagcctggtaacaggtgccccagtgtgcgtaaccttcttccgtcttcggacggtggtgattggttaagatttggtgtaaggttcatgtgccaacgccctgtgcgggatgaaacctctactgccctaggaatgccaggcaggtaccccaccttcgggtgggatctgagcctgggctaattgtctacgggtggtttcatttccaattctttcatgtcggagtc

SEQ ID NO: 1308 - DNA, 727 bp, Aichivirus A
  source 1..727: mol_type = genomic DNA
ggcttcggccccctcaccctcttttccggtggtctggtcccggaccaccgttactccattcagcttcttcggaacctgttcggaggaattaaacgggcacccatacacccccatccccttttttgcaacttaagtatgtgtgctcgtaatcttgactcccacggaatggatcgatccgctggagaacaaactgctagatccacatcctccctcccccctgggaggacctcggtcctcccacatcctccccccagcctgacgtatcacaggctgtgtgaagcccccgcgaaagctgctcacgtggcaattgtgggtccccccttcatcaagacaccaggtctttcctccttaaggctagtcccgatgtgtgaattcacatcgggcaactagtggtgtcactgtgcgctcccaatctcggccgcggagtgctgttccccaagccaaacccctggcccttcactatgtgcctggcaagcatatctgagaaggcgttccgctgtggctgccagcctggtaacaggtgccccagtgtgcgtaaccttcttccgtccccggacggtagtgattggttaagacttggcgtaaggttcatgtgccaacgccctgtgcgggatgaaacctctactgccctaggaatgccaggcaggtaccccaccttcgggtgggatctgagcctgggctaattgtctacgggtagtttcatttctaattctttcatgtcggagtc

SEQ ID NO: 1309 - DNA, 710 bp, Aichivirus A
  source 1..710: mol_type = genomic DNA
accctcttttccggtggtctggccccggaccaccgttactccattcagcttcttcggaacctgttcggaggaattaaacgggcacccatacacccccaccccctttctgcaacttaagtatgtgtgctcgtgatcttgactcccacggaatggatcgatccgctggagaacaaactgctagatccacatcctcccttcccttgggtggacctcggtcctcccacatcctccccccagcctgacgtatcacaggctgtgtgaagcccccgcgaaagctgctcacgtggcaattgtgggtccccccttcatcaagacaccaggtctttcctccttaaggctagccccgatgtgtgaattcacattgggcaactagtggtgtcactgtgcgctcccaatctcggccgcggagtgctgttccccaagccgaacccctggcccttcactatgtgcctggcaagcatatctgagaaggtgttccgctgtggctgccagcctggtaacaggtgccccagtgtgcgtaaccttcttccgtcctcggacggtagtgattggttaagatttggtgtaaggttcatgtgccaacgccctgtgcgggatgaaacctctactgccctaggaatgccaggcaggtaccccaccctcgggtgggatctgagcctgggctaattgtctacgggtagtttcatttccaattctttcatgtcggagtc

SEQ ID NO: 1310 - DNA, 710 bp, Aichivirus A
  source 1..710: mol_type = genomic DNA
accctcttttccggtggtctggtcccggaccaccgttactccattcagcttcttcggaacctgttcggaggaattaaacgggcacccatacacccccaccccctttttgcaacttaagtatgtgtgctcgtgatcttgactcccacggaatggatcgatccgctggagaacaaactgctagatccacatcctcccttcccttgggaggacctcggtcctcccacatcctccccccagcctgacgtaccacaggctgtgtgaagcccccgcgaaagccgctcacgtggcaattgtgggtccccccttcattaagacaccaggtctttcctccttaaggctagtcccgatgtgtgaattcacattgggcaactagtggtgtcactgtgcgctcccaatctcggccgcggagtgctgttccccaagccaaacccctggcccttcactatgtgcctggcaagcatatctgagaaggtgttccgctgtggctgccagcctggtaacaggtgccccagtgtgcgtaaccttcttccgtcttcggacggtagtgattggttaagatttggcgtaaggttcatgtgccaacgccctgtgcgggatgaaacctctactaccctaggaatgccaggcaggtaccccaccctcgggtgggatctgagcctgggctaattgtctacgggtagtttcatttccaattcttctatgtcggagtc

SEQ ID NO: 1311 - DNA, 710 bp, Aichivirus A
  source 1..710: mol_type = genomic DNA
accctctttcccggtggtctggtcccggaccaccgttactccattcagcttcttcggaacctgttcggaggaattaaacgggcacccatacactcccatcccctttctgcaacttaagtatgtgtgctcgtgatcttgactcccacggaatggatcgatccgctggagaacaaactgctagatccacatcctcccttcccttgggtggacctcggtcctcccacatcctccccccagcctgacgtatcacaggctgtgtgaagcccccgcgaaagctgctcacgtggcaattgtgggtccccccttcatcaagacaccaggtctttcctccttaaggctagccccgatgtgtgaattcacattgggcaactagtggtgtcactgtgcgctcccaatctcggccgcggagtgctgttccccaagccgaacccctggcccttcactatgtgcctggcaagcatatctgagaaggtgttccgctgtggctgccagcctggtaacaggtgccccagtgtgcgtaaccttcttccgtcctcggacggtagtgattggttaagatttggtgtaaggttcatgtgccaacgccctgtgcgggatgaaacctctactgccctaggaatgccaggcaggtaccccaccctcgggtgggatctgagcctgggctaattgtctacgggtagtttcatttccaattctttcatgtcggagtc

SEQ ID NO: 1312 - DNA, 677 bp, Aichivirus A
  source 1..677: mol_type = genomic DNA
gttactccattcagcttcttcggaacctgttcggaggaattaaacgggcacccatacacccccacccccttttctgcaacttaagtatgtgtgctcgtaatcttgactcccacggaatggatcgatccgctggagaacaaactgctagatccacatcctcccttcccctgggaggaccccggtcctcccacatcctccccccagcctgacgtatcacaggctgtgtgaagtccccgcgaaagctgctcacgtggcaattgtgggtccccccttcatcaagacaccaggtctttcctccttaaggctagccccgatgtgtgaattcacattgggcaactagtggtgtcactgtgcgctcccaatctcggccgcggagtgctgttccccaagccaaacccctggcccttcactatgtgcctggcaagcatatctgagaaggtgttccgctgtggctgccagcctggtaacaggtgccccagtgtgcgtaaccttcttccgtctccggacggtagtgattggttaagatttggtgtaaggttcatgtgccaacgccctgtgcgggatgaaacctctactgccctaggaatgccaggcaggtaccccaccttcgggtgggatctgagcctgggctaattgtctacgggtagtttcatttccaattcttttatgtcggagtc

SEQ ID NO: 1313 - DNA, 677 bp, Aichivirus A
  source 1..677: mol_type = genomic DNA
gttactccattcagcttcttcggaacctgttcggaggaattaaacgggcacccatacacccccacccccttttctgcaacttaagtatgtgtgctcgtaatcttgactcccacggaacggatcgatccgctggagaacaaactgctagatccacatcctcccttcccctgggaggaccccggtcctcccacatcctccccccagcctgacgtaacacaggctgtgtgaagtccccgcgaaagctgctcacgtggcaattgtgggtccccccttcaccaagacaccaggtctttcctccttaaggctagccccgatgtgtgaattcacattgggcaactagtggtgtcactgtgcgctcccaatctcggccgcggagtgctgttccccaagccaaacccctggcccttcactatgtgcctggcaagcatatctgagaaggtgttccgctgtggctgccagcctggtaacaggtgccccagtgtgcgtaaccttcttccgtctccggacggtagtgattggttaagatttggtgtaaggttcatgtgccaacgccctgtgcgggatgaaacctctactgccctaggaatgccaggcaggtaccccaccttcgggtgggatctgagcctgggctaattgtctacgggtagtttcatttccaattcttttatgtcggagtc

SEQ ID NO: 1314 - DNA, 677 bp, Aichivirus A
  source 1..677: mol_type = genomic DNA
gttactccattcagcttcttcggaacctgttcggaggaattaaacgggcacccatacacccccacccccttttctgcaacttaagtatgtgtgctcgtaatcttgactcccacggaatggatcgatccgctggagaacaaactgctagatccacatcctcccttcccctgggaggaccccggtcctcccacatcctccccccagcctgacgtatcacaggctgtgtgaagtccccgcgaaagctgctcacgtggcaattgtgggtccccccttcatcaagacaccaggtctttcctccttaaggctagccccgatgtgtgaattcacattgggcaactagtggtgtcactgtgcgctcccaatctcggccgcggagtgctgttccccaagccaaacccctggcccttcactatgtgcctggcaagcatatctgagaaggtgttccgctgtggctgccagcctggtaacaggtgccccagtgtgcgtaaccttcttccgtctccggacggtagtgattggttaagatttggtgtaaggttcatgtgccaacgccctgtgcgggatgaaacctctactgccctaggaatgccaggcaggtaccccaccttcgggtgggatctgagcctgggctaattgtctacgggtagttccatttccaattcttttatgtcggagtc

SEQ ID NO: 1315 - DNA, 677 bp, Aichivirus A
  source 1..677: mol_type = genomic DNA
gttactccattcagcttcttcggaacctgttcggaggaattaaacgggcacccatacacccccacccccttttctgcaacttaagtatgtgtgctcgtaatcttgactcccacggaatggatcgatccgctggagaacaaactgctagatccacatcctcccttcccctgggaggaccccggtcctcccacatcctccccccagcctgacgtatcacaggctgtatgaagtccccgcgaaagctgctcacgtggcaattgtgggtccccccttcatcaagacaccaggtctttcctccttaaggctagccccgatgtgtgaattcacattgggcaactagtggtgtcactgtgcgctcccaatctcggccgcggagtgctgttccccaagccaaacccctggcccttcactatgtgcctggcaagcatatctgagaaggtgttccgctgtggctgccagcctggtaacaggtgccccagtgtgcgtaaccttcttccgtctccggacggtagtgattggttaagatttggtgtaaggttcatgtgccaacgccctgtgcgggatgaaacctctactgccctaggaatgccaggcaggtaccccaccttcgggtgggatctgagcctgggctaattgtctatgggtagtttcatttccaattcttttatgtcggagtc

SEQ ID NO: 1316 - DNA, 664 bp, Aichivirus A
  source 1..664: mol_type = genomic DNA
gcttcttcggaacctgttcggaggaattaaacgggcacccatacacccccacccccttttctgcaacttaagtatgtgtgctcgtaatcttgactcccacggaatggatcgatccgctggagaacaaactgctagatccacatcctcccttcccctgggaggaccccggtcctcccacatcctccccccagcctgacgtatcacaggctgtgtgaagtccccgcgaaagctgctcacgtggcaattgtgggtccccccttcatcaagacaccaggtctttcctccttaaggctagccccgatgtgtgaattcacattgggcaactagtggtgtcactgtgcgctcccaatctcggccgcggagtgctgttccccaagccaaacccctggcccttcactatgtgcctggcaagcatatctgagaaggtgttccgctgtggctgccagcctggtaacaggtgccccagtgtgcgtaaccttcttccgtctccggacggtagtgattggttaagatttggtgtaaggttcatgtgccaacgccctgtgcgggatgaaacctctactgccctaggaatgccaggcaggtaccccaccttcgggtgggatctgagcctgggctaattgtctacgggtagtttcatttccaattcttttatgtcggagtc

SEQ ID NO: 1317 - DNA, 629 bp, unidentified
  source 1..629: mol_type = unassigned DNA; note = unclassified Kobuvirus sequence
cacccatacacccccacccccttttctgtaactcaagtatgtgtgctcgtaatcttgactcccacggaatggatcgatccgctggagaacaaactgctagatccacatcctccctccccttgggaggacctcggtcctcccacatcctccctccagcctgacgtatcacaggctgtgtgaagcccccgcgaaagctgctcacgtggcaattgtgggtccccccttcatcaagacaccaggtctttcctccttaaggctagccccgatgtgtgaattcacattgggcaactagtggtgtcactgtgcgctcccaatctcggccgcggagtgctgttccccaagccaaacccctggcccttcactatgtgcctggcaagcatatctgagaaggtgttccgctgtggctgccagcctggtaacaggtgccccagtgtgcgtaaccttcttccgtctccggacggtagtgattggttaagatttggtgtaaggttcatgtgccaacgccctgtgcgggatgaaacctctactgccctaggaatgccaggcaggtaccccaccttcgggtgggatctgagcctgggctaattgtctacgggtagtttcatttccaattcttttatgctggagtc

SEQ ID NO: 1318 - DNA, 487 bp, Aichivirus A
  source 1..487: mol_type = genomic DNA
catcctccccccagcctgacgtaccacaggctgtgtgaagcccccgcgaaagctgctcacgtggcaattgtgggtccccccttcattaagacaccaggtctttcctccttaaggctagtcccgatgtgtgaattcacattgggcaactagtggtgtcactgtgcgctcccaatctcggccgcggagtgctgttccccaagccaaacccctggcccttcactatgtgcctggcaagcatatctgagaaggtgttccgctgtggctgccagcctggtaacaggtgccccagtgtgcgtaaccttcttccgtcttcggacggtagtgactggttaagatttggcgtaaggttcatgtgccaacgccctgtgcgggatgaaacctctactaccctaggaatgccaggcaggtaccccaccctcgggtgggatctgagcctgggctaattgtctacgggtagtttcatttccaattcttctatgtcggagtc

SEQ ID NO: 1319 - DNA, 438 bp, unidentified
  source 1..438: mol_type = unassigned DNA; note = Aichi virus 1 isolate C1_Kwanak_06 polyprotein gene, partial cds.1 sequence
aagctgctcacgtggcaattgtgggtccccccttcatcaagacaccaggtctttcctccttaaggctagccccggcgtgtgaattcacgttgggcaactagtggtgtcactgtgcgctcccaatctcggccgcggagtgctgtcccccaagccaaacccctggcccttcactatgtgcctggcaagcatatctgagaaggtgttccgctgtggctgccagcctggtaacaggtgccccagtgtacgtaaccttcttccgtctccggacggtagtgattggttaagatttggtgtaaggttcatgtgccaacgccctgtgcgggatgaaacctctactgccctgggaatgccaggcaggtaccccacctccgggtgggatctgagcctgggctaattgtctacgggtagtttcatttccaatccttttatgtcggagtc

SEQ ID NO: 1320 - DNA, 724 bp, unidentified
  source 1..724: mol_type = unassigned DNA; note = unclassified Kobuvirus sequence
tgtcggccccctcaccctcttttccggtggtctggacccggaccaccgttactccattcagcttcttcggaacctgttcggaggaattaaacgggcacccactttcctgtcctctccccttttctgtaactccaagtgtgtgctcgtaatcttgactcccgcggattgaccgctccgctggtgaacaaactgctaggtcatctcctccccacccttgggcgtccttccgggcgtccacaccctccccccagcctgacgtgtcacaggctgtacaaagaccccgcgaaagctgctaacgtggcaattgtgggtcccccctttgtaaaggaaccgagtctttctcccttaaggctagacccctgtgtgaattcacaggtggcaactagtggttccactgcatgctcccgacctcggccgcggagtgctgttccccaagtcgtaacactgaccttcacttatgtgcctggcaagcatatctgagaagatgttccgctgtggctgccaaacctggtaacaggtgccccagtgtgcgtagtcttcttccgtcttcggacggtaggtgttaggtaaagatgcggcgtaaggttcaagtgccaacgccctggaagggatgacccttctactgccctaggaatgccgcgcaggtaccccaggttcgcctgggatctgagcgcgggctaattgtctacgggtagtttcatttccctcttcttccactggcatc

SEQ ID NO: 1321 - DNA, 438 bp, Aichivirus A
  source 1..438: mol_type = genomic DNA
aagctgctcacgtggcaattgtgggtccccccttcatcaagacaccaggtctttcctccttaaggctagccccgacgtgtgaactcacgttgggcaactagtggtgtcactgtgcgctcccaatctcggccgcggagtgctgttccccaagccaaacccctggcccttcactatgtgcctggcaagcatatctgagaaggtgttccgctgtggctgccagcctggtaacaggtgccccagtgtgcgtaaccttcttccgtcttcggacggtagtgattggttaagatttggtgtaaggttcatgtgccaacgccctgtgcgggatgaaacctctactgccctaggaatgccaggcaggtaccccaccttcgggtgggatctgagcctgggctaattgtctacgggtagtttcatttccaattcttttatgtcggagtc

SEQ ID NO: 1322 - DNA, 438 bp, unidentified
  source 1..438: mol_type = unassigned DNA; note = Aichi virus 1 isolate C3_Seongbuk_09 polyprotein gene, partial cds.1 sequence
aagctgctcacgtggcaattgtgggtccccccttcatcaagacaccaggtctttcctccttaaggctagccccggcgtgtgaactcacgttgggcaactagtggtgtcactgtgcgctcccaatctcggccgcggagtgctgttccccaagccaaacccctggcccttcactatgtgcctggcaagcatatctgagaaggtgttccgctgtggctgccagcctggtaacaggtgccccagtgtgcgtaaccttcttccgtcttcggacggtagtgattggttaagatttggtgtaaggttcatgtgccaacgccctgtgcgggatgaaacctctactgccctaggaatgccaggcaggtaccccaccttcgggtgggatctgagcctgggctaattgtctacgggtagtttcatttccaattctttcatgtcggagtc

SEQ ID NO: 1323 - DNA, 438 bp, unidentified
  source 1..438: mol_type = unassigned DNA; note = Aichi virus 1 isolate Inlet_2011JAN_Aichi_B leader protein gene,1 sequence
aagctgctcacgtggcaattgtgggtccccccttcatcaagacaccaggtctttcctccttaaggctagccccgatgtgtgaattcacattgggcaactagtggtgtcactgtgcgctcccaatctcggccgcggagtgctgttccccaagccaaacccctggcccttcactatgtgcctggcaagcatatctgagaaggtgttccgctgcggctgccaccctggtaacaggtgccccagtgtgcgtaaccttcttccgtctccggacggtagtgattggttaagatttggtgtaaggttcatgtgccaacgccctgtgcgggatgaaacctctactgccctaggaatgccaggcaggtaccccacccccgggtgggatctgagcctgggctaattgtctacgggtagtttcatttccaattcttttatgtcggagtc

SEQ ID NO: 1324 - DNA, 438 bp, unidentified
  source 1..438: mol_type = unassigned DNA; note = Aichi virus 1 isolate C4_Yongdeongpo_07 polyprotein gene, partial1 sequence
aagctgctcacgtggcaattgtgggtccccccttcatcaagacaccaggtctttcctccttaaggctagccccgatgtgtgaattcacattgggcaactagtggtgtcactgtgcgctcccaatctcggccgcggagtgctgttccccaagccaaacccctggcccttcactatgtgcctggcaagcatatctgagaaggtgttccgctgtggctgccagcctggtaacaggtgccccggtgtgcgtaaccttcttccgtctccggacggtagtgattggttaagatttggtgtaaggttcatgtgccaacgccctgtgcgggatgaaacctctactgccctaggaatgccaggcaggtaccccacccccgggtgggatctgagcctgggctaattgtctacgggtagtttcatttccaattcttttatgtcggagtc

SEQ ID NO: 1325 - DNA, 438 bp, unidentified
  source 1..438: mol_type = unassigned DNA; note = Aichi virus 1 isolate Inlet_2011JAN_Aichi_A leader protein gene,1 sequence
aagctgctcacgtggcaattgtgggtccccccttcatcaagacaccaggtctttcctccttaaggctagccccggcgcgtgaactcacgttgggcaactagtggtgtcactgtgcgctcccaacctcggccgcggagtgctgttccccaagccaaacccctggcccttcactatgtgcctggcaagcatatctgagaaggtgttccgctgtggctgccagcctggtaacaggtgccccagtgtgcgtaaccttcttccgtcttcggacggtagtgattggttaagatttggtgtaaggttcatgtgccaacgccctgtgcgggatgaaacctctactgccctaggaatgccaggcaggtaccccaccctcgggtgggatctgagcctgggctaattgtctacgggtagtttcatttccaattcttttatgtcggagtc

SEQ ID NO: 1326 - DNA, 438 bp, unidentified
  source 1..438: mol_type = unassigned DNA; note = Aichi virus 1 isolate C2_Kangdong_01 polyprotein gene, partial cds.1 sequence
aagctgctcacgtggcaattgtgggtccccccttcatcaagacaccaggtctttcctccttaaggctagccccgatgtgtgaattcacattgggcaactagtggtgtcactgtgcgctcccaatctcggccgcggagtgctgttccccaagccaaacccctggcccttcactatgtgcctggcaagcatatctgagaaggtgttccgctgtggctgccagcctggtaacaggtgccccagtgtgcgtaaccttcttccgtctccggacggtagtgattggttaagatttggcgtaaggttcatgtgccaacgccctgtgcgggatgaaacctctactgccctaggaatgccaggcaggtaccccaccctcgggtgggatctgagcctgggctaattgtctacgggtagtttcatttccaattcttttatgtcggagtc

SEQ ID NO: 1327 - DNA, 438 bp, Aichivirus A
  source 1..438: mol_type = genomic DNA
aagctgctcacgtggcaattgtgggtccccccttcatcaagacaccaggtctttcctccttaaggctagccccggcgtgtgaactcacgttgggcaactagtggtgtcactgtgcgctcccaatctcggccgcagagtgctgttccccaagccaaacccctggcccttcactatgtgcctggcaagcatatctgagaaggtgttccgctgtggctgccagcctggtaacaggtgccccagtgtgcgtaaccttcttccgtcttcggacggtagtgattggttaagatttggtgtaaggttcgtgtgccaacgccctgtgcgggatgaaacctctactgccctaggaatgccaggcaggtaccccaccttcgggtgggatctgagcctgggctaattgtctacgggtagtttcatttccaattctttcatgtcggagtc

SEQ ID NO: 1328 - DNA, 438 bp, unidentified
  source 1..438: mol_type = unassigned DNA; note = Aichi virus 1 isolate C6_Mapo_22 polyprotein gene, partial cds.1 sequence
aagctgctcacgtggcaattgtgggtccccccttcatcaagacaccaggtctttcctccttaaggctagccccggcgtgtgaactcgcgttgggcaactagtggtgtcactgtgcgctcccaatctcggccgcggagtgctgttccccaagccaaacccctggcccttcactatgtgcctggcaagcatatctgagaaggtgttccgctgtggctgccagcctggtaacaggtgccccagtgtgcgtaaccttcttccgtcttcggacggtagtgattggttaagatttggtgtaaggttcgtgtgccaacgccctgtgcgggatgaaacctctactgccctaggaatgccaggcaggtaccccaccttcgggtgggatctgagcctgggctaattgtctacgggtagtttcatttccaattccttcatgtcggagtc

SEQ ID NO: 1329 - DNA, 438 bp, unidentified
  source 1..438: mol_type = unassigned DNA; note = Aichi virus 1 isolate C4_Yongdeongpo_16 polyprotein gene, partial1 sequence
aagctgctcacgtggcaattgtgggtccccccttcatcaagacaccaggtctttcctccttaaggctagccccgatgtgtgaattcacattgggcaactagtggtgtcactgtgcgctcccaatctcggccgcggagtgctgttccccaagccaaacccctggcccttcactatgtgcctggcaagcatatctgagaaggtgttccgctgtggctgccagcctggtaacaggtgccccggtgtgcgtaaccttcttccgtctccggacggtagtgattggttaagatttggtgtaaggttcatgtgccaacgccctgtgcgggatgaaacctctactgccctaggaatgccaggcaggtaccccaccctcgggtgggatctgagcctgggctaattgtctacgggtagtttcatttccaattctttcatgtcggagtc

SEQ ID NO: 1330 - DNA, 725 bp, unidentified
  source 1..725: mol_type = unassigned DNA; note = unclassified Kobuvirus sequence
cctcggccccctcaccctcttttccggtggtctggacccggaccaccgttactccattcagcttcttcggaacctgttcggaggaattaaacgggcacccactttcctgtcctctccccctttctgcaactcaagtgtgtgctcgtaatcctgactcccacgggttgaccgccccgttggtgaacaaacagctaggtcattccctccctacccctgggcgccatttcagtggcgttcatatcctccccccagcctgacgtgtcacaggctgtgcaaagtccccgcgaaagctgctcacgtggcaattgtgggtcccccctttgtgaaggaaccgagtctttctcccttaaggctagacccctgtgtgaactcacaggtggcaactagtggttccactgcatgctcccgacctcggccgcggagtgctgttccccaagtcgtgacactgacctccacttatgtgcctggcaagcatatctgagaagatgttccgctgtggctgccaaacctggtaacaggtgccccagtgcgtgtagtcttcttccgtctccggacggtaagtgtgtggtaaagatgcggcgtaaggttcaagtgccaacgccctggaagggatgacccttctactgccctaggaatgccgcgcaggtaccccaggttcgcctgggatctgagcgcgggctaattgtctacgggtagtttcatttccctctcttttcactggcatc

SEQ ID NO: 1331 - DNA, 438 bp, unidentified
  source 1..438: mol_type = unassigned DNA; note = Aichi virus 1 isolate C5_Mapo_01 polyprotein gene, partial cds.1 sequence
aagctgctcacgtggcaattgtgggtccccccttcatcaagacaccaggtctttcctccttaaggctagccccggcgtgtgaactcacgttgggcaactagtggtgtcactgtgcgctcccaatctcggccgcggagtgctgttccccaagccaaacccctggcccttcactatgtgcctggcaagcatatctgagaaggtgttccgctgtggctgccagcctggtaacaggtgcccccgtgtgcgtaaccttcctccgtcttcggtcggtagtgattggttaagatttggtgtaaggttcgtgtgccaacgccctgtgcgggatgaaacctctactgccctaggaatgccaggcaggtaccccaccttcgggtgggatctgagcctgggctaattgtctacgggtagtttcatttccaattccttcatgtcggagtc

SEQ ID NO: 1332 - DNA, 395 bp, unidentified; identical to SEQ ID NO: 431
  source 1..395: mol_type = unassigned DNA; note = Kobuvirus sp. strain 16806x8 polyprotein gene, partial cds.1 sequence

SEQ ID NO: 1333 - DNA, 733 bp, unidentified
  source 1..733: mol_type = unassigned DNA; note = unclassified Kobuvirus sequence
cttcggccctcacaccctcttttccgatggtctggtcccggaccaccgtcactccattcagcttcttcggaacctgttcggaggaattaaacgggcaccccacttcccccccccaccctcgcaacttcaagtgtgtgtgcccataaccttgacccctgccggtatgccgcccggttcagtggacaaactgctaggcaaattcccccctccccctgtggctggtccttcaaccagccactctcttccccccagccggacgtgctacaggctgtgcaaagcccccgcgaaagctgctcacgtggcaattgtgggtcccccctttgtcaaggcttcgagtctttctcccttaaggctagtcccgtactgtgaaatcagtgtgggcaactagtgaagccactgcacgctcccgaccacggacgcggagtgctgtcccccaagtcatgacactaacaccaagctgtgctgcctggcaagcatagcctgggaaggtgttccgctgtggctgccaaacctggtaacaggtgccccagtgtgtgtaaccttcctccagtcttcggactggcagctttgtgtgaagacgtgacgtaaggttcaagtgccaactccctggaagggatgacccctctactgccctaggaatgctacgcaggtacccctggttcgccagggatctgagcgtaggctaattgtctacgggtagtttcatttcccacctttttatttctttagcatc

SEQ ID NO: 1334 - DNA, 729 bp, Aichivirus A
  source 1..729: mol_type = genomic DNA
cctcggccccctcaccctcttttccggtggtctggtcccggaccaccgttactccattcagcttcttcggaacctgttcggaggaattaaacgggcacccactcatccctacctccccctgtaacttgaagtgtgtgctcgtgaccttgactcctgcgggcttcaccgacccgtccagtgaacaaactgctaggtgatttcttcccctcccctgacctggatgttccacatccaggtcttcctcccccagcccgacatgtcatgggctgtttggaatccccgcgaaagctgctaacgtggcaattgtgggtcccccttccaacaagacaccgagtctttctcccttaaggctagccccgtgtggtgaattccaccgggcaactagtgatgtcaatgcatgcctccgacctcggccgcggagtgctgccccccaagttgcgaaactgaccaaggattgtgctgcctggcaagcatagtctgaggagatgttccgctgtggctgccaaacctggtaacaggtgccccagtgcgcgtagtctccttccggttcgtccggctgtcctttggtaaagacacaatgtaaggggcgtgtgccaacgccctggaaagagtgaacttctactgccctaggaatgccacgcaggtacccctggtctcctaccagggatctgagcgtgggctaattgtctaacgggtagtttcatttctctcctcccttttgttgacacc

SEQ ID NO: 1335 - DNA, 729 bp, Aichivirus A
  source 1..729: mol_type = genomic DNA
cctcggccccctcaccctcttttccggtggtctggtcccggaccaccgttactccattcagcttcttcggaacctgttcggaggaattaaacgggcacccactcacccccatctccccctgtaacttgaagtgtgtgctcgtgaccttgactcctgcgggcttcaccgacccgtccagtgaacaaactgctaggtgatttcttcccctcccctagcctggatgttccacatccaggtcttcttcccccagcccgacatgtcatgggctgtttggaatccccgcgaaagctgctaacgtggcaattgtgggtcccccttccaacaagacaccgagtctttctcccttaaggctagccccgtgtggtgaattccaccgggcaactagtggtgtcaatgcatgcctccgacctcggccgcggagtgctgccccccaagttgcgaaactgaccaaggattgtgctgcctggcaagcatagtctgaggagatgttccgctgtggttgccaaacctggtaacaggtgccccagtgcgcgtagtctccttccggttcgtccggctgtcctttggtaaagacacaatgtaaggggcgtgtgccaacgccctggaaagagtgaacttctactgccctaggaatgccacgcaggtacccctggtttcttaccagggatctgagcgtgggctaattgtctaacgggtagtttcatttccctcccttcttttgttgacatc

SEQ ID NO: 1336 - DNA, 717 bp, Aichivirus A
  source 1..717: mol_type = genomic DNA
tcaccctcttttccggtggtccggtcccagaccaccgttactccactcagcttcttcggaacctgtctggaggaattaaacgggcacccactcatccccaccccccttgtaacttaaagtgtgtgctcgtgaccttgactcctgcgggcttcaccgacccgttcagtgaacagactgctaggtgatttcttccccttccctggcctggatggcccacatccaggtccccttcccccagcccgacatgtcatgggctgtttggaatccccgcgaaagctgctaacgtggcaattgtgggtcccccttccaacaagacaccgagtctttctcccttaaggctagccccgtgtggtgaattccaccgggcaactagtgacgccactgcatgcctccgacctcggccgcggagtgctgccccccaagttgtgaaactggccaaggactgtgctgcctggcaagcatagtctgaggagatgttccgctgtggctgccaaacctggtaacaggtgccccagtgtgcgtagtctccttccggttcgtccggctgtcctttggtaaagacacaatgtaaggggcgtgtgccaacgccctggaaagagtgaacttctgctgccctaggaatgccacgcaggtacccctggtttcccaccagggatctgagcgtgggctaattgtctaacgggtagtttcatttccctcctctcttttgttgacatc

SEQ ID NO: 1337 - DNA, 523 bp, unidentified
  source 1..523: mol_type = unassigned DNA; note = unclassified Kobuvirus sequence
cctccccacccctgggcgccgcctaggcgacgtccacatcctccccccagcctgacgtgtcacaggctgtgcaaagaccccgcgaaagctgctcacgtggcaattgtgggtcccccctttgtgaaggaaccgagtctttctcccttaaggctagacccctgtgtgaattcacaggtggcaactagtggttccactgcatgctcccgacctcggccgcggagtgctgttccccaagtcgtaacactgacctccacttatgtgcctggcaagcatatctgagaagatgttccgctgtggctgccaaacctggtaacaggtgccccagtgtgcgtagtcttcttccgtctccggacggtaagtgtgtggtaaagatgcggcgtaaggttcaagtgccaacgccctggaagggatgacccttctactgccctaggaatgccgcgcaggtaccccaggttcgcctgggatctgagcgcgggctaattgtctacgggtagtttcatttccctctttcttcactggcatc

SEQ ID NO: 1338 - DNA, 534 bp, unidentified
  source 1..534: mol_type = unassigned DNA; note = unclassified Kobuvirus sequence
ctaggtcattccctccccacccctgggcgccgcttcggcggtgtccacatcctccccccagcctgacgtgtcacaggctgtgcaaagaccccgcgaaagctgctcacgtggcaattgtgggtcccccctttgtgaaggaaccgagtctttctcccttaaggctagacccctgtgtgaattcacaggtggcaactagtggttccactgcatgctcccgacctcggccgcggagtgctgttccccaagtcgtaacactgacctccacttatgtgcctggcaagcatatctgaaaagatgttccgctgtggctgccaaacctggtaacaggtgccccagtgtgcgtagtcttcttccgtcttcggacggtaagtgtgtggtaaagatgcggcgtaaggttcaagtgccaacgccctggaagggatgacccttctactgccctaggaatgccgcgcaggtaccccaggttcgcctgggatctgagcgcgggctaattgtctacgggtagtttcatttccctctttcttcactggcatc

SEQ ID NO: 1339 - DNA, 306 bp, unidentified
  source 1..306: mol_type = unassigned DNA; note = Aichi virus 1 isolate ETH/2016/P24 polyprotein gene, partial cds.1 sequence
cggagtgctgttccccaagccaaacccctggcccttcactatgtgcctggcaagcatatctgagaaggtgttccgctgtggctgccagcctggtaacaggtgccccagtgtgcgtaaccttcttccgtcttcggacggtagtgattggttaagatttggcgtaaggttcatgtgccaacgccctgtgcgggatgaaacctctactaccctaggaatgccaggcaggtaccccaccctcgggtgggatctgagcctgggctaattgtctacgggtagtttcatttccaattcttctatgtcggagtc

SEQ ID NO: 1340 - DNA, 301 bp, unidentified
  source 1..301: mol_type = unassigned DNA; note = Aichi virus 1 isolate ETH/2016/P6 polyprotein gene, partial cds.1 sequence
gtgctgttccccaagccaaacccctggccctccactatgtgcctggcaagcatacctgagagggtgttccgctgtggctgccagcctggtaacaggtgccccagtgtgcgtaaccttcttccgtcttcggacggtagtgatcggttaagatttggtgtaaggttcatgtgccaacgccctgtgcgggatgaacctctactgccctaggaatgccaggcaggtaccccaccctcgggtgggatctgagcctgggctaattgtctacgggtagtttcatttccaatccttttatgtcggagtc

SEQ ID NO: 1341 - DNA, 610 bp, unidentified; identical to SEQ ID NO: 665
  source 1..610: mol_type = unassigned DNA; note = unclassified Kobuvirus sequence

SEQ ID NO: 1342 - DNA, 711 bp, unidentified
  source 1..711: mol_type = unassigned DNA; note = unclassified Kobuvirus sequence
tcaccctcttttccggtggtccggacccagaccaccgttactccattcagcttcttcggaacctgttcggaggaattaaacgggcacccactcaccccctctccctcctcgtaactaagtgtgtgcccagtctctttactcctgctggcttcaccgaccagtagtggccaaaatgctaggtgaacctcctccctcccccactgggctcccgcccagtttcctccccccagcctgacgtgtcacaggctgtgcaaagaccccgcgaaagctgccaaaagtggcaattgtgggtcccccctttgtcaaggcgtcgagtctttctcccttaaggctagccccgtcagtgaattctgtcgggcaactagtgacgccactgcatgcctccgacctcggccgcggagtgctgccccccaagtcatgcccctgaccacaagttgtgctgtctggcaaacattgtctgtgagaatgttccgctgtggctgccaagcctggtaacaggctgccccagtgtgtgtagttctcatccggacttcggtctggcaacttgctgttaagacatggcgtaaggggcgtgtgccaacgccctggaacgagtgtccactctaataccccgaggaatgctacgcaggtacccctggcctgccagggatctgagcgtaggctaattgtctaagggtattttcatttcccactctttctttcttgttcata

SEQ ID NO: 1343 - DNA, 713 bp, unidentified; identical to SEQ ID NO: 871
  source 1..713: mol_type = unassigned DNA; note = unclassified Kobuvirus sequence

SEQ ID NO: 1344 - DNA, 712 bp, Aichivirus A; identical to SEQ ID NO: 867
  source 1..712: mol_type = genomic DNA

SEQ ID NO: 1345 - DNA, 712 bp, Aichivirus A; identical to SEQ ID NO: 866
  source 1..712: mol_type = genomic DNA

SEQ ID NO: 1346 - DNA, 711 bp, unidentified
  source 1..711: mol_type = unassigned DNA; note = unclassified Kobuvirus sequence
tcaccctcttttccggtggtccggacccagaccaccgttactccattcagcttcttcggaacctgtttggaggaattaaacgggcacccacccaccttcacccccttttcgtaactaagtgtgtgcccaatctcatgactcctgctgacttcaccgaccagcagtgtccaaaacgctaggtgaatttccttcctccccctctgggcttctgcccagctccctccctccagcctgacgtgccacaggctgtgcaaagaccccgcgaaagctgccaaaagtggcaattgtgggtcccccctttgtaaaggcgtcgagtctttctcccttaaggctagacccgtcagtgaattctgtcgggcaactagtgacgccactgcatgcctccgacctcggccgcggagtgctgccccccaagtcgtgcccctgactacaagttgtgctgtctggcaaacattgtctgtgagaatgttccgctgtggctgccaagcctggtaacaggctgccccagtgtgcgtagttctcatccagacttcggtctggcaacttgctgttaagacacggcgtaaggggcgtgtgccaacgccctggaacgagtgtccactctaataccccgaggaatgctacgcaggtacccctggctccccagggatctgagcgtaggctaattgtctaagggtattttcatttcccactctttctttcttgttcata

SEQ ID NO: 1347 - DNA, 646 bp, Aichivirus A
  source 1..646: mol_type = genomic DNA
ggaattaaacgggcacccactcacccccatccccccctgtaacttaaagtgtgtgctcgtgaccttgactcctgcgggcttcaccgacccgtccagtgaacaaactgctaggtgactccttccccccccctggcctggatggcccacatccaggtcttcttcccccagcccgacatgtcatgggctgtttggaatccccgcgaaagctgctaacgtggcaattgtgggtcccccttccaacaagacaccgagtctttctcccttaaggctagccccgtgtggtgaattccaccgggcaactagtggtgtcaatgcatgcctccgacctcggccgcggagtgctgccccccaagttgcgaaactgaccaagactgtgctgcctggcaagcatagtctgaggagatgttccgctgtggttgccaaacctggtaacaggtgccccagtgtgcgtagtctccttccggttcgtccggctgtcctttggtaaagacacaatgtaaggggcgtgtgccaacgccctggaaagagtgaacttctactgccctaggaatgccacgcaggtacccctggtttcccaccagggatctgagcgtgggctaattgtctaacgggtagtttcatttccctcctctcttttgttgacatc

SEQ ID NO: 1348 - DNA, 712 bp, unidentified
  source 1..712: mol_type = unassigned DNA; note = Canine kobuvirus 1 isolate 75 polyprotein mRNA, complete cds.1 sequence
tcaccctcttttccggtggtccggacccagaccaccgttactccattcagcttcttcggaacctgttcggaggaattaaacgggcacccactcaccccctctccctcctcgtaactaagtgtgtgcccagtctctttactcctgctggcttcaccgaccagtagtggccaaaatgctaggtgaacctcctccctcccccactgggctcccgcccagtttcctccccccagcctgacgtgtcacaggctgtgcaaagaccccgcgaaagctgccaaaagtggcaattgtgggtcccccctttgtcaaggcgtcgagtctttctcccttaaggctagacctgtcagtgaattctgccgggcaactagtgacgccactgcatgcctccgacctcggctgcggggtgctgccccccaagttgtgcccctgagccacaagttgtgctgtctggcaaacattgtctgtgagaatgttccgctgcggctgccaagcctggtgacaggctgccccagtgtgtgtagttctcatccagacctcggtctggcaacttgctgttaagacacggcgtaaggggcgtgtgccaacgccctggaacgagtgtccattctaataccccgaggaatgctacgcaggtacccctggttcaccagggatctgagcgtaggctaattgtctaagggtattttcatttcccactctttctttcttgttcata

SEQ ID NO: 1349 - DNA, 712 bp, unidentified
  source 1..712: mol_type = unassigned DNA; note = Canine kobuvirus 1 isolate B103 polyprotein mRNA, complete cds.1 sequence
tcaccctcttttccggtggtccggacccagaccaccgttactccattcagcttcttcggaacctgttcggaggaattaaacgggcacccactcaccctctctccctcctcgtaactaagtgtgtgcccagtctctttactcctgctggcttcaccgaccagtagtgaccaaaatgctaggtgaacctcctcccacgccctctgggcccccgcccagtttcctccccccagcctgacgtgtcacaggctgtacaaagaccccgcgaaagctgccaaaagtggcaattgtgggtcccccctttgtcaaggcgtcgagtctttctcccttaaggctagacccgtcagtgaattctgccgggcaactagtgacgccactgcatgcctccgacctcggctgcggagtgctgccccccaagtcgtgcccctgagccacaagttgtgctgtctggcaaacattgtctgtgagaatgttccgctgcggctgccaggcctggtaacaggctgccccagtgtgtgtagttctcatccagatctcggtctggcaacttgctgttaagacacggcgtaaggggcgtgtgccaacgccctggaacgagtgtccattctaataccccgaggaatgctacgcaggtacccctggtgaaccaggggtctgagcgtaggctaattgtctaagggtattttcatttcccactctttctttcttgttcata

SEQ ID NO: 1350 - DNA, 646 bp, Aichivirus A
  source 1..646: mol_type = genomic DNA
ggaattaaacgggcacccactcacccccatccccccctgtaacttaaagtgtgtgctcgtgaccttgactcctgcgggcttcaccgacccgtccagtgaacaaactgctaggtgatttcttcccctccctcagcctgggtgttccacatccaggtctttttcccccagcccgacatgtcatgggctgtttggaatccccgcgaaagctgctaacgtggcaattgtgggtcccccttccaacaagacaccgagtctttctcccttaaggctagccccgtgtggtgaactccaccgggcaactagtggtgtcaatgcatgcctccgacctcggccgcggagtgctgccccccaagttgtgaaactgaccaaggatgtgctgcctggcaagcatagtctgaggagatgttccgctgtggctggcaagcctggtaacaggtgccccagtgtgcgtagtctccttccggttcgtccggctgtcctttggtaaagacacaatgtaaggggcgtgtgccaacgccctggaaagagtgaacttttactgccctaggaatgccacgcaggtacccctggtttcccaccagggatctgagcgtgggctaattgtctaacgggtagtttcatttccctcctctcttttgttgacatc

SEQ ID NO: 1351 - DNA, 647 bp, Aichivirus A
  source 1..647: mol_type = genomic DNA
ggaattaaacgggcacccactcatccctacctccccctgtaacttgaagtgtgtgctcgtgaccttgactcctgcgggcttcaccgacccgtccagtgaacaaactgctaggtgatttcttccccttcccccacctggatgttctacatccaggtcttcctcccccagcccgacatgtcatgggctgtttggaacccccgcgaaagctgctaacgtggcaattgtgggtcccccttccaacaagacaccgagtctttctcccttaaggctagccccgtgtggtgaattccaccgggcaactagtggtgtcaatgcatgcctccgacctcggccgcggagtgctgccccccaagttgtgaaactgaccaaggattgtgctgcctggcaagcatagtctgaggagatgttccgctgtggctgccaaacctggtaacaggtgccccagtgcgcgtagtctccttccggttcgtccggctgtcctctggtaaagacacaatgtaaggggtgtgtgccaacgccctggaaagagtgaacttctactgccctaggaatgccacgcaggtacccctggtcccccaccagggatctgagcgtgggctaattgtctaacgggtagtttcatttctctcctctcctttgttgacatc

SEQ ID NO: 1352 - DNA, 579 bp, unidentified
  source 1..579: mol_type = unassigned DNA; note = Murine kobuvirus 1 isolate MKV1/NYC/2014/M014/0146, partial genome.1 sequence
gccaggtcgcatcgcctggttggtgaccaaactgctagatgctcctccctttccctcggggttggcgcaccgccatccctgcatcctccccccagcctgacatgctacaggctgtgcaagaaccccgcgaaagctgccaccgtggcaattgtgggtccccctcttgtcaaggcacagagtctttctcccttaaggctagacccctctgtgaattcagaggcggcaactagttgtgccactacatgcctcagacctcggtcgcggagtgctgttccccaaaccctgacactgccgcgtgagtatgctgcttggcaagcattgcctggatggtcgttccgctggggctgccaggtctggtaacagaccgctccagtgtgcgtagaccatctccagcttcggctggtgctcacaaggtaagactcggtgtaaggttcatgtgccaacaccctggaatgagtgaaaactctactgccctaggaatgctacgcaggtacccctgctcccttgggagccagggatctgagcgtaggctaattgtctgtcgggtagtttcatttcccacctcctagactgttcacc

SEQ ID NO: 1353 - DNA, 601 bp, Aichivirus A
  source 1..601: mol_type = genomic DNA
tttaagtgttgtgcccaatctcttgactcctgctggaaccaccgaccagtagtgtccaaaatgctaggtggaaaatcctcccttcccctctgggctccatgcccagcatcctccccccagcctgacgtgtcacaggctgtgcaaagaccccgcgaaagctgccaaaagtggcaattgtgggtcccccctttgtcaaggcgtcgagtctttctcccttaaggctagccccgtcagtgaattctgacgggcaactagtgacgccactgcatgcctccgacctcggccgcggagtgctgccccccaagtcatgcccctgaccacaagttgtgctgtctggcaaacactgtctgtgagaatgttccgctgtggctgccaagcctggtaacaggctgccccagtgtgcgtagttctcatccagacctcggtctggcaacttgctgttaagacatggcgtaaggggcgtgtgccaacgccctggaacgagtgtccactctaataccccgaggaatgctacgcaggtacccctggttcgccagggatctgagcgtaggctaattgtctaagggtattttcatttcccactctctctttcttgttcata

SEQ ID NO: 1354 - DNA, 601 bp, unidentified
  source 1..601: mol_type = unassigned DNA; note = unclassified Kobuvirus sequence
tttaagtgttgtgcccaatctcttgactcctgctggaaccaccgaccagtagtgtccaaaatgccaggtggaaaatcctcccttcccctctgggcttcatgcccggcatcctccccccagcctgacgtgccacaggctgtgcaaagaccccgcgaaagctgccaaaagtggcaattgtgggtcccccctttgtcaaggcgtcgagtctttctcccttaaggctagtcctgtcagtgaactctgtcgggcaactagtgacgccactgcatgcctccgacctcggccgcggagtgctgccccccaagtcatgcccctgaccacaagttgtgctgtctggcaaacattgtctgtgagaatgttccgctgtggctgccaagcctggtaacaggctgccccagtgtgcgtaattctcatccagacttcggtctggcaacttgctgttaagacatggcgtaaggggcgtgtgccaacgccctggaacgagtgtccactctaataccccgaggaatgctacgcaggtacccctggctcgccagggatctgagcgtaggctaattgtctaagggtattttcatttcccaccctcttcttcttgttcata

SEQ ID NO: 1355 - DNA, 493 bp, unidentified
  source 1..493: mol_type = unassigned DNA; note = unclassified Kobuvirus sequence
tcctccccccagcctgacgtgtcacaggctgtgcaaagaccccgcgaaagctgccaaaagtggcaattgtgggtcccccctttgtcaaggcgtcgagtctttctcccttaaggctagccccgacagtgaattctgtcgggcaactagtgacgccactgcatgcctccgacctcggccgcggagtgctgccccccaagtcgtgcccctgactacaagttgtgctgtctggcaaacattgtctgtgagaatgttccgctgtggctgccaagcctggtaacaggctgccccagtgtgcgtagttctcatccagacttcggtctggcaacttgctgttaagacgcggcgtaaggggcgtgtgccaacgccctggaacgagtgtccactctaataccccgaggaatgctacgcaggtacccctggctcgccagggatctgagcgtaggctaattgtctaagggtattttcatttcccactctttctctctcgttcata

SEQ ID NO: 1356 - DNA, 612 bp, unidentified; identical to SEQ ID NO: 680
  source 1..612: mol_type = unassigned DNA; note = unclassified Kobuvirus sequence

SEQ ID NO: 1357 - DNA, 766 bp, Aichivirus A; identical to SEQ ID NO: 1227
  source 1..766: mol_type = genomic DNA

SEQ ID NO: 1358 - DNA, 561 bp, Aichivirus A
  source 1..561: mol_type = genomic DNA
ccgaccagtagtgtccgaaatgctagagtggacttcctcccttcccctctgggtatcttgcccagtttcctccccccaacctgacgtgccacaggctgtgaaaacaccccgcgaaagctgccaaaagtgggaattgtgggtccccccctttgccaaggagtcgagtctttctcccttaaggctagccccatcagtgaattctgttgggcaactagtgacgccactgcatgcctccgacctcggccgcggagtgctgccccccaagtcgtgcccctgaccacaagttgtgctgtctggcaaacattgtctgtgagaatgttccgctgtggctgccaagcctggtaacaggctgccccagtgtgcgtagttctcatccagacttcggtctggcaacttgctgttaagacacggcgtaaggggcgtgtgccaacgccctggaacgagtgtccactctaataccccgaggaatgctacgtaggtacccctggttcgccagggatctgagcgtaggctaattgtctaagggtattttcatttcccactctctctttcttgttcata

SEQ ID NO: 1359 - DNA, 699 bp, unidentified
  source 1..699: mol_type = unassigned DNA; note = unclassified Salivirus sequence
tatggcaggcgggcttgtggacggtttcggcccacccacagcaagaatgccatcatctgtcctcacccccaattttccctttcttcccctgcaatcatcacgcttactcgcatgtgcattgagtggtgcatgtgttgaacaaacagctacactcacatgggggcgggttttcccgccctacggcctctcgcgaggcccacccttcccctccccttataactacagtgctttggcaggtaagcatcctgatcccccgcggaagctgctcacgtggcaactgtggggacccagacaggttatcaaaggcacccggtctttccgccttcaggagcatccccactagtgaattctagtggggctctgcttggtgccaacctcccccaaatgcgcgctgcgggagtgctcttccccaacccatcctagtatcctctcatgtgtgtgcttggtcagcatatctgagacgacgttccgctgtcccagaccagtccagtaatggacgggccagtgtgcgtagtcgtcttccggcttgtccggcgcatgtttggtgaaccggtggggtaaggttggtgtgcccaacgcccgtactttggtgacacctcaagaccacccaggaatgccagggaggtaccccgcctcacggcgggatctgaccctgggctaattgtctacggtggttcttcttgcttccacttctttctt

SEQ ID NO: 1360 - DNA, 709 bp, Salivirus A
  source 1..709: mol_type = genomic DNA
tatggcaggcgggcttgtggacggcttcggcccacccacagcaagaatgccatcatctgtcctcacccccaattttcccttttcttcccctgcaaccattacgcttactcgcatgtgcattgagtggtgcatgtgttgaacaaacagctacactcacatgggggcgggttttcccgccctacggcctctcgcgaggcccaccccttccctccccttataactacagtgctttggtaggtaagcatcctgatcccccgcggaagctgctcacgtggcaactgtggggacccagacaggttatcaaaggcacccggtctttccgccttcaggagtatccctactagtgaattctagcggggctctgcttggtgccaacctcccccaaatgcgcgctgcgggagtgctcttccccaactcaccctagtatcctctcatgtgtgtgcttggtcagcatatctgagacgatgttccgctgtcccagaccagtccagtaatggacgggccagtgcgtgtagtcgtcttccggcttgtccggggcatgtttggtgaaccggtggggtaaggttggtgtgcccaacgcccgtactttggtgacacctcaagaccacccaggaatgccagggaggtaccccacctcacggtgggatctgaccctgggctaattgtctacggtggttcttcttgcttccacttctttcttctgttcacg

SEQ ID NO: 1361 - DNA, 720 bp, unidentified
  source 1..720: mol_type = unassigned DNA; note = unclassified Salivirus sequence
cccctttcgaccgacctatggcaggcgggcttgtggacggcttcggcccacccacagcaagaatgccatcatctgtcctcacccccatcttcccctttcttccctgcaaccgtcacgcttactcgcatgtgcattgagtggtgcacgtgtcgaacaaacagctacactcacatggggcgggttttcccgccttgcggcctctcgcgaggcccacccctccctctcctcccataactacagtgctttggtaggtaagcatcctgatcccccgcggaagctgctcacgtggcaactgtggggacccagacaggttatcaaaggcacccggtctttccgccttcaggagtatccctgctagtgaattctagtagggctctgcttggtgccaacctcccccaaatgcgcgctgcaggagtgctcttccccaactcaccctagtatcctctcatgtgtgtgcttggtcagcatatctgagacgatgttccgctgtcccagaccagtccagtaatggacgggccagtgtgcgtagtcgtcttccggcttgcccggcgcatgtttggtgaaccggtggggtaaggttggtgtgcccaacgcccgtactttggtgatacctcaagaccacccaggaatgccagggaggtaccccgcttcacagcgggatctgaccctgggctaattgtctacggtggttcttcttgcttccacttctttctactgttt

SEQ ID NO: 1362 - DNA, 724 bp, unidentified
  source 1..724: mol_type = unassigned DNA; note = unclassified Salivirus sequence
cttccccctttcgaccgccctatggcaggcgggcttgtggacggcttcggcccacccacagcaagaatgccatcatctgtcctcacccccatcttcccctttcttccctgcaaccgtcacgcttactcgcatgtgcattgagtggtgcacgtgtcgaacaaacagctacactcacatggggcgggttttcccgccttgcggcctctcgcgaggcccacccctcccccccctcccataactacagtgctttggtaggtaagcatcctgatcccccgcggaagctgctcacgtggcaactgtggggacccagacaggttatcaaaggcacccggtctttccgccttcaggagtatccctgctagtgaattctagtagggctctgcttggtgccaacctcccccaaatgcgcgctgcaggagtgctcttccccaactcaccctagtatcctctcatgtgtgtgcttggtcagcatatctgagacgatgttccgctgtcccagaccagtccagtaatggacgggccagtgtgcgtagtcgtcttccggcttgcccggcgcatgtttggtgaaccggtggggtaaggttggtgtgcccaacgcccgtactttggtgatacctcaagaccacccaggaatgccagggaggtaccccgcttcacagcgggatctgaccctgggctaattgtctacggtggttcttcttgcttccacttctttctactgttt

SEQ ID NO: 1363 - DNA, 731 bp, unidentified; identical to SEQ ID NO: 931
  source 1..731: mol_type = unassigned DNA; note = unclassified Salivirus sequence

SEQ ID NO: 1364 - DNA, 650 bp, Salivirus A
  source 1..650: mol_type = genomic DNA
tctgtcctcaccccatcttcccttctttcctgcaccgttacgcttactcgcatgtgcattgagtggtgcacgtgcttgaacaaacagctacactcacatgggggcgggttttcccgccctgcggcctctcgcgaggcccacccctccccttcctcccataactacagtgctttggtaggtaagcatcctgatcccccgcggaagctgctcacgtggcaactgtggggacccagacaggttatcaaaggcacccggtctttccgccttcaggagtatccctgctagtgaattctagtagggctctgcttggtgccaacctcccccaaatgcgcgctgcgggagtgctcttccccaactcaccctagtatcctctcatgtgtgtgcttggtcagcatatctgagacgatgttccgctgtcccagaccagtccagtaatggacgggccagtgtgcgtagtcgtcttccggcttgtccggcgcatgtttggtgaaccggtggggtaaggttggtgtgcccaacgcccgtactttggtgatacctcaagaccacccaggaatgccagggaggtaccccgcttcacagcgggatctgaccctgggctaattgtctacggtggttcttcttgcttccacttctttctactgttcatg

SEQ ID NO: 1365 - DNA, 708 bp, unidentified
  source 1..708: mol_type = unassigned DNA; note = Salivirus A isolate BN-2, complete genome.1 sequence
tatggcaggcgggcttgtggacggcttcggcccacccacagcaagaatgccatcatctgtcctcacccccatgtttcccctttctttccctgcaaccgttacgcttactcgcaggtgcatttgagtggtgcacgtgttgaataaacagctacactcacatgggggcgggttttcccgccctgcggcctctcgcgaggcccacccctccccttcctcccataactacagtgctttggtaggtaagcatcctgatcccccgcggaagctgctcacgtggcaactgtggggacccagacaggttatcaaaggcacccggtctttccgccttcaggagtatccctgctagtgaattctagtagggctctgcttggtgccaacctcccccaaatgcgcgctgcgggagtgctcttccccaactcaccctagtatcctctcatgtgtgtgcttggtcagcatatctgagacgatgttccgctgtcccagaccagtccagtaatggacgggccagtgtgcgtagtcgtcttccggcttttccggcgcatgtttggtgaaccggtggggtaaggttggtgtgcccaacgcccgtactttggtgatacctcaagaccacccaggaatgccagggaggtaccccgcttcacagcgggatctgaccctgggctaattgtctacggtggttcttcttgcttccacttctttctactgttc

SEQ ID NO: 1366 - DNA, 484 bp, unidentified
  source 1..484: mol_type = unassigned DNA; note = Salivirus sp. isolate ETH_P14_2016 polyprotein gene, complete cds.1 sequence
gtgctttggcaggtaagcatcctgatcccccgcggaagctgctcacgtggcaactgtggggacccagacaggttatcaaaggcacccggtctttccgccttcaggagtaccctcactagtgaattctagtggggctctgcttggtgccaacctcccccaaatgcgcgctgcgggagtgctcttccccaacccatcctagtaccctctcatgtgtgtgcttggtcagcacatctgagacgacgttccgctgtcccagaccagtccagtaatggacgggccagtgtgcgtagtcgtcttccggcttgtccggcgcatgtttggtgaaccggtggggtaaggttggtgtgcccaatgcccgtactttggtgatacctcaagaccacccaggaatgccagggaggtaccccgcctctcggcgggatctgaccctgggctaattgtctacggtggttcttcttgcttccactcttttcttctgttcacg

SEQ ID NO: 1367 - DNA, 718 bp, unidentified
  source 1..718: mol_type = unassigned DNA; note = unclassified Salivirus sequence
tttcgaccgccttatggcaggcgggcttgtggacggcttcggcccacccacagcaagaatgccatcatctgtcctcacccccatttctcccctccttcccctgcaaccattacgcttactcgcatgtgcattgagtggtgcacgtgttgaacaaacagctacactcacgtgggggcgggttttcccgcccttcggcctctcgcgaggcccacccttccccttcctcccataactacagtgctttggtaggtaagcatcctgatcccccgcggaagctgctcgcgtggcaactgtggggacccagacaggttatcaaaggcacccggtctttccgcctccaggagtatccctgctagtgaattctagtggggctctgcttggtgccaacctcccccaaatgcgcgctgcgggagtgctcttccccaactcaccctagtatcctctcatgtgtgtgcttggtcagcatatctgagacgatgttccgctgtcccagaccagtccagcaatggacgggccagtgtgcgtagtcgtcttccggcttgtccggcgcatgtttggtgaaccggtggggtaaggttggtgtgcccaacgcccgtactttggtgacaactcaagaccacccaggaatgccagggaggtaccccgcctcacggcgggatctgaccctgggctaattgtctacggtggttcttcttgcttccatttctttcttctgttc

SEQ ID NO: 1368 - DNA, 624 bp, Salivirus A
  source 1..624: mol_type = genomic DNA
ttctcctgcaaccattacgcttaatcgcatgtgcattgagtggtgcatgtgttgaacaaacagctacaatcacatgggggcgggttttcccgccccacggcttctcgcgaggcccatccctcccttttctcccataactacagtgctttggtaggtaagcatcccgatctcccgcggaagctgctcacgtggcaactgtggggacccagacaggttatcaaaggcacccggtctttccgccttcaggagtatccctgctagcgaattctagtagggctctgcttggtgccaacctctcccaaatgcgcgctgcgggagtgctcttccccaaatcaccccagtatcctctcatgtgtgtgcctggtcagcatatctgagacgatgttccgctgtcccagaccagtccagtaatggacgggccagtgtgcgtagtcgtcctccggcttgtccggcgcatgtttggtgaaccggtggggtaaggttggtgtgcccaacgcccgtaatcaggggatacctcaaggcacccaggaatgccagggaggtatcccgcctcacagcgggatctgaccctggggtaaatgtctgcggggggtcctcttggcccaattctcagtaattttcagg

SEQ ID NO: 1369 - DNA, 624 bp, unidentified; identical to SEQ ID NO: 736
  source 1..624: mol_type = unassigned DNA; note = Salivirus A strain SH1 polyprotein gene, complete cds.1 sequence

SEQ ID NO: 1370 - DNA, 730 bp, unidentified
  source 1..730: mol_type = unassigned DNA; note = unclassified Salivirus sequence
acatggggggtctgcggacggcttcggcccacccgcgacaagaatgccgtcatctgtcctcattacccgtattccttcccttcccccgcaaccaccacgcttactcgcgcacgtgttgagtggcacgtgcgttgtccaaacagctacacccacacccttcggggcgggtttgtcccgccctcgggttcctcgcggaacccccccctccctctctctctttctatccgccctcacttcccataactacagtgctttggtaggtgagcaccctgaccccccgcggaagctgctaacgtggcaactgtggggatccaggcaggttatcaaaggcacccggtctttccgccttcaggagtatctctgccggtgaattccggtagggctctgcttggtgccaacctcccccaaatgcgcgctgcgggagtgctcttccccaactcatcttagtaacctctcatgtgtgtgcttggtcagcatatctgaggcgacgttccgctgtcccagaccagtccagcaatggacgggccagtgtgcgtagtcgctttccggttttccggcgcatgtttggcgaaacgctgaggtaaggttggtgtgcccaacgcccgtaatttggtgatacctcaagaccacccaggaatgccagggaggtaccccacttcggtgggatctgaccctgggctaattgtctacggtggttcttcttgcttccacttctcttttttctggcatg

SEQ ID NO: 1371 - DNA, 752 bp, unidentified; identical to SEQ ID NO: 128
  source 1..752: mol_type = unassigned DNA; note = unclassified Salivirus sequence

SEQ ID NO: 1372 - DNA, 471 bp, unidentified; identical to SEQ ID NO: 12
  source 1..471: mol_type = unassigned DNA; note = Kobuvirus cattle/Kagoshima-1-22-KoV/2014/JPN genomic RNA, nearly1 sequence

SEQ ID NO: 1373 - DNA, 750 bp, Aichivirus E; identical to SEQ ID NO: 1201
  source 1..750: mol_type = genomic DNA

SEQ ID NO: 1374 - DNA, 555 bp, Aichivirus C
  source 1..555: mol_type = genomic DNA
cctcggccccctcaccctcttttccggtggccattcgcccgggccaccgttactccactccactccttcgggactggtttggaggaacacaacagggcttcccatccctgtttaccctttattccatcatcctttccccaagtttaccctatccacaccccactgactgactcctttggattttgacctcagaatgcctatttgacctcccactcgcctctcccttttcggattgccggtggtgcctggcggaaaaagcacaagtgtgttgcaggctaccaaactcctacccgacaaaggtgcgtgtccgcgtgctgagtaatgggataggagatgcctacaacaggctcgcccatgagtagagcatggactgcggtgcatgtgacttcggtcaccacgggcatagcattgctcacccgtgaatcaagtcatcgagatttctctgacctctgaagtgcactgtggttgcgtggctgggaatccacgcttgaccatgtactgcttgatagagtcgcggctggccgactcatgggttaaagtcagttgacaagacac

SEQ ID NO: 1375 - DNA, 555 bp, Aichivirus C
  source 1..555: mol_type = genomic DNA
cctcggccctctcaccctcttttccggtggccactcgcccgggccaccgttactccattccactccttcgggactggtttggaggaacataacagggcttcccatccctgtttatcctaattccacttacctttctccataattaaccctatccacaccccactgaccgatccctttggattttgacctcagaatgcctacctgacctcccacttgcctttcccttttcggattgccggtggtgcctggcggaaaaagcacaagtgtgttgatggctaccaaactcctacccgacaaaggtgcgtgtccgcgtgctgagtaatgggataggagatgccattgacaggctcgcccatgagtagagcatggactgcggtgcatgtgacttcggtcaccaggggcatagcattgctcacccctgaatcaagtcatcgagatttctctgacctctgaagtgcactgtggttgcgtggctgggaatccacgcttgaccatgtactgcttgatagagtcgcggctggccgactcatgggttaaagtcagttgacaagacac

SEQ ID NO: 1376 - DNA, 556 bp, Aichivirus C
  source 1..556: mol_type = genomic DNA
cctcggccccctcaccctcttttccggtggccactcgcccgggccaccgttactccactccactccttcgggactggtttggaggaacataacagggcttcccatccctgtttacccttaattccatttaccttctcccccaactaaccctatccacaccccactgactgactcctttggattttgacctcagaatgcctacttgacctcccacttgcctctcccttctcggattgccggtggtgcctggcggaaaaagcacaagtgtgttgcaggctaccaaactcctacccgacaaaggtgcgtgtccgcgtgctgagtaatgggataggagatgcctacaacaggctcgcccatgagtagagcatggactgcggtgcatgtgacttcggtcaccacgggcatagcattgctcacccgtgaatcaagtcatcgagatttctctgacctctgaagtgcactgtggttgcgtggctgggaatccacgcttgaccatgtactgcttgatagagtcgcggctggccgactcatgggttaaagtcagttgacaagacac

SEQ ID NO: 1377 - DNA, 556 bp, unidentified
  source 1..556: mol_type = unassigned DNA; note = Porcine kobuvirus strain WUH1, complete genome.1 sequence
cctcggccccctcaccctcttttccggtggccactcgcccgggccaccgttactccactccactccttcgggactggtttggaggaacacaacagggcttcccatccctgttcaccctacactccacataccctttccctcaaccaaccctatccaaaccccactgaccgactcccttggattttgacctcagaatgcctacttgacctcccacttgcctctcccttctcggattgccggtggtgcctggcggaaaaagcacaagtgtgttgcaggctatcaaacttctacccgacaaaggcgcgtgtccgcgtgctgagtaatgggataggagatgcctacaacaggctcgcccatgagtagagcatggactgcggtgcatgtgacttcggtcaccacgggcatagcattgctcacccgtgaatcaagtcatcgagatttctctgacctctgaagtgcactgtggttgcgtggctgggaatccatgcttgaccatgtactgcttgatagagtcgcggctggccgactcatgggttaaagtcagttgacaagacac

SEQ ID NO: 1378 - DNA, 555 bp, unidentified
  source 1..555: mol_type = unassigned DNA; note = Porcine kobuvirus isolate K-11/2012/CH, complete genome.1 sequence
cctcggccccctcaccctcttttccggtggccacccgcccgggccaccgttactccactccactccttcgggactggtttggaggaacataacagggcttcccatccctgtttacccttattccacttaccctttcccttaaccaaccctatccacaccccactgactgattcctttggattttgacctcagaatgcctacttgacctcccacttgtctctcccttctcggattgccggtggtgcctggcggaaaaagcacaagtgtgttgcaggctaccaaactcctacccgacaaaggtgcgtgtccgcgtgctgagtaatgggataggagatgcctacaacaggctcgcccatgagtagagcatggactgcggtgcatgtgacttcggtcaccacgggcatagcattgctcacccgtgaatcaagtcatcgagatttctctgacctctgaagtgcactgtggttgcgtggctgggaatccacgcttgaccatgtactgcttgatagagtcgcggctggccgactcatgggttaaagtcagttgacaagacac

SEQ ID NO: 1379 - DNA, 555 bp, Aichivirus C
  source 1..555: mol_type = genomic DNA
cctcggccccctcaccctcttttccggtggccacacgcccgggccaccgttactccactccactccttcgggactggtttggaggaacacaacagggcttcccatccctgtttaccctttattccatcatcctttccccaagtttaccctatccacaccccactgactgactcctttggattttgacctcagaatgcctatttgacctcccactcgcctctcccttttcggattgccggtggtgcctggcggaaaaagcacaagtgtgttgcaggctaccaaactcctacccgacaaaggtgcgtgtccgcgtgctgagtaatgggataggagatgcctacaacaggctcgcccatgagtagagcatggactgcggtgcatgtgacttcggtcaccacgggcatagcattgctcacccgtgaatcaagtcatcgagatttctctgacctctgaagtgcactgtggttgcgtggctgggaatccacgcttgaccatgtactgcttgatagagtcgcggctggccgactcatgggttaaagtcagttgacaagacac

SEQ ID NO: 1380 - DNA, 555 bp, Aichivirus C
  source 1..555: mol_type = genomic DNA
cctcggccccctcaccctcttttccggtggccacccgcccgggccaccgttactccactccactccttcgggactggtttggaggaacataacagggcttcccatccctgtttacccttactccactcacccttctccttgaccaaccctatccacaccccactgactgactcctttggattttgacctcagaatgcctacctgacctcccacttgcctctcccatctcggactgccggtggtgcctggcggaaaaagcacaagtgtgttgatggctaccaaactcctacccgacaaaggtgcgtgtccgcgtgctgagtaatgggataggagatgccattgacaggctcgcccatgagtagagcatggactgcggtgcatgtgacttcggtcaccaggggcatagcattgctcacccctgaatcaagtcatcgagatttctctgacctctgaagtgcactgtggttgcgtggctgggaatccacgcttgaccatgtactgcttgatagagtcgcggctggccgactcatgggttaaagtcagttgacaagacac

SEQ ID NO: 1381 - DNA, 555 bp, unidentified
  source 1..555: mol_type = unassigned DNA; note = Porcine kobuvirus swine/K-30-HUN/2008/HUN, complete genome.1 sequence
cctcggccccctcaccctcttttccggtggccacccgcccgggccaccgttactccactccactccttcgggactggtttggaggaacataacagggcttcccatccctgtttacccttactccactcacccctccccttgaccaaccctatccacaccccactgactgactcctttggatcttgacctcggaatgcctacttgacctcccacttgcctctcccttttcggattgccggtggtgcctggcggaaaaagcacaagtgtgttgttggctaccaaactcctacccgacaaaggtgcgtgtccgcgtgctgagtaatgggataggagatgccaataacaggctcgcccatgagtagagcatggactgcggtgcatgtgacttcggtcaccaggggcatagcattgctcacccctgaatcaagtcatcgagatttctctgacctctgaagtgcactgtggttgcgtggctgggaatccacgcttgaccatgtactgcttgatagagtcgcggctggccgactcatgggttaaagtcagttgacaagacac

SEQ ID NO: 1382 - DNA, 555 bp, unidentified
  source 1..555: mol_type = unassigned DNA; note = Porcine kobuvirus swine/S-1-HUN/2007/Hungary, complete genome.1 sequence
cctcggccccctcaccctcttttccggtggccacccgcccgggccaccgttactccactccactccttcgggactggtttggaggaacataacagggcttcccatccctgtttacccttactccactcacccttccccttgaccaaccctatccacaccccactgactgactcctttggatcttgacctcggaatgcctacttgacctcccacttgcctctcccttttcggattgccggtggtgcctggcggaaaaagcacaagtgtgttgttggctaccaaactcctacccgacaaaggtgcgtgtccgcgtgctgagtaatgggataggagatgccaataacaggctcgcccatgagtagagcatggactgcggtgcatgtgacttcggtcaccaggggcatagcattgctcacccctgaatcaagtcatcgagatttctctgacctctgaagtgcactgtggttgcgtggctgggaatccacgcttgaccatgtactgcttgatagagtcgcggctggccgactcatgggttaaagtcagttgacaagacac

SEQ ID NO: 1383 - DNA, 555 bp, Aichivirus C
  source 1..555: mol_type = genomic DNA
cctcggccctctcaccctcttttccggtggccactcgcccgggccaccgttactccactccactccttcgggactggtttggaggaacataacagggcttcccacccctgtttaccctcactccacttatccttctcctcaactaaccctatccacaccccactgattgattcctttggatttcgacctcagaatgcctacttgacctcccacttgcctctcccctctcggattgccggtggtgcctggcggaaaaagcacaagtgtgttgttggctaccaaactcctacccgacaaaggtgcgtgtccgcgtgctgagtaatgggatgggagatgccaataacaggctcgcccatgagtagagcatggactgcggtgcatgtgacttcggtcaccaggggcatagcattgctcacccctgaatcaagtcatcgagatttctctgacctctgaagtgcactgtggttgcgtggctgggaatccacgcttgaccatgtactgcttgatagagtcgcggctggccgactcatgggttaaagtcagttgacaagacac

SEQ ID NO: 1384 - DNA, 555 bp, Aichivirus C
  source 1..555: mol_type = genomic DNA
cctcggccctctcaccctcttttccggtggccactcgcccgggccaccgttactccactccactccttcgggactggtttggaggaacataacagggcttcccacccctgttcacccttactccactcacccttatccttaaccaaccctatccacaccccactgactgattcctttggattttgacctcagaatgcccacctgacctcccacttgcttctcccttctcggattgccggtggtgcctggcggaaaaagcacaagtgtgttgttggctaccaaactcctacccgacaaaggtgcgtgtccgcgtgctgagtaatgggataggagatgccaatgacaggctcgcccatgagtagagcatggactgcggtgcatgtgacttcggtcaccaggggcatagcattgctcacccctgaatcaagtcatcgagacttctctgacctctgaagtgcactgtggttgcgtggctgggaatccacgcttgaccatgtactgcttgatagagtcgcggctgaccgactcatgggttaaagtcagttgacaagacac

SEQ ID NO: 1385 - DNA, 555 bp, Aichivirus C
  source 1..555: mol_type = genomic DNA
cctcggccctctcaccctcttttccggtggccactcgcccgggccaccgttactccactccactccttcgggactggtttggaggaacataacagggcttcccatccctgtttacccttattccacttacccttctcctcaaccaaccctatccacaccccactgactgattcctttggattttgacctcagaatgcctacctgacctcccacttgcctctcccctctcggattgccggtggtgcctggcggaaaaagcacaagtgtgttgttggctaccaaactcctacccgacaaaggtgcgtgtccgcgtgctgagtaatgggataggagatgccaataacaggctcgcccatgagtagagcatggactgcggtgcatgtgacttcggtcaccaggggcatagcattgctcacccctgaatcaagtcatcgagatttctctgacctctgaagtgcactgtggttgcgtggctgggaatccacgcttgaccatgtactgcttgatagagtcgcggctggccgactcatgggttaaagtcagttgacaagacac

SEQ ID NO: 1386 - DNA, 555 bp, Aichivirus C
  source 1..555: mol_type = genomic DNA
cctcggccctctcaccctcttttccggtggccactcgcccgggccaccgttactccactccactccttcgggactggtttggaggaacataacagggcttcccatccctgtttaccctcattccacttacccttccccttaaccaaccctatccacaccccactgactgattcctttggattttgacctcagaatgcctacctgacctcccacttgcttctcccctctcggattgccggtggtgcctggcggaaaaagcacaagtgtgttgttggctaccaaactcctacccgacaaaggtgcgtgtccgcgtgctgagtaatgggataggagatgccaataacaggctcgcccatgagtagagcatggactgcggtgtatgtgacttcggtcaccaggggcatagcattgctcacccctgaatcaagtcatcgagatttctctgacctctgaagtgcactgtggttgcgtggctgggaatccacgcttgaccatgtactgcttgatagagtcgcggctggccgactcatgggttaaagtcagttgacaagacac

SEQ ID NO: 1387 - DNA, 555 bp, Aichivirus C
  source 1..555: mol_type = genomic DNA
cctcggccctctcaccctcttttccggtggccactcgcccgggccaccgttactccactccactccttcgggactggtttggaggaacataacagggcttcccacccctgttcaccctaactccacttaccctttcccttaaccaaccctatccacaccccactgattgactcccttggattttgacctcggaatgcctacttgacctcccacttgcctttcccttcccggattgccggtggtgcctggcggaaaaagcacaagtgtgttgttggctaccaaactcctacccgacaaaggtgcgtgtccgcgtgctgagtaatgggataggagatgccaatgacaggctcgcccatgagtagagcatggactgcggtgcatgtgacttcggtcaccaggggcatagcattgctcacccctgaatcaagtcatcgagatttctctgacctctgaagtgcactgtggttgcgtggctgggaatccacgcttgaccatgtactgcttgatagagtcgcggctggccgactcatgggttaaagtcagttgacaagacac

SEQ ID NO: 1388 - DNA, 555 bp, Aichivirus C
  source 1..555: mol_type = genomic DNA
cctcggccctctcaccctcttttccggtggccactcgcccgggccaccgttactccactccactccttcgggactggtttggaggaacacaacagggcttcccacccctgtttacccttactccactcacccttccccataaccaaccctatccacaccccactgactgactcctttggattttgacctcagaatgcctatttaacctcccacttgcctctcccctctcggattgccggtggtgcctggcggaaaaagcacaagtgtgttgttggctaccaaactcctacccgacaaaggtgcgtgtccgcgtgctgagtaatgggataggagatgccaatgacaggctcgcccatgagtagagcatggactgtggtgcatgtgacctcggtcaccaggggcatagcattgctcacccctgaatcaagtcatcgagatttctctgacctctgaagtgcactgtggttgcgtggctgggaatccacgcttgaccatgtactgcttgatagagtcgcggctggccgactcatgggttaaagtcagttgacaagacac

SEQ ID NO: 1389 - DNA, 555 bp, unidentified
  source 1..555: mol_type = unassigned DNA; note = Porcine kobuvirus strain KobuV/Pig-wt/ESP/VC20B/2017, complete1 sequence
cctcggccctctcaccctcttttccggtggccactcgcccgggccaccgttactccactccactccttcgggactggtttggaggaacataacagggcttcccatccctgtttaccctcattccacttacccttttccttaaccaaccctatccacaccccactgactgattcctttggattttgacctcagaacgcctacttgacctcccacttgcttctcccttcccggattgccggtggtgcctggcggaaaaagcacaagtgtgttgttggctaccaaactcctacccgacaaaggtgcgtgtccgcgtgctgagtaatgggataggagatgccaataacaggctcgcccatgagtagagcatggactgcggtgcatgtgactccggtcaccgggggcatagcattgctcacccccgaatcaagtcatcgagatttctctgacctctgaagtgcactgtggttgtgtggctgggaatccacacttgaccatgtactgcttgatagagtcgcggctggccgactcatgggttaaagtcagttgacaagacac

SEQ ID NO: 1390 - DNA, 558 bp, Aichivirus C
  source 1..558: mol_type = genomic DNA
cctcggccccctcaccctcttttccggtggccactcgcccgggccaccgttactccactccactccctcgggactggtttggaggaacataacagggcttcccatccctgtttttacccttatttccatctaccctttcccttaaccaaccctatccacaccccactgactgactcctttggattttgacctcagaatgcctacttgacctcccacttgcctctcccttatcggattgccggtggtgcctggtggaaaaagcacaagtgtgttgttggctaccaaactcctacccgacaaaggtgcgtgtccgcgtgctgagtaatgggataggagatgccaatgacaggctcgcccatgagtagagcatggactgcggtgcatgtgacttcggtcaccaggggcatagcattgctcacccctgaatcaagtcatcgagatttctctgacctctgaagtgcactgtggttgcgtggctgggaatccacgcttgaccatgtactgcttgatagagtcgcggctggccgactcatgggttaaagtcagttgacaagacac

SEQ ID NO: 1391 - DNA, 555 bp, unidentified
  source 1..555: mol_type = unassigned DNA; note = Porcine kobuvirus isolate JXAT2015, complete genome.1 sequence
cctcggccccctcaccctcttttccggtggccactcgcccgggccaccgttacttcactccactccttcgggactggtttggaggaacataacagggcttcccatccctgtttacccttatttccacttaactttttcccaatctactctaaccacaccccactgactgactcctttggattttgacctcagaatgcctacctggcctcccactcgcctcatccttttcggattgccggtggtgcctggcggaaaaagcacaagtgtgttgcaggctaccaaactcctacccgacaaaggtgcgtgtccgcgtgctgagtaatgggataggagatgcctacaacaggctcgcccatgagtagagcatggactgcggtgcatgtgacttcggtcaccacgggcatagcattgctcacccgtgaatcaagtcatcgagatttctctgacctctgaagtgcactgtggttgcgtggctgggaatccacgcttgaccatgtactgcttgatagagtcgcggctggccgactcatgggttaaagtcagttgacaagacac

SEQ ID NO: 1392 - DNA, 555 bp, Aichivirus C
  source 1..555: mol_type = genomic DNA
cctcggccccctcaccctcttttccggtggccactcgcccgggccaccgttacttcactccactccttcgggactggtttggaggaacacaacagggcttcccaacccctgttacccttactctaattcccttttccctcaaccaaccctttccactccccactgactgactcccttggattttgacctcagaatgcctacttgacctcccacttgcctttcccttctcggattgccggtggtgcctggcggaaaaagcacaagtgtgttgcaggctaccaaactcctacccgacaaaggtgcgtgtccgcgtgctgagtaatgggataggagatgcctacaacaggctcgcccatgagtagagcatggactgcggtgcatgtgacttcggtcaccacgggcatagcattgctcacccgtgaatcaagtcatcgagatttctctgacctctgaagtgcactgtggttgcgtggctgggaatccacgcttgaccatgtactgcttgatagagtcgcggctggccgactcatgggttaaagtcagttgacaagacac

SEQ ID NO: 1393 - DNA, 555 bp, unidentified
  source 1..555: mol_type = unassigned DNA; note = Porcine kobuvirus SH-W-CHN/2010/China, complete genome.1 sequence
cctcggccccctcaccctcttttccggtggccactcgcccgggccaccgttacttcactccactccttcgggactggtttggaggaacataacagggcttcccatccctgtttaccctcattccactcaccccttccctaaaccaaccctatccacaccccactgactgactcctttggattttgacctcagaatgcctacctgacctcccacttgcctctcccttctcggattgccggtggtgcctggcggaaaaagcacaagtgtgttgcaggctaccaaactcctacccgacaaaggtgcgtgtccgcgtgctgagtaatgggataggagatgtctacaacaggctcgcccatgagtagagcatggactgcggtgcatgtgacttcggtcaccacgggcatagcattgctcacccgtgaatcaagtcatcgagatttctctgacctctgaagtgcactgtggttgcgtggctgggaatccacgcttgaccatgtactgcttgatagagtcgcggctggccgactcatgggttaaagtcagttgacaagacac

SEQ ID NO: 1394 - DNA, 555 bp, unidentified
  source 1..555: mol_type = unassigned DNA; note = Porcine kobuvirus isolate EdoMex/2018/205, complete genome.1 sequence
cttcggccctctcaccctcttttccggtggccactcgcccgggccaccgttactccactccactccttcgggactggtttggaggaacataacagggcttcccatccctgtttaccctcattccactcaccccttcccttgaccaaccccatccacaccccactgactgattcctttggattttgacctcagaatgcctacctgacctcccactcgcctctccctcttcggattgccggtggtgcctggcggaaaaagcacaagtgtgttgctggctaccaaactcctacccgacaaaggtgcgtgtccgcgtgctgagtaatgggataggagatgctaacaacaggctcgcccatgagtagagcatggactgcggtgcatgtgacttcggtcaccacgggcatagcattgctcacccgtgaatcaagtcatcgagatttctctgacctctgaagtgcactgtggttgcgtggctgggaatccacgcttgaccatgtactgcttgatagagtcgcggctggccgactcatgggttaaagtcagttgacaagacac

SEQ ID NO: 1395 - DNA, 555 bp, unidentified
  source 1..555: mol_type = unassigned DNA; note = Porcine kobuvirus strain KobuV/Pig-wt/ESP/VC8/2017, complete1 sequence
cctcggccccctcaccctcttttccggtggccacacgcccgggccaccgttactccactccactccctcgggactggtttggaggaacacaacagggcttcccatccctgtttaccctcactccacccatccttctccttaaccaaccctatccacaccccactgactgactccattggattttgacctcagaatgcctacctgacctcccacttgcctctcccttctcggattgccggtggtgcctggcggaaaaagcacaagtgtgttgttggctaccaaactcctacccgacaaaggtgcgtgtccgcgtgctgagtaatgggataggagatgccaatgacaggctcgcccatgagtagagcatggactgcggtgcatgtgactttggtcaccaggggcatagcattgctcacccctgaatcaagtcatcgagatttctctgacctctgaagtgcgctgtggttgcgtggctgggaatccacgcttgaccatgtactgcttgatagagtcgcggctggccgactcatgggttaaagtcagttgacaagacac

SEQ ID NO: 1396 - DNA, 555 bp, unidentified
  source 1..555: mol_type = unassigned DNA; note = Porcine kobuvirus strain KobuV/Pig-wt/ESP/P452/2017, complete1 sequence
cctcggccccctcaccctcttttccggtggccacacgcccgggccaccgttactccactccactccctcgggactggtttggaggaacacaacagggcttcccatccctgtttaccctcactccacttacccttctccttaaccaaccctatccacacctcactgactgattcctttggattttgacctcagaatgcctacttgacctcccacttgcctttcccttctcggattgccggtggtgcctggcggaaaaagcacaagtgtgttgttggctactaaactcctacccgacaaaggtgcgtgtccgcgcgctgagtaatgggataggagatgccaataacaggctcgcccatgagtagagcatggactgcggtgcatgtgacttcggtcaccaggggcatagcattgctcacccctgaatcaagtcatcgagacttctctgacctctgaagtgcactgtggttgcgtggctgggaatccacgcttgaccatgtactgcttgatagagtcgcggctggccgactcatgggttaaagtcagttgacaagacac

SEQ ID NO: 1397 - DNA, 556 bp, Aichivirus C
  source 1..556: mol_type = genomic DNA
ccctcggccccctcaccctcttttccggtgcccacccgcccgggccaccgttactccactccactccttcgggactggtttggaggaacataacagggcttcccacccctgtttacccttattccactcacccttctccttaatcaaccctatccacaccccattgactgactcctttggattttgacctcagaatgcctacctgacctcccacttgcctctcccttctcggactgccggtggtgcctggcggaaaaagcacaagtgtgttgatggctaccaaactcttacccgacaaaggtgcgtgtccgcgtgctgagtaatgggataagagatgccattgacaggctcgcccatgagtagagcatggactgcggtgcatgtgacttcggtcaccaggggcatagcattgctcacccctgaatcaagtcatcgagatttctctgacctctgaagtgcactgtggttgcgtggctgggaatccacgcttgaccatgtactgcttgatagagtcgcggctggccgactcatgggttaaagtcagttgacaagacac

SEQ ID NO: 1398 - DNA, 555 bp, Aichivirus C
  source 1..555: mol_type = genomic DNA
cctcggccctctcaccctcttttccggtggccacccgcccgggccaccgttactccactccactccttcgggactggtttggaggaacataacagggcttcccacccctgtttacccttattccactcacccttccccttaatcaaccctatccacaccccactgactgactcctttggtttttgacctcagaatgcctacctgacctcccacttacctctcccttttcggattgccggtggtgcctggtggaaaaagcacaagtgtgttgttggctactaaactcctacccgacaaaggtgcgtgtccgcgtgctgagtaatgggataggagatgccaataacaggctcgcccatgagtagagcatggactgcggtgcgtgtgacttcggtcaccaggggcatagcattgctcacccctgaatcaagtcatcgagatttctctgacctctgaagtgcactgtggttgcgtggctgggaatccacgcttgaccatgtactgcttgatagagtcgcggctggccgactcatgggttaaagtcagttgacaagacac

SEQ ID NO: 1399 - DNA, 555 bp, Aichivirus C
  source 1..555: mol_type = genomic DNA
cctcggccctctcaccctcttttccggtggccacccgcccgggccaccgttactccactccactccttcgggactggtttggaggaacacaacagggcttcccacccctgtttacctttactccacttacctttctcctaaaccaatcctatccacaccccactgactgattcctttggattttgacctcagaatgcctacatgacctcccactcgtctctcccttcccggattgccggtggtgcctggcggaaaaagcacaagtgtgttgatggctaccaaactcctacccgacaaaggtgcgtgtccgcgtgctgagtaatgggataggagatgccattgacaggctcgcccatgagtagagcatggactgcggtgcatgtgacttcagtcaccaggggcatagcattgctcacccctgaatcaagtcatcgagatttctctgacctctgaagtgcactgtggttgcgtggctgggaatccacgcttgaccatgtactgcttgatagagtcgcggctggccgactcatgggttaaagtcagttgataagacac

SEQ ID NO: 1400 - DNA, 555 bp, Aichivirus C
  source 1..555: mol_type = genomic DNA
cctcggccctctcaccctcttttccggtggccattcgcccgggccaccgttactccactccactccctcgggactggtttggaggaacacaacagggcttcccacccctgtttacccttactccacttaccaccccccttaaccaatcctatccacaccccactgactgattcctttggattttgatctcagaatgcctacttgacctcccacttgcctctcccttctcggattgccggtggtgcctggcggaaaaagcacaagtgtgttgttggctaccaaactcctacccgacaaaggtgcgtgtccgcgtgctgagtaatgggataggagatgccaatgacaggctcgcccatgagtagagcatggactgcggtgcatgtgacttcggtcaccaggggcatagcattgctcacccctgaatcaagtcatcgagatttctctgacctctgaagtgcactgtggttgcgtggctgggaatccacgcttgaccatgtactgcttgatagagtcgcggctggccgactcatgggttaaagtcagttgacaagacac

SEQ ID NO: 1401 - DNA, 555 bp, Aichivirus C
  source 1..555: mol_type = genomic DNA
cctcggccccctcaccctcttttccggtggccacacgcccgggccaccgttactccactccactccctcgggactggtttggaggaacacaacagggcttcccatccctgtttaccctaacttcactcacccttatccttaaccaaccctatccacaccccactgactgattcctttggattttgacctcagaatgcctacctgacctcccacttgcctctcccttttcggattgccggtggtgcctggcggaaaaagcacaagtgtgttgatggctaccaaactcctacccgacaaaggtgcgtgtccgcgtgctgagtaatgggataggagatgccattgacaggctcgcccatgagtagagcatggactgcggtgcatgtgacttcggtcaccaggggcatagcattgctcacccctgaatcaagtcatcgagatttctctgacctctgaagtgcactgtggttgcgtggctgggaatccacgcttgaccatgtactgcttgatagagtcgcggctggccgactcatgggttaaagtcagttgataagacac

SEQ ID NO: 1402 - DNA, 558 bp, Aichivirus C
  source 1..558: mol_type = genomic DNA
ggcttcggccctctcaccctcttttccggtggccactcgcccgggccaccgttactccactccactccttcgggactggtttggaggaacataacagggcttcccacccctgtttacccttaactccaccaaccctttccttgaattaaccctatccacaccccactgactgactcccttggattttgacctcagaatgcctacctgacctcccacttgcctctccctcctcggattgccggtggtgcctggcggaaaaagcacaagtgtgttgttggctaccaaactcctacccgacaaaggtgcgtgtccgcgtgctgagtaatgggataggagatgccaatgacaggctcgcccatgagtagagcatggactgcggtgcatgtgacttcggtcaccaggggcatagcattgctcacccctgaatcaagtcatcgagatttctctgacctctgaagtgcactgtggttgcgtggctgggaatccacgcttgaccatgtactgcttgatagagtcgcggctggccgactcatgggttaaagtcagttgacaagacac

SEQ ID NO: 1403 - DNA, 556 bp, Aichivirus C
  source 1..556: mol_type = genomic DNA
cttcggccctctcaccctcttttccggtggccactcgcccgggccaccgttactccactccactccttcgggactggtttggaggaacataacagggcttcccatccctgtttacccttattccactcacccttcccctacaaccaaccctatccacaccccactgactgattcctttggattttgacctcagaatgcctacctgacctcccacttgcctctcccttctcggattgccggtggtgcctggcggaaaaagcacaagtgtgttgttggctaccaaactcctacccgacaaaggtgcgtgtccgcgtgctgagtaatgggataggagatgccaatgacaggctcgcccatgagtagagcatggactgcggtgcatgtgacctcggtcaccaggggcatagcattgctcacccctgaatcaagtcatcgagatttctctgacctctgaagtgcactgtggttgcgtggctgggaatccacgcttgaccatgtactgcttgatagagtcgcggctggccgactcatgggttaaagtcagttgacaagacac

SEQ ID NO: 1404 - DNA, 556 bp, unidentified
  source 1..556: mol_type = unassigned DNA; note = Porcine kobuvirus isolate swKoV CH441, complete genome.1 sequence
cctcggccccctcaccctcttttccggtggccacccgcccgggccaccgttacttcactccactccttcgggactggtttggaggaacataacagggcttcccaatcccctgttatccttattccaattaccctttcccttaaccaaccctatccacaccccactgactgactcctttggattttgacctcagaatgcctacctgacctcccacttgcctctcccctctcggattgccggtggtgcctggcggaaaaagcacaagtgtgttgcaggctaccaaactcctacccgacaaaggtgcgtgtccgcgtgctgagtaatgggataggagatgcctacaacaggctcgcccatgagtagagcatggactgcggtgcatgtgacttcggtcaccacgggcatagcattgctcacccgtgaatcaagtcatcgagatttctctgacctctgaagtgcactgtggttgcgtggctgggaatccacgcttgaccatgtactgcttgatagagtcgcggctggccgactcatgggttaaagtcagttgacaagacac

SEQ ID NO: 1405 - DNA, 555 bp, Aichivirus C
  source 1..555: mol_type = genomic DNA
cctcggccccctcaccctcttttccggcggccactcgcccgggccaccgttacttcactccactccttcgggactggtttggaggaacataacagggcttcccatccctgtttacccttcactccaattacccttcccccaatcaaccctatccacaccccattgactgattcctttggattttgacctcagaatgcctacttgacctcccacttgccttccccttctcggactgccggtggtgcctggcggaaaaagcacaagtgtgttgcaggctaccaaactcctacccgacaaaggtgcgtgtccgcgtgctgagtaatgggataggagatgcctacaacaggctcgcccatgagtagagcatggactgcggtgcatgtgacttcggtcaccacgggcatagcattgctcacccgtgaatcaagtcatcgagatttctctgacctctgaagtgcactgtggttgcgtggctgggaatccacgcttgaccatgtactgcttgatagagtcgcggctggccgactcatgggttaaagtcagttgacaagacac

SEQ ID NO: 1406 - DNA, 661 bp, unidentified
  source 1..661: mol_type = unassigned DNA; note = unclassified Kobuvirus sequence
cctcggccccctcaccctcttttccggtggccacgcccgggccaccgatacttcccttcactccttcgggactgttggggaggaacacaacagggctcccctgttttcccattccttcccccttttcccaaccccaaccgccgtatctggtggcggcaagacacacgggtctttccctctaaagcacaattgtgtgtgtgtcccaggtcctcctgcgtacggtgcgggagtgctcccacccaactgttgtaagcctgtccaacgcgtcgtcctggcaagactatgacgtcgcatgttccgctgcggatgccgaccgggtaaccggttccccagtgtgtgtagtgcgatcttccaggtcctcctggttggcgttgtccagaaactgcttcaggtaagtggggtgtgcccaatccctacaaaggttgattctttcaccaccttaggaatgctccggaggtaccccagcaacagctgggatctgaccggaggctaattgtctacgggtggtgtttcctttttcttttcacacaactctactgctgacaactcactgactatccacttgctctcttgtgcctttctgctctggttcaagttccttgattgtttttgactgcttttcactgcttttcttctcacaatccttgctcagttcaaagtc

SEQ ID NO: 1407 - DNA, 556 bp, Aichivirus C
  source 1..556: mol_type = genomic DNA
cttcggccctctcaccctcttttccggtggccattcgcccgggccaccgttactccactccactccctcgggactggtttggaggaacacaacagggcttcccatccctgtttacccttaactccactcaccctttcctacaccaaccctatccacaccctactgattgattcctttggattttgacctcagaatgcctacccgacctcccactcgttttcctccttctcggattgccggtggtgcctggcggaaaaagcacaagtgtgttgttggctaccaaactcctacccgacaaaggtgcgtgtccgcgtgctgagtaatgggataggagatgccaataacaggctcgcccatgagtagagcatggactgcggtgcatgtgacttcggtcaccaggggcatagcattgctcacccctgaatcaagtcatcgagatttctctgacctctgaagtgcactgtggttgcgtggctgggaatccacgcttgaccatgtactgcttgatagagtcgcggctggccgactcatgggttaaagtcagttgacaagacac

SEQ ID NO: 1408 - DNA, 554 bp, unidentified
  source 1..554: mol_type = unassigned DNA; note = Porcine kobuvirus gene for polyprotein, complete cds, strain:1 sequence
cttcggccctctcaccctcttttccggtggccacccgcccgggccaccgttactccactccactccttcgggactggtttggaggaacacaacagggcttcccacccctgtttaccccgatttcatctacccttctcccgaactgaccctatccacaccccactgactaactcctttggattagacctcggaatgcctacttgacctcccacttgcctctccctttctggattgccggtggtgcctggcggaaaaagcacaagtgtgttgcaggctaccaaactcctacccgacaaaggtgcgtgtccgcgtgctgagtaatgggataggagatgcctacaacaggctcgcccatgagtagagcatggactgcggtgcatgcgacttcggtcgccacgggcatagcattgctcacccgtgaatcaagtcatcgagatttctctgacctctgaagtgcactgtggttgcgtggctgggaatccacgcttgaccatgtactgcttgatagagtcgcggctggccgactcatgggttaaagtcagttgacaagacac

SEQ ID NO: 1409 - DNA, 556 bp, Aichivirus C
  source 1..556: mol_type = genomic DNA
cttcggccctctcaccctcttttccggtggccacccgcccgggccaccgttactccactccactccttcgggactggtttggaggaacataacagggcttcccaatccctgttaccctttactccatttccccatcccccaaacttaccctatccacaccccactgactgattcctttggattttgacctcagaatgcctacttgacctcccactcgcctctccctctccggactgccggtggtgcctggcggaaaaagcacaagtgtgttgcaggctactaaactcctacccgacaaaggtgcgtgtccgcgtgctgagtaatgggataggagatgcctacaacaggctcgcccatgagtagagcatggactgcggtgcatgtgacttcggtcaccacgggcatagcattgctcacccgtgaatcaagtcatcgagaattctctgacctctgaagtgcactgtggttgcgtggctgggaatccacgcttgaccatgtactgcttgatagagtcgcggctggccgactcatgggttaaagtcagttgacaagacac

SEQ ID NO: 1410 - DNA, 557 bp, Aichivirus C
  source 1..557: mol_type = genomic DNA
cttcggccctctcaccctcttttccggtggccactcgcccgggccaccgttactccactccactccctcgggactggtttggaggaacataacagggcttcctacccctgttcttccctcaattccactcacccttcccctcaaccacccctatccacaccccactgactgattcctttggattttgacctcagaatgcctacttgacctcccacttgcctctcccttttcggactgccggtggtgcctggtggaaaaagcacaagtgtgttgttggctaccaaactcctacccgacaaaggtgcgtgtccgcgtgctgagtaatgggataggagatgcctacaacaggctcgcccatgagtagagcatggactgcggtgcatgtgacttcggtcaccacgggcatagcattgctcacccgtgaatcaagtcatcgagatttctctgacctctgaagtgcactgtggttgcgtggctgggaatccacgcttgaccatgtactgcttgatagagtcgcggctggccgactcatgggttaaagtcagttgataagacac

SEQ ID NO: 1411 - DNA, 556 bp, Aichivirus C
  source 1..556: mol_type = genomic DNA
cttcggccctctcaccctcttttccggtggccactcgcccgggccaccgttactccactccactccctcgggactggtttggaggaacataacagggcttcccatccctgtttacccttaattctgcttaccctctccttttaccaaccctgtccacaccccactgactgattcctttggattttgacctcagaatacctacctgacctcccacttgcctctcccttctcggattgccggtggtgcctggcggaaaaagcacaagtgtgttgttggctaccaaactcttacccgacaaaggtgcgtgtccgcgtgctgagtaatgggataggagatgccaatgacaggctcgcccatgagtagagcatggactgcggtgcatgtgacttcggtcaccaggggcatagcgttgctcacccctgaatcaagtcatcgagatttctctgacctctgaagtgcactgtggttgcgtggttgggaatccacgcttgaccatgtactgcttgatagagtcgcggctggccgactcatgggttaaagtcagttgacaagacac

SEQ ID NO: 1412 - DNA, 556 bp, Aichivirus C
  source 1..556: mol_type = genomic DNA
cttcggccctctcaccctcttttccggtggccactcgcccgggccaccgttactccactccactccctcgggactggtttggaggaacataacagggcttcccatccctgtttacccttaattccacttaccctctccttttaccaaccctatccatacctcactgactgattcctttggattttgacctcagaatgcctacctgacctcccacttgcctctcccttctcggattgccggtggtgcctggcggaaaaagcacaagtgtgttgttggctaccaaactcctacccgacaaaggtgcgtgtccgcgtgctgagtaatgggataggagatgcctacaacaggctcgcccatgagtagagcatggactgcggtgcatgtgacttcggtcaccacgggcatagcattgctcacccgtgaatcaagtcatcgagatttctctgacctctgaagtgcactgtggttgcgtggctgggaatccacgcttgaccatgtactgcttgatagagtcgcggctggccgactcatgggttaaagtcagttgacaagacac

SEQ ID NO: 1413 - DNA, 556 bp, Aichivirus C
  source 1..556: mol_type = genomic DNA
cttcggccctctcaccctcttttccggtggctactcgcccgggccaccgttactccactccactccctcgggactggtttggaggaacataacagggcttcccatccctgtttacccttaattctgcttaccctctccttttaccaaccctgtccacaccccactgactgattcctttggattttgacctcagaatacctacctgacctcccacttgcctctcccttctcggattgccggtggtgcctggcggaaaaagcacaagtgtgttgttggctaccaaactcttacccgacaaaggtgcgtgtccgcgtgctgagtaatgggataggagatgccaatgacaggctcgcccatgagtagagcatggactgcggtgcatgtgacttcggtcaccaggggcatagcgttgctcacccctgaatcaagtcatcgagatttctctgacctctgaagtgcactgtggttgcgtggttgggaatccacgcttgaccatgtactgcttgatagagtcgcggctggccgactcatgggttaaagtcagttgacaagacac

SEQ ID NO: 1414 - DNA, 556 bp, Aichivirus C
  source 1..556: mol_type = genomic DNA
cttcggccctctcaccctcttttccggtggccactcgcccgggccaccgttactccactccactccctcgggactggtttggaggaacataacagggcttcccatccctgtttacccttggttccactcaccctttcccctcaccaaccttatccacaccccactgactgactcctttggattttgacctcagaatgcctacttgacctcccactcgcctctcccttctcggactgccggtggtgcctggcggaaaaagcacaagtgtgttgttggctaccaaactcctacccgacaaaggtgcgtgtccgcgtgccgagtaatgggataggagatgccaataacaggctcgcccatgagtagagcatggactgcggtgcatgtgacttcggtcaccagggacatagcattgctcacccctgaatcaagtcatcgagaattctctgacctctgaagtgcactgtggttgcgtggctgggaatccacgcttgaccatgtactgcttgatagagtcgcggctggccgactcatgggttaaagtcagttgacaagacac

SEQ ID NO: 1415 - DNA, 558 bp, Aichivirus C
  source 1..558: mol_type = genomic DNA
cttcggccctctcaccctcttttccggtggccactcgcccgggccaccgttactccactccactccctcgggactggtttggaggaacacaacagggcttcccacccctgttctttccttaattccactcaccctttccctttaccaaccctatccacaccccactgactgattcctttggattttgacctcagaatacccatttgacctcccacttgcctctccctttttcggattgccggtggtgcctggcggaaaaagcacaagtgtgttgttggctaccaaactcctacccgacaaaggtgcgtgtccgcgtgccgagtaatgggataggagatgcctacaacaggctcgcccatgagtagagcatggactgcggtgcatgtgacttcggtcaccacgggcatagcattgctcacccgtgaatcaagtcatcgagatttctctgacctctgaagtgcactgtggttgcgtggctgggaatccacgcttgaccatgtactgcttgatagagtcgcggctggccgactcatgggttaaagtcagttgataagacac

SEQ ID NO: 1416 - DNA, 555 bp, Aichivirus C
  source 1..555: mol_type = genomic DNA
cctcggccccctcaccctcttttccggtggccacccgcccgggccaccgttacttcactccactccctcgggactggtttggaggaacataacagggcttcccatccctgtttacccttatttccaattaccctttcctaaaccaaccctatccacaccccactgactgactcctttggattttgacttcagaatgcctacctgacctcccacttgcctctcccttctcggactgccggtggtgcctggcggaaaaagcacaagtgtgttgttggctaccaaactcctacccgacaaaggtgcgtgtccgcgtgctgagtaatgggataggagataccaataacaggctcgcccatgagtagagcatggactgcggcgcatgtgacctcggtcaccaggggcatagcattgctcacccctgaatcaagtcatcgagacttctctgacctctgaagtgcgctgtggttgcgtggctgggaatccacgcttgaccatgtactgcttgatagagtcgcggctggccgactcatgggttaaagtcagttgacaagacac

SEQ ID NO: 1417 - DNA, 557 bp, Aichivirus C
  source 1..557: mol_type = genomic DNA
cttacggccctctcaccctcttttccggtggccattcgcccgggccaccgttactccactccactccctcgggactggtttggaggaacacaacagggcttcccatccctgtttatcctaattctacttaccttttcccttttaccgaccctatccacaccccactgactgattcctttggattttgacctcggaatgcctactagatctcccacttgcctctcccttcccggattgccggtggtgcctggcggaaaaagcacaagtgtgttgcaggctaccaaactcctacccgacaaaggtgcgtgtccgcgtgctgagtaatgggataggagatgcctacaacaggctcgcccatgagtagagcatggactgcggtgcatgtgacttcggtcaccacgggcatagcattgctcacccgtgaatcaagtcatcgagatttctctgacctctgaagtgcactgtggttgcgtggctgggaatccacgcttgaccatgtactgcttgatagagtcgcggctggccgactcatgggttaaagtcagttgacaagacac

SEQ ID NO: 1418 - DNA, 555 bp, Aichivirus C
  source 1..555: mol_type = genomic DNA
cctcggccccctcaccctcttttccggcggccactcgcccgggccaccgttacttcactccactccctcgggactggtttggaggaacataacagggcttcccatccctgtttacccttactctgacaacccttccccttaatcaaccctatccacaccccactgactgactcctttggattttgacctcagaatgcctacttgacctcccacttgcctctccctcctcggattgccggtggtgcctggcggaaaaagcacaagtgtgttgcaggctaccaaactcctacccgacaaaggtgcgtgtccgcgtgctgagtaatgggataggagatgcctacaacaggctcgcccatgggtagagcatggactgcggtgcatgtgacttcggtcaccacgggcatagcattgctcacccgtgaatcaagtcatcgagatttctctgacctctgaagtgcactgtggttgcgtggctgggaatccacgcttgaccatgtactgcttgatagagtcgcggctggccgactcatgggttaaagtcagttgacaagacac

SEQ ID NO: 1419 - DNA, 420 bp, unidentified; identical to SEQ ID NO: 460
  source 1..420: mol_type = unassigned DNA; note = Bovine kobuvirus polyprotein gene, complete cds.1 sequence

SEQ ID NO: 1420 - DNA, 555 bp, Aichivirus C
  source 1..555: mol_type = genomic DNA
cttcggccctctcaccctcttttccggtggccacccgcccgggccaccgttactccactccactccctcgggactggtttggaggaacacaacagggcttctcatccctgtttacccttattccacttacccttctccccgaactacccaacccactccccactgattgactcccttggattaagacctcggaatgtcttcctgaccttcttcttggttttcccttttcggattgccggtggtgcctggtggaaaaagcacaagtgtgttgttggctaccaaactcctacccgacaaaggtgcgtgtccgcgtgctgagtaatgggataggagatgccaataacaggctcgcccatgagtagagcatggactgcggtgcatgtgacttcggtcaccaggggcatagcattgctcacccctgaatcaagtcatcgagatttctctgacctctgaagtgcactgtggttgcgtggctgggaatccacgcttgaccatgtactgcttgatagagtcgcggctggccgactcatgggttaaagtcagttgacaagacac

SEQ ID NO: 1421 - DNA, 557 bp, Aichivirus C
  source 1..557: mol_type = genomic DNA
cttcggccctctcaccctcttttccggtggccacacgcccgggccaccgttactccactccactccctcgggactggtttggaggaacacaacagggcttcccatccctgttcctccctcaactccacttaccctttccccttaccaaccttatccacaccctattgactgattcctttggattttgacctcagaatgcctatctgacctcccacctgcctcccccttctcggattgccggtggtgcctggcggaaaaagcacaagtgtgttgttggctaccaaactcctacccgacaaaggtgcgtgtccgcgtgctgagtaatgggataggagatgccaataacaggctcgcccatgagtagagcatggactgcggtgcatgtgacttcagtcaccaggggcatagcattgctcacccctgaatcaagtcatcgagatttctctgacctctgaagtgcactgtggttgcgtggctgggaatccacgcttgaccatgtactgcttgatagagtcgcggctggccgactcatgggttaaagtcagttgacaagacac

SEQ ID NO: 1422 - DNA, 557 bp, Aichivirus C
  source 1..557: mol_type = genomic DNA
cttcggccctctcaccctcttttccggtggccacacgcccgggccaccgttactccactccactccctcgggactggtttggaggaacacaacagggcttcccatccctgttcctccctcaactccacttaccctttccccttaccaacctcatccacacctcattgactgattcctttggattttgacttcagaatgcctatctgacctcccacttgcctcccccttctcggattgccggtggtgcctggcggaaaaagcacaagtgtgttgttggctaccaaactcctacccgacaaaggtgcgtgtccgcgtgctgagtaatgggataggagatgccaataacaggctcgcccatgagtagagcatggactgcggtgcatgtgacttcagtcaccaggggcatagcattgctcacccctgaatcaagtcatcgagatttctctgacctctgaagtgcactgtggttgcgtggctgggaatccacgcttgaccatgtactgcttgatagagtcgcggctggccgactcatgggttaaagtcagttgacaagacac

SEQ ID NO: 1423 - DNA, 556 bp, Aichivirus C
  source 1..556: mol_type = genomic DNA
ttcggccctctcaccctcttttccggtggccacacgcccgggccaccgttactccactccactccctcgggactggtttggaggaacacaacagggcttcccatccctgttcctccctcaactccacttaccctttccccttaccaacctcatccacacctcattgactgattcctttggattttgacttcagaatgcctatctgacctcccacttgcctcccccttctcggattgccggtggtgcctggcggaaaaagcacaagtgtgttgttggctaccaaactcctacccgacaaaggtgcgtgtccgcgtgctgagtaatgggataggagatgccaataacaggctcgcccatgagtagagcatggactgcggtgcatgtgacttcagtcaccaggggcatagcattgctcacccctgaatcaagtcatcgagatttctctgacctctgaagtgcactgtggttgcgtggctgggaatccacgcttgaccatgtactgcttgatagagtcgcggctggccgactcatgggttaaagtcagttgacaagacac

SEQ ID NO: 1424 - DNA, 557 bp, Aichivirus C
  source 1..557: mol_type = genomic DNA
cttcggccctctcaccctcttttccggtggccacccgcccgggccaccgttacttcactccactccttcgggactggtttggaggaacataacagggcttcccaatcccctgttatcctttatcccaaacaccttttcccttaaccaaccctatccacaccccactgactgattcctttggattttgacctcagaatgcctacctgacctcccactcgcctctcccttctcggattgccggtggtgcctggcggaaaaagcacaagtgtgttgcaggctaccaaactcctacccgacaaaggtgcgtgtccgcgtgctgagtaatgggataggagatgcctacaacaggctcgcccatgagtagagcatggactgcggtgcatgtgacttcggtcaccacgggcatagcattgctcacccgtgaatcaagtcatcgagatttctctgacctctgaagtgcactgtggttgcgtggctgggaatccacgcttgaccatgtactgcttgatagagtcgcggctggccgactcatgggttaaagtcagttgacaagacac

SEQ ID NO: 1425 - DNA, 557 bp, Aichivirus C
  source 1..557: mol_type = genomic DNA
cttcggccctctcaccctcttttccggtggccactcgcccgggccaccgttactccactccactccctcgggactggtctggaggaacacaacagggcttcccatccctgtttaccctcattccaatttacccttcccttacaaccaaccctatccacaccccactgaatgattcctttggattttgacctcagaatgcctacctgaccccccacttgcttctccctcctcggattgccggtggtgcctggcggaaaaagcacaagtgtgttgttggctaccaaactcctacccgacaaaggtgcgtgtccgcgtgctgagtaatgggataggagatgccaataacaggctcgcccatgagtagagcatggactgcggtgcatgtgacttcggtcaccagggacatagcattgctcacccctgaatcaagttattgagatttctctgacctctgaagtgcactgtggttgcgtggccgggaatccacgcttgaccatgtactgcttgatagagtcgcggctggccgactcatgggttaaagtcagttgacaagacac

SEQ ID NO: 1426 - DNA, 559 bp, Aichivirus C
  source 1..559: mol_type = genomic DNA
cggcctcggcccactcaccctctttaccggtggccacccgcccgggccaccgttacttcactccactccttcgggactggtttggaggaacataacagggcttcccatccctgttcaccccttattccaattaccctcacccttgattaaccctacccacaccccactgactgattcctttggattttgacctcagaatgcctacttgacctcctacttgcttctcccttctcggattgccggtggtgcctggcggaaaaagcacaagtgtgttgcaggctaccaaactcctacccgacaaaggtgcgtgtccgcgtgctgagtaatgggataggagatgcctacaacaggctcgcccatgagtagagcatggactgcggtgcatgtgacttcggtcaccacgggcatagcattgctcacccgtgaatcaagtcatcgagatttctctgacctctgaagtgcactgtggttgcgtggctgggaatccacgcttgaccatgtactgcttgatagagtcgcggctggccgactcatgggttaaagtcagttgacaagacac

SEQ ID NO: 1427 - DNA, 556 bp, unidentified
  source 1..556: mol_type = unassigned DNA; note = Porcine kobuvirus isolate CH/DX/2012, complete genome.1 sequence
cttcggccctctcaccctcttttccggtggccactcgcccgggccaccgttacttcactccactccctcgggactggtttggaggaacataacagggcttcccacccctgtttacccttaattccacttacccttccccttaaccaaccctatccacaccccactgactgattcctttggattttgacctcagaatgcctacttgacctcccacttgcctctcccttctcggattgccggtggtgcctggcggaaaaagcacaagtgtgttgcaggctaccaaactcctacccgacaaaggtgcgtgtccgcgtgctgagtaatgggataggagatgcctacaacaggctcgcccatgagtagagcatggactgcggtgcatgtgacttcggtcaccacgggcatagcattgctcacccgtgaatcaagtcatcgagatttctctgacctctgaagtgcactgtggttgcgtggctgggaatccacgcttgaccatgtactgcttgatagagtcgcggctggccgactcatgggttaaagtcagttgacaagacac

SEQ ID NO: 1428 - DNA, 556 bp, unidentified
  source 1..556: mol_type = unassigned DNA; note = Porcine kobuvirus isolate CH/HZ/2011 polyprotein gene, complete1 sequence
cttcggccctctcaccctcttttccggtggccactcgcccgggccaccgttacttcactccactccctcgggactggtttggaggaacataacagggcttcccacccctgtttacccttaattccacttacccttccccttaaccaaccctatccacaccccactgactgattcctttggattttgacctcagaacgcctacttgacctcccacttgcctctcccttctcggattgccggtggtgcctggcggaaaaagcacaagtgtgttgcaggctaccaaactcctacccgacaaaggtgcgtgtccgcgtgctgagtaatgggataggagatgcctacaacaggctcgcccatgagtagagcatggactgcggtgcatgtgacttcggtcaccacgggcatagcattgctcacccgtgaatcaagtcatcgagatttctctgacctctgaagtgcactgtggttgcgtggctgggaatccacgcttgaccatgtactgcttgatagagtcgcggctggccgactcatgggttaaagtcagttgacaagacac

SEQ ID NO: 1429 - DNA, 556 bp, Aichivirus C
  source 1..556: mol_type = genomic DNA
cctcggccctctcaccctcttttccggtggccactcgcccgggccaccgttacttcactccactcccttgggactggtttggaggaacacaacagggcttcccacccctgtttaccctacactccactcaccctctcccttaaccaaccctatccacatcccactgactgattcctttggattttgacttcagaatgcctacttgacctcccacttgcttctcccttcccggattgccggtggtgcctggcggaaaaagcacaagtgtgttgttggctaccaaacccctacccgacaaaagcgcgtgtccgcgtgctgagtaatgggataggggatgccaatgacaggctcgcccatgagtagagcatggactgcggtgcatgtgactttggtcaccaggggcatagcattgctcacccctgaatcaagtcatcgagatttctctgacctctgaagtgcactgtggttgcgtggctgggaatccacgcttgaccatgtactgcttgatagagtcgcggctggccgactcatgggttaaagtcagttgacaagacac

SEQ ID NO: 1430 - DNA, 557 bp, Aichivirus C
  source 1..557: mol_type = genomic DNA
cttacggggctctcaccctcttttccggtggccactcgcccgggccaccgttactccactccactccttcgggactggtttggaggaacacaacagggcttcccacccctgtttacccttaactccactcacccctcccttgaaccaaccctatccacaccccactgactgactcctttggattttgacttcggaatgcctacctaacctcccacttgcctttccctttacggattgccggtggtgcctggcggaaaaagcacaagtgtgttgttggctaccaaactcctacccgacaaaggtgcgtgtccgcgtgctgagtaatgggataggagatgccaatgacaggctcgcccatgagtagagcatggactgcggtgcatgtgacttcggtcaccaggggcatagcattgctcacccctgaatcaagtcatcgagatttctctgacctctgaagtgcactgtggttgcgtggctgggaatccacgcttgaccatgtactgcttgatagagtcgcggctggccgactcatgggttaaagtcagttgacaagacac

SEQ ID NO: 1431 - DNA, 776 bp, Aichivirus B
  source 1..776: mol_type = genomic DNA
cttcggccccctcaccctcttttccggcggcgcaagttcgcgtcgtcgtaagcctggacacccatgttcgcatcggtctccgggcaaatacaagaaccccagaccttctggtacttcttcgcctgggtcacaaaagcgaagaacctgcctctctaacgccagacgagcggcattaaacttgaacttctggcactctccactctcccttttccctgtccctttccccactgcgctctcaaggtcgcgcaatcctgggactagcccagttttaaaagttcctggcaccctttgcccctctaggcccttaaggtaggaactgaccttgtgctgtgatctcggtgcgggagtgctaccacgtagtcatcgtaagcctcgtttctggttctgccctggcaaggctacagagtaccgtgttccgctgtggatgccatccgggtaaccggacccccagtgtgtgtagcggtatgttcacggtccgccgtgttcaccagattcctgacctggctttgctagaaatggtgtgtgcccaatccctgtgaccagtatcaattacatcacctaggaatgctaggaaggtaccccagtcctgagctgggatctgatcctaggctaattgtctacggtgatgctccttttattttcttacaactgctattgactgtctgattgctgattctgctcttgtgctcttctgctctggctcattctcaagggttctctttgtccaagatcctttggttctctccttgttccacttgccactgccaacgcttgtc

SEQ ID NO: 1432 - DNA, 665 bp, unidentified
  source 1..665: mol_type = unassigned DNA; note = unclassified Kobuvirus sequence
gcccgtccccctcaccctcttttccggtggccacgcccgggccaccgatacttcccttcactccctcgggactgttggggaggaacacaacagggctcccctgtatttcctcttcccattccccctttcctaaccccaaccgccgtatctggtggcggtaagacacacgggtctttccctctaaagcacaattgtgtgtgtgtcccaggtcctcctgcgttcggtgcgggagtgctcccacccaactgttgtaagcctgtccaacgtgtcgtcctggcaagactatgacgtcgcatgttccgctgtggatgccgaccgggtaaccggttccccagtgtgtgtagtgcgatcttccaggttctcctggttggcgttgtccagaaactgcttcgggtaagtggggtgtgcccaatccctacaagggttgattctttcaccaccttaggaatgctccggaggtaccccagcaacagctgggatctgaccggaggctaattgtctacgggtggtgtttccattttctttttcacacaacttcattgctgacaactcactgactaatcacttgctctcttgtgcctttctgctctggttcaagttccttgattgtttgtttgattgcttttcactgctttcttcccacaatccttgctcagttcaaagtc

SEQ ID NO: 1433 - DNA, 556 bp, unidentified
  source 1..556: mol_type = unassigned DNA; note = Porcine kobuvirus gene for polyprotein, complete cds, strain:1 sequence
cttcggccctctcaccctcttttccggtggccgcccgcccgggccaccgttacttcactccactccctcgggactggtttggaggaacacaacagggcttcccatccctgttttcccttaataccacttaccttttccctaattaaccctacccaccacccaccgactgactccctttggattttgacctcagaatgcccacttgacctcccacttgcctcttcctttttggattgccggtggtgcctggcggaaaaagcacaagtgtgttgcaggctaccaaactcctacccgacaaaggtgcgtgtccgcgtgctgagtaatgggataggagatgcctacaacaggctcgcccatgagtagagcatggactgcggtgcatgtgacctcggtcaccacgggcatagcattgctcacccgtgaatcaagtcatcgagatctctctgacctctgaagtgcactgtggttgcgtggctgggaatccacgcttgaccatgtactgcttgatagagtcgcggctggccgactcatgggttaaagtcagttgacaagacac

SEQ ID NO: 1434 - DNA, 549 bp, Aichivirus C
  source 1..549: mol_type = genomic DNA
cctctcaccctcttttccggtggccacccgcccgggccaccgttactccactccactccttcgggactggtttggaggaacataacagggcttcccacccctgtttacccttattccactcaccctttccccacaaccaaccctatccacaccccactgactgattcctttggattttgacctcagaatgcctacctgacctcccacttgcctctcccttctcggattgccggtggtgcctggcggaaaaagcacaagtgtgttgttggctaccaaactcctacccgacaaaggtgcgtgtccgcgtgctgagtaatgggataggagatgccaatgacaggctcgcccatgagtagagcatggactgcggtgcatgtgacctcggtcaccaggggcatagcattgctcacccctgaatcaagtcatcgagatttctctgacctctgaagtgcactgtggttgcgtggctgggaatccacgcttgaccatgtactgcttgatagagtcgcggctggccgactcatgggttaaagtcagttgacaagacac

SEQ ID NO: 1435 - DNA, 546 bp, Aichivirus C
  source 1..546: mol_type = genomic DNA
ctcaccctcttttccggtggccactcgcccgggccaccgttactccactccactccctcgggactggtttggaggaacacaacagggcttcccatccctgtttacccttcactccactcaccccttcccttaatcaaccctgtccacaccccactgactgattcctttggattatgacctcagaatgcctacccgatctcccactcgcctctcctttcttggattgccggtggtgcctggcggaaaaagcacaagtgtgttgcaggctaccaaactcctacccgacaaaggtgcgtgtccgcgtgctgagtaatgggataggagatgcctacaacaggctcgcccatgagtagagcatggactgcggtgcatgtgacttcggtcaccacgggcatagcattgctcacccgtgaatcaagtcatcgagatttctctgacctctgaagtgcactgtggttgcgtggctgggaatccacgcttgaccatgtactgcttgatagagtcgcggctggccgactcatgggttaaagtcagttgacaagacac

SEQ ID NO: 1436 - DNA, 755 bp, Aichivirus B; identical to SEQ ID NO: 1218
  source 1..755: mol_type = genomic DNA

SEQ ID NO: 1437 - DNA, 729 bp, Aichivirus B; identical to SEQ ID NO: 922
  source 1..729: mol_type = genomic DNA

SEQ ID NO: 1438 - DNA, 787 bp, unidentified
  source 1..787: mol_type = unassigned DNA; note = unclassified Kobuvirus sequence
cttcggccccctcaccctcttttccggcggcgcatgttcgcgtcgtcgtaagtctggattcccaaggcccactcggttcaacttcggtttccggacaaatacaaagaacctcagtcctcttggtactttctcgcctgagtctacaaagcgagaaacctgcccctctaacgccagacgagcggcataaaactcgaacttctggcacgttccaccaccccttctcctatcccaacccccattgcgctctcaaggtcgcgcttttccgagactagctcggattcaaaaagttcctggcaccctttaccccttcaggcccttaaggtaggaactgaccttgtgctgtgatctcggtgcggaagtgctactgcgtagtgattgtaagatccttttgtggttctgccctggcaaggctacagagtgctgtgatccgctgcggatgccatcctggtaacaggacccccagtgtgcgcaacagtatgttcacggtcttccgtgttcaccacattcggaacactgctttcgtgaaacagtgtgtgtccaatccctgtgatcagtatcaaccacaccacctaggaatgctaggaaggtaccccggttcgccgggatctgatcctaggctaattgtctacggtggtgctcctttttattttccacttcaactcactggttacaactgcttgatttctgtgtttgctgcttttctctgctctcactgccattctcaagtgttcacactgtccaagctcctttggttgttcgcttccacttgccactgtcaactcttgtc

SEQ ID NO: 1439 - DNA, 770 bp, Aichivirus B; identical to SEQ ID NO: 1230
  source 1..770: mol_type = genomic DNA

SEQ ID NO: 1440 - DNA, 545 bp, unidentified
  source 1..545: mol_type = unassigned DNA; note = unclassified Kobuvirus sequence
cccccttttccctaaccccaaccgccgtatctggtggcggcaagacacacgggtctttccctctaaagcacaaatgtgtgtgtgtcccaggtcctcctgcgctcggtgcgggagtgctcccacccaactgttgtaagcctgtccaacgtgtcgtcctggcaagactatgacgtcgcatgttccgctgcggatgccgaccgggtaaccggttccccagtgtgtgtagtgcgatcttccaggttcccctggttggcgttgtccagaaactgcttcaggtaagtggggtgtgcccaatccctgcaaaggttgattctctcaccaccttaggaatgctccggaggtaccccagcaacagctgggatctgaccggaggctaattgtctacgggtggtgtttcctttttctttttccacaacttcattgctgacaactcactgactacccatttgctctcttgtgcctttctgctctggttcaagctccttgattgtttttgattgctttctattgctttcttccactcaacccttgctcagttcaaagtc

SEQ ID NO: 1441 - DNA, 782 bp, unidentified
  source 1..782: mol_type = unassigned DNA; note = unclassified Kobuvirus sequence
ataccctccccctccacactcttttcgacggcgcgcctcggcaaggccgccgataccgcactgtgctacttcggtaccactctgcgggaatgacaatatgcccggtgtatagtttgcctgtttctcgcaccgttaccgctcgttcgggaatgtgaaactggcacccctcctctcccctaccaccctttctccttcgcccccattcataatttacaacgccgcacacagcggcggccgccaagggctagcctggcggttataaaaggaacctgggtctttccctcttcaagccaaaaggtaggttccctgtgtccctgaatgctcggtgaggaatgctgcaccgtaacgctttgtgaagtgtttgcaagttctggcccggcaagcctacagagtgctgtgatccgctgcggacgccatcctggtaacaggacccccagtgtgcgcaacagtatgttcagacttcggtttgttcacttgctttcatggaccattgcgcgaaagtgcgtgcgccatatccctgtacttcaggtgtgcttctctggaccctaggaatgctgcgaaggtaccccgtttcggcgggatctgatcgcaggctaattgtctatgggttcagtttcctttttctttactccacaattgactgcttaactgactctggatcttgtgcttccactgctctttctgctctcaaaacggcttcacttaccaactctcacctttcgaccaacaccatttacacactaacttttttcgactcttctgactcctggcttggtgaagac

SEQ ID NO: 1442 - DNA, 537 bp, Aichivirus C
  source 1..537: mol_type = genomic DNA
ttttccggtggccacacgcccgggccaccgttactccactccactccttcgggactggtttggaggaacacaacagggcttcccacccctgtttaccctttctccactcatccactccctttaaccaaccctgtccacaccccactgactgactcctttggattttgacctcggaatgcctacttgaccttccactcgcctttcccttttcggattgccggtggtgcctggcggaaaaagcacaagtgtgttgcaggctaccaaactcctacccgacaaaggtgcgtgtccgcgtgctgagtaatgggataggagatgcctacaacaggctcgcccatgagtagagcatggactgcggtgcatgtgacttcggtcaccacgggcatagcattgctcacccgtgaatcaagtcatcgagatttctctgacctctgaagtgcactgtggttgcgtggctgggaatccacgcttgaccatgtactgcttgatagagtcgcggctggccgactcatgggttaaagtcagttgacaagacac

SEQ ID NO: 1443 - DNA, 528 bp, Aichivirus C
  source 1..528: mol_type = genomic DNA
gccacacgcccgggccaccgttactccactccactccctcgggactggtttggaggaacacaacagggcttcccatccctgttcctccctcaactccacttaccctttccccttaccaaccttatccacaccctattgactgattcctttggattttgacctcagaatgcctatctgacctcccacctgcctcccccttctcggattgccggtggtgcctggcggaaaaagcacaagtgtgttgttggctaccaaactcctacccgacaaaggtgcgtgtccgcgtgctgagtaatgggataggagatgccaataacaggctcgcccatgagtagagcatggactgcggtgcatgtgacttcagtcaccaggggcatagcattgctcacccctgaatcaagtcatcgagatttctctgacctctgaagtgcactgtggttgcgtggctgggaatccacgcttgaccatgtactgcttgatagagtcgcggctggccgactcatgggttaaagtcagttgacaagacac

SEQ ID NO: 1444 - DNA, 532 bp, unidentified
  source 1..532: mol_type = unassigned DNA; note = Porcine kobuvirus gene for polyprotein, complete cds, strain:1 sequence
ccggtggccacccgcccgggccaccgttactccactccactccctcgggactggtttggaggaacataacagggcctcccacccctgttcaccttaattccacttaccctttccctcaaccaaccctatccacaccccattgactgattcctttggattttgacctcagaatgcctacttgacctcccacttgcctttcccttctcggattgccggtggtgcctggcggaaaaagcacaagtgtgttgcaggctatcaaactcctacccgacaaaggtgcgtgtccgcgtgctgagtaatgggataggagatgcctacaacaggctcgcccatgagtagagcatggactgcggtgcatgtgacttcggtcaccacgggcatagcattgctcacccgtgaatcaagtcatcgagatttctctgacctctgaagtgcactgtggttgcgtggctgggaatccacgcttgaccatgtactgcttgatagagtcgcggctggccgactcatgggttaaagtcagttgacaagacac

SEQ ID NO: 1445 - DNA, 510 bp, Aichivirus C
  source 1..510: mol_type = genomic DNA
cgttactccactccactccctcgggactggtttggaggaacataacagggcttcccacccctgtttacccttaattccactcaccctttccctataaccaaccctatccacaccccactgactgattcctttggattttgacctcagaatgcccacctgacctcccacttgcctctcccttcccggattgccggtggtgcctggcggaaaaagcacaagtgtgttgttggctaccaaactcctacccgacaaaggtgcgtgtccgcgtgctgagtaatgggataggagatgccaataacaggctcgcccatgagtagagcatggactgcggtgcatgtgactttggtcaccaggggcatagcattgctcacccctgaatcaagtcatcgagatttctctgacctctgaagtgcactgtggttgcgtggctgggaatccacgcttgaccatgtactgcttgatagagtcgcggctggccgactcatgggttaaagtcagttgacaagacac

SEQ ID NO: 1446 - DNA, 513 bp, Aichivirus C
  source 1..513: mol_type = genomic DNA
ccaccgttacttcactccactccctcgggactggtttggaggagcataacagggcttcccatccctgttcaccctcaataccacccaccctttccctcaaccatccctatccacaccccactgactgattcccttggattttgacctcagaacgcctacttgacctcccacttgcctttcccttctcggattgccggtggtgcctggcggaaaaagcacaagtgtgttgcaggctaccaaactcctacccgacaaaggtacgtgtccgcgtgctgagtaatgggataggagatgcctacaacaggctcgcccatgagtagagcatggactgcggtgcatgtgacttcggtcaccacgggcatagcattgctcacccgtgaatcaagtcattgagattcctctgacctctgaagtgcactgtggttgcgtggctgggaatccacgcttgaccatgtactgcttgatagagtcgcggctggccgactcatgggttaaagtcagttgataagacac

SEQ ID NO: 1447 - DNA, 509 bp, Aichivirus C
  source 1..509: mol_type = genomic DNA
cgttactccactccactccctcgggactggtttggaggaacataacagggcttcccacccctgtttacccttaattccactcaccctttcccttaaccaaccctatccacaccccactgactgattcctttggattttgacctcagaatgcccacttgacctcccacttgcctctcccttcccggattgccggtggtgcctggcggaaaaagcacaagtgtgttgttggctaccaaactcctacccgacaaaggtgcgtgtccgcgtgctgagtaatgggataggagatgccaataacaggctcgcccatgagtagagcatggactgcggtgcatgtgactttggtcaccaggggcatagcattgctcacccctgaatcaagtcatcgagatttctctgacctctgaagtgcactgtggttgcgtggctgggaatccacgcttgaccatgtactgcttgatagagtcgcggctggccgactcatgggttaaagtcagttgacaagacac

SEQ ID NO: 1448 - DNA, 509 bp, Aichivirus C
  source 1..509: mol_type = genomic DNA
cgttactccactccactccttcgggactggtttggaggaacataacagggcttcccatccctgtttaccctttattccacttaccctttctcctaatcaaccctatccacaccccactgactgactcctttggattttgacctcagaatgcctacttgacctcccacttgcctctcccttctcggattgccggtggtgcctggcggaaaaagcacaagtgtgttgcaggctaccaaactcctacccgacaaaggtgcgtgtccgcgtgctgagtaatgggataggagatgcctacaacaggctcgcccatgagtagagcatggactgcggtgcatgtgacttcggtcaccacgggcatagcattgctcacccgtgaatcaagtcatcgagatttctctgacctctgaagtgcactgtggttgcgtggctgggaatccacgcttgaccatgtactgcttgatagagtcgcggctggccgactcatgggttaaagtcagttgataagacac

SEQ ID NO: 1449 - DNA, 641 bp, unidentified; identical to SEQ ID NO: 770
  source 1..641: mol_type = unassigned DNA; note = unclassified Kobuvirus sequence

SEQ ID NO: 1450 - DNA, 510 bp, Aichivirus C
  source 1..510: mol_type = genomic DNA
cgttactccactccactccctcgggactggtttggaggaacataacagggcttcccacccctgtttacccttaactccactcaccctttccctacaaccaaccctatccacaccccactgactgattccttcggattttgacctcagaatgcctacctgacctcccacttgcctttcccttcccggattgccggtggtgcctggcggaaaaagcacaagtgtgttgttggctaccaaactcctacccgacaaaggtgcgtgtccgcgtgctgagtaatgggataggagatgccaataacaggctcgcccatgagtagagcatggactgcggtgcatgtgacttcggtcaccaggggcatagcattgctcacccctgaatcaagtcatcgagatttctctgacctctgaagtgcactgtggttgcgcggctgggaatccacgcttgaccatgtactgcttgatagagtcgcggctggccgactcatgggttaaagtcagttgacaagacac

SEQ ID NO: 1451 - DNA, 509 bp, Aichivirus C
  source 1..509: mol_type = genomic DNA
cgttactccactccactccctcgggactggtttggaggaacataacagggcttcccatccctgtttaccctaaattccacttaccctttccctagaccaaccctatccacaccccactgactgattcctttggattttgacctcagaatgcctacctgacctcccatctgcttttccctttccggattgccggtggtgcctggcggaaaaagcacaagtgtgttgttggctaccaaactcctacccgacaaaggtgcgtgtccgcgtgctgagtaatgggataggagatgccaataacaggctcgcccatgagtagagcatggactgcggtgcatgtgacttcggtcaccaggggcatagcattgctcacccctgaatcaagtcatcgagatttctctgacctctgaagtgcactgtggttgcgtggctgggaatccacgcttgaccatgtactgcttgatagagtcgcggctggccgactcatgggttaaagtcagttgacaagacac

SEQ ID NO: 1452 - DNA, 1000 bp, unidentified; identical to SEQ ID NO: 138
  source 1..1000: mol_type = unassigned DNA; note = unclassified Cardiovirus sequence

SEQ ID NO: 1453 - DNA, 977 bp, Cardiovirus B
  source 1..977: mol_type = genomic DNA
caccccctttggacgcggggcctgcgatagtgccaccccccgtcctccctattccaactacccgaccctaacccagggtccaggaaactggatcaatacaagtcatcccctgaatgctggctaatcagaggaaagtcagcattttccggcccaggctaagagaaacacaataagttagaatctaaattaatccccttgacgaattcgcaacgataagtcctccctcccttgccgctcgttcacacccagaactaacaattcggccccttgtgacgagccccttggtgaaaggacctctttcaatgcgacgtggttggagattaaaccgactccgacgaaagtgctatcatgcctccccgattatgtgatgttttctgccctgctgggcggagcattctcgggttgatacaccttgaatccttcatccttggacctcaggtcccccggtctaagccgcttggaatacgacagggttattttccaatcttctcctttctactttcatgagtcctattcatgaaaagggtctgtgctgccccttccttcttggagaatctgcgcggcggtctttccgtctctcgaaaagcgcagatgcagcatgctggaaccggtgaagaaaacagttctttgtggaaacttagagcagacatcgaaacagctgtagtgacctcacagtagcagcggaaccccctcctggtaacaggagcctctgcggccaaaagccccgtggataagatccactgctgtgagcggtgcaaccccagcaccctggttcgatggttgttctctgtggaaccagagaatggtctttctcaagccctccagtagagaagccaagaatgtcctgaaggtaccccgcatgcgggatctgatcaggagaccaatcgtcagtgctttacactggcgctttggtttaaaaactgtcacagcttctccaaaccaagtggtcttggttttcacttttatcaaactgtttc

SEQ ID NO: 1454 - DNA, 1000 bp, Pestivirus A
  source 1..1000: mol_type = genomic DNA
ggagggaaggcgattcgtcgccagcttatttatctccgctctggcaacctacacatacaagacttggaattaccacaacctctccaaggtagtagaaccagccttggcatacctcccctacgctaccagtgcactaaaaatgttcaccccaactaggctggagagcgtagtcatacttagcaccacaatatacaaaacttacctctcaataaggaaaggaaaaagtgatggacttctgggtacagggattagtgcagcaatggagattctgtcacagaacccggtgtcagtaggtatatctgtcatgctgggggtgggggcaattgccgctcacaatgcaatcgagtctagtgagcaaaaaaggaccctattgatgaaagtgtttgtaaaaaacttcctggaccaggcggcaacagatgagttggtgaaggaaaatccagagaaaataataatggccttatttgaagcagtacagacaattggcaacccattgaggcttatatatcatctgtatggggtttactacaaaggctgggaagcgaaagaactatccgagaggacagctggcaggaacctgttcactttgataatgttcgaagctttcgaactattagggatggactctgaagggaagataaggaacctatctgggaattacatcttggatttgatctacagtttacataaacagataaacagaggcttgaagaagatagtcttggggtgggctcctgcacccttcagttgtgactggactcctagtgatgggagaatcaggttacccacagacaactatctgagagtagagactaagtgcccatgtggttatgagatgaaagcactaaggaatttcagtggcagtctcacaaaagtggaagagaaagggcctttcctctgtaggaacgggcctggtagggggccagttaactatagagtcacaaagtactatgatgacaacctcacagagataaaaccagttgcaaaactagaaggactgcac

SEQ ID NO: 1455 - DNA, 1000 bp, Cardiovirus C
  source 1..1000: mol_type = genomic DNA
ggtttggatcttggatctctctccttccttcccccgtcttcaatttagcttcgtgattgaagcatctcactgtctctagtatttatgtcggactgacgattgagtacgttcagattgtgtttgggaggcccaagggatcgatggacaacacttcgaaagagtcacttgtccaccgctcctttcccctaccctagcaactctggatttgctcacgtggagttcgaggtctgtactttaactctgacttgcttttcttaccttgctatcttgctgacgtggattggttgtagactgattcacgttctcgttagatgctgacgtggagtacgatcgctgtacattccactactgccaattagctcccccttcccgttgctcccctctataaggagagccttctcttgcaaaggtgaagccttcacccccggtcgaagccgcttggaataagacagggttattttctcctctcctcggcgcttgcctcttctaagctgaataggttctatctattcaggcggatggtctggtccgttccttcttggacagagtgtgtatctgggttttccggatctcgaccacacactcaccagagctcaggagtgattaagtcaaggcccgatctgcggcgaaaaggaaatgaagtattttgcagctgtagcgacctctcaaggccagcggatttccccacctggtgacaggtgcctctggggccaaaagccacgtgttaatagcacccttgagagcggtggtaccccaccaccctgcaaattatggatttgacttagtaactaaaagattgacttggcatacctcaacctgagcggcggctaaggatgccctgaaggtacccgtgttgaaatcgcttcggcgaccatggatctgatcaggggccctgcctggagtggttctatcccacacagcgtagggttaaaaaacgtctaaccgccccacaaagaccccggcagggatgccggtttcctttttaccaattcttgacact

SEQ ID NO: 1456 - DNA, 1000 bp, Mischivirus A
  source 1..1000: mol_type = genomic DNA
atcacctgcttagggcgaattgtcgagacgtcattgatgttccggcccaggataacaacgaagtgttccaaggtgatttactccgcccttttaacaacgcacttgggcgaactgcactggtgtactggtaattcctgtcttggattgtgtagtggatataaactgtacccacggttgaaacccactactcacctcacagattgtgtttacctttatatctttgtacgcggtaagtgcggcgttgagagcgccttgtaagttcctaagcattagttggtcctccccgattatgtcatcaatggggttgtcggcacgcggttaagcggttgtcgacccgttgcttggtttaagcatgaggtggattcccccgattatgtctacccgttactatggcgggcggtcgtttcagggtgtttctactgaggactgcaccaagtctttatcttttattctcagatctccggctgtttgacgcttgtaggacagcaggactattttctcttaatctttttctacccactagggtcctatcctagtggagggagggtgccaccccttctctctttagagagtgcgcctggcggtctttccgtctctggaaaaaggagcacatggcatgctacaattggcacaagaaaacaagctttgcggattctttctttgtactagaggaagctgtagcgaccctgtatggcgagcggactcccctctcggcgacgagagcctctcgggccaaaagccaagtgttaatagcacccatacaggcggcagtaccccactgccctttctcaacatacaatgactgatgaaccactgttggtttttctgacacctttgtagtaggattccaaggaatgtcctgaaggtaccctgttagcttacgcgcaggatctgatcaggagtctctttacagtgctgtacactgtgcaagggattaaaaattgtttgaggaatccccgagatagtggtctatctcttcctattttgttttacagacacg

SEQ ID NO: 1457 - DNA, 1000 bp, unidentified
  source 1..1000: mol_type = unassigned DNA; note = Rodent cardiovirus isolate AMzj-2018, complete genome.1 sequence
cagtacccgcgtccaaagggggttgcctggggtggtctcaaccgcgaacacactagcgtgtatccgcggtgaagaccccagggccccctttggacgcgggtactgcgacagtgccaaaccccgtccttccctactccacctaccccggccctaacccagggtccaggaaactggatcaatacaaatcatcccctgaatgctggctaatcagaggaaagtcagcattttccggcccaggctaagagaaatacataagttagactcaatcttgatccccttgacgaattcgcaacgaaaagttctccctcccttgccgcttgttcacacccagaactaataattcggcccctcgtgacaagcccctcggtgaaagaacctctttcaatgcgacgtggttggagattaaatccgactccgacgaaagtactatcatgcctccccgattatgtgatgttttctgccctgctgggcggagcattctcgggttgatatactttgaatccttcctccttggacctccggtcccccggtctaagccgcttggaatacgacagggttattttccaaatctttctccttctactttcatgagctctattcatgaaaagggcatgtgctgccccttccttcttggagaatccgcgcggcggtctttccgtctctcaaaaagcgtggatgcagcatgctggaaccggtgaagaatgtagttctttgtggaaacctagagcagacatcgaaccggctgtagcgacctcacagtaccactgctgtgagcggtgcgaccccagcaccctggttcgatggttgttctctgtggaaccagagaatggccttctcaagccatccagtagagaagccaagaatgtcctgaaggtaccccggcccacgggatctgatcaggagactgatttgtggtgctttacaccacaacttcagtttaaaaattgtcacagcttctccaaaccaagtggtcttggttttccctctattacaatgtgac

SEQ ID NO: 1458 - DNA, 1000 bp, unidentified
  source 1..1000: mol_type = unassigned DNA; note = Foot-and-mouth disease virus - type O strain Akesu/58, complete1 sequence
cgacagctcctgcgttgcactccacacttacgtttgtatgcgcgcgggaaccgctggactttcgttcacccacctacagctggactcacggcaccgcgtggccattttagctggactgtgcggacgaacgccacttgcgcaccccgcgtgactggttaatactcttaccactttccgcctacttggtcgttagcgctgccctgggcactcccgttgggggccgtccggtgctccacggttcccacgcatgacaaactacggtgatggggccgcttcgtgcgagttgatcgcctggtgtgtttcggctgtcacccgaagcccgcctttcacaagttttaccgtcgttcccgacgttaaagggaggtaaccacatgcttattaccgcctttcccggcgttaaagggctgtaaccacacgaattgccttcacccggaagtaaaacggaaatccacacacacggttttgcccgttttcagagagaaacgggacgtgagcgcacgaaacgcgccgtcgcttgtggaagacttgtacaaacacgatctacgcaggtttcctcaactgacacaactcgtgcaaactgtaaccccgcctggtctttccaggtctggaggggaagcttttgtactgtgtttggctccacgttcggtctactggcgagcgctagtagtggcaatgttgtttcgtagcggagcatgttggccgtgggaatccctccttggcgacaaggacccacggggccgcaagccacgtctttgacccaacatgtgtgcaaccccagcacggcaaccttgccacgaaaaccacttcaaggtaacactgatactggtactcaaatactggtgacaggctaaggatgcccttcaggtaccccgaggtaacacgggacacttgggatctgagaaggggattgggacttctataaaagtgcccaatttaaaaagcttctatgcctgaataggtgaccggaggccggcacctttcctctacaactactttacca

SEQ ID NO: 1459 - DNA, 1000 bp, unidentified
  source 1..1000: mol_type = unassigned DNA; note = unclassified sequence
ccgcgggagagatccccggggccccctttcaacgcgggtactgcgatagtgccaccccagccttatccttctcccgacttcccgaccctaacccaggttcctcggaaaggaacaccaaaactcaatcccctggatgctgactaatcagaggaaagttggcattttccggcccaggcttagagaagtagataagttagactcaaattgattcaattccccttggcgaatccgcgtcgaggcgccacctctcacttgccgtcctccacacccatccttaattcggcctctgtgttggaccccttgttgaagtggcttccctctgcgcggcgcggttggagaattttgtcatccgactccgacgaaactaccatcatgcctccccgattgtgtgatgccctccgccctgctgggtggagcatcctcgggttgagaaacctcttccttcaaccttggaccccggtcccccggtctaagccgcttggaataagacagggttattttcactctcttcttcttctactccacggatttctattccctggaagggtatgtgttgcccctcgcttcttgcggaacgcgcacggtggtctttccacctctcgaaaagtgtgcgtgcaacatgcagagatacgtgaagaaagcagtttgtgaactagtcctagagcgaacacgaatccggctgtagcgaccacttaagagcagcggaacccccctcccggcgacgggagcctctgcggccaaaagccacgtggataagatccactcttgagtgcggtgcggccccggcaccccggtttcgtggttgttctttgacgaacccacaaatggcgatcttaagcgcctctgtagagaagccaagaatgtccagaaggtacccctatcaagggatctgatctggagacgtgtcacttatgctttacacgagtgctcgcgtttaaaaactgtcacagcttctccaaaccaagtggtcttggttttctccttctaattctctgtcaat

SEQ ID NO: 1460 - DNA, 1000 bp, Cardiovirus B
  source 1..1000: mol_type = genomic DNA
tcccccggtcaccccctttcgacgcgggtactgcgatagtgccacccagtctctcctactcccgactcccgaccctaacccaggttcctcggtataggaacaccactttactcatcccctggatgctgactaatcagaggaacgtcagcattttccggcccaggctaagagaagtagataagttacaatccaaattgatttatcatccccttgacgaattcgcgttggaaaagcacctctcacttgccgctcttcacacccatcattttaattcggcctctgtgttgagccccttgttgaagtgtttctctccatcgcgacgtggttggagatctaagtcaaccgactccgacgaaactaccatcatgtctccccgattatgtgatgctttctgccctgctgggtggagcatcctcgggttgagaaatccttcttcctttcaccttggaccccggtcccccggtctaagccgcttggaataagacagggttattttcacctctttttcttctactccacagtgctctatactgtggaagggtatgtgttgccccttccttcttggagaacgtgcgcggcggtctttccgtctctcgacaagcgcgcgtgcaacatgcagagtaacgcgaagaaagcagttcttggactagctttagtatctgcaagaagacagctgtagcgaccacacaaaggcagcggaacccccctcctggtaacaggagcctctgcggccaaaagccacgtggataagatccacctttgtgtgcggtgcaaccccagcaccctggtttcttgaagatactctagtgaacccttgaatggcaatctcaagcgcctctgtaggaaagccaagaatgtccaggaggtacccctacctcgcggaagggatctgacctggagacacgtcgcaagtgctttacacctgtgctcgtgtttaaaaattgtcacagctttcccaaaccaagtggtcttggttttcctttttattactattgacact

SEQ ID NO: 1461 - DNA, 1000 bp, unidentified
  source 1..1000: mol_type = unassigned DNA; note = Theiler murine encephalomyelitis, complete genome.1 sequence
ccggttaccccctttcgacgcgggtactgcgatagtgccaccccagtccttcctactcccgactcccgaccccaacccaggttccttggaacaggaacaccaatttattcatcccttggatgctgactaatcagaggaacgtcagcattttccggcccaggctaagagaagtagataagttagaatctaaattatttatcatccccttgacgaattcgcgttggaaaagcacctctcacttgccgctcttcacacccatcattctaattcggcccctgtgttgagccccttgttgaagtgtttccctccatcgcgacgtggttggagatctaagttaaccgactccgacgaaactaccatcatgcctccccgattatgtgatgctttctgccctgctgggtggagcatcctcgggttgagaaatctttcttccttttaccttggactccggtcccccggtctaagccgcttggaataagacagggttatcttcactcctcttcttttctacttcacagtgttctatgctgtgaaagggtatgtgtcgccccttccttcttcggagaacacgcgtggcggttttttccgtctctcgacaagcgcgtgtgcgacatgcagagtctcgcgaagaaagcagttctcggtctagctttagtgcccacaagaaaacagctgtagcgaccacacaaaggcagcggaacccccctcctggtaacaggagcctctgcggccaaaagccacgtggataagatccacctttgtgtgcggtgcaaccccagcaccctgttttcttggtgacactctagtgaacccctgaatggcgatcttaagcgcctctgtagggaagccaggaatgtccaggaggtaccccttccgctcggaagggatctgacctggagacacatcacatgtgctttacacctgtgcttgtgtttaaaaaattgtcgcagcttccccaaaccaagtggtcttggttttctctttttattatattgtcaat

SEQ ID NO: 1462 - DNA, 1000 bp, Cardiovirus B
  source 1..1000: mol_type = genomic DNA
atcccccggttaccccctttcgacgcgggtactgcgatagtgccaccccagtctttcctactcccgactcccgaccctaacccaggttcctcggaacaggaacaccaatttactcatcccctggatgctgactaatcagaggaacgtcagcattttccggcccaggctaagagaagtagataagttagaatccaaattgatttatcatccccttgacgaattcgcgttggaaaaacacctctcacttgccgctcttcacacccattaatttaattcggcctctgtgttgagccccttgttgaagtgtttccctccatcgcgacgtggttggagatctaagtcaaccgactccgacgaaactaccatcatgcctccccgattatgtgatgttttctgccctgctgggtggagcaccctcgggttgagaaaaccttcttcctttttccttggactccggtcccccggtctaagccgctcggaatatgacagggttattttcacctcttcttttctactccacagtgttctatactgtggaagggtatgtgttgccccttccttcttggagaacgtgcgcggcggtcttccgtctctcgacaagcgcgcgtgcaacatacagagtaacgcgaagaaagcagttctcggtctagctctagtgcccacaagaaaacagctgtagcgaccacacaaaggcagcggaacccctctcctggtaacaggagcctctgcggccaaaagccacgtggataagatccacctttgtgtgcggtgcaaccccagcaccctggtttcttggtgacactctagtgaacccctgaatggcaatctcaagcgcctctgtagggaagccaagaatgtccaggaggtaccccttcctctcggaagggatctgacctggagacacatcacacgtgctttacacctgtgcttgtgtttaaaaattgttacagcttccccgaaccaagtggtcttggttttcactttttatcacactgtcaat

SEQ ID NO: 1463 - DNA, 1000 bp, unidentified
  source 1..1000: mol_type = unassigned DNA; note = unclassified Picornaviridae sequence
cactacgttacggttcccgcccgggacaactggtaccccattaggctacaacatggctgaaaagggtattgggtccccccggattgtgtccgttcgtagtgtgtgtaacgtggtttaccatctccactaacattggactaagcatttcatctttcctccccgattgtgtactcacttggctaacgctgggtggtcgcggttgggtccttgatttactttttctcgtctaagcattccgactgtcctccccgattatgtgctcattcagttaactgctgggtggtcatgactaacatcgaggaaccttctgtccacgcttactttgagctccggtcgcttgacgcttgtagggcgatagggttatcttcctgacaacatctttattctacctccataggctctatctatggagacggagtgtggcacccgtcccttctttgggagcttcggtagtgacgccctttgtcactctcgccagccgaggcatgcctggtgccaggtagcaaagaaagcatatgtttaaggacttgactgatttagcgcaagagtttgtagcgatgtccatagtgtctgcggattccccacacggcgacgtgtgccgcggaggccaaaagccacggtgttcacagcacccctatggatgcccacagaccccagtgggcactcttgttgccggactttcaggaaattaggcataggctcttctcaaactcctggcattggactaggtaagaatgccccggaggtaccccagtactccttcgggagtctgggatctgaccgggggccccacaaacatgctttacgtgtttcgtgcggtcaaaaattgtctaactagtcccaaccttgaacaagggattgttctttcctttttattactgagactggcctatggtgacaacagagattgactgtgaatacagttattttctggtgtttatcatttggtttttctccgtgctcttttacctttgtggtatttgttctttagataggcaaa

SEQ ID NO: 1464 - DNA, 1000 bp, unidentified
  source 1..1000: mol_type = unassigned DNA; note = Theiler's encephalomyelitis virus isolate Vie415HTR, complete1 sequence
catcccccggtcaccccctttcgacgcgggtactgcgatagtgccaccccagtctttcctactcccgattcccgacccctacccaggttcctcggaacaggaacaccaaattactcatcccctggatgctgactaatcagaggaacgtcagcgttttccggcccaggttaagagaagtagataagttagattctaaattgacctaccatccccttgacgaattcacactggagacgcacctctcacttgccgctcttcacacccatcaatctaattcggcccctgtgttgagccccttgttgaagtgccttcccccattgtgacgtggttggagatctaagtcaaccgactccgacgaaactaccatcatgcctccccgattatgtgatgctttctgccctgctgggtggagcatcctcgggttgagaaaatcttcttcctttttccttggaccccggtcccccggtctaagccgcttggaataagacagggttagcttcatctcctccttcttccacttcaagtgcctatactatgaaagggtatgtgttgccccttccttcttggagaacacacgcggcggcctttccgtctctcgacaagcgcgtgtgcgacatgcagagaaacgtgaagaaagcagtttgcggactagctccagtgcccacaagaaaacagctgtagcgaccacacaaaggctgcggaaccccctcctggtaacaggagcctctgcggccaaaagccacgtggataagatccacctttgtgtgcggtacaaccccagtaccctggtttcttggtgcactctagcgaaaacgcaaatggcaatctgaagcgcctctgtaggaaagcaaagaatgtccaggaggtaccccttccttttggggagggatctgacctggagacacatcacacgtgctttacacttgtgcttgtgtttaaaaactgtccagctttcccaaaccaagtggtcttggttttcattttttaaacaaatttcact

SEQ ID NO: 1465 - DNA, 1000 bp, Cardiovirus B
  source 1..1000: mol_type = genomic DNA
cgcggtgaagatcaccccgggaaaccccctttggacgcgggacctgcgacagtgccatcccccgtctctcctattccaactacccgaccctaacccagggtccaggacactggatcaatacaagtcatcccctgaatgctggctaatcagaggaaagtcagcattttccggcccaggctaagagaaacacaataagttagaatctaaattaatcaccttgacgaattcgcaaagataagtcctccctcccttgccgctcgatcacacccagaactaacaattcggcctctcgtgacgagccccttggtgaaaggacctctttcaacgcgacgtggttggagattaaaaccgactccgacgaaagtgctatcatgcctccccgattatgtgatgttttctgccctgctgggcggagcattctcgggttgatataccttgaatccttcatccttggacctcccggtcccccggtctaagccacttggaatatgacagggttattttccaaaattcttatttccactttcatgagttcttttcatgaaaagggtatgtgctgccccttccttcttggagaatccgcgtggcggtctttccgtctctcgaaaaacgtggatgcagcatgctggaaacggtgaagaaagtagttctctgtggaaacttagaacagacatcgaaacagctgtagcgacctcacagtagcagcggaaccccctcctggcgacaggagcctctgcggccaaaagccccgtggataagatccactgctgtgagcggtgcaaccccagcaccctggttcgatggttgttctctgtggaatcagagaatggctttcctaagccctccagtagagaagccaagaatgtcctgaaggtaccccgcgtgcgggatctgatcaggagaccaattgccagtgctatacactggtactttggtttaaaaattgtcacagcttctccaaaccaagtggtcttggttttctatctttaataattggttc

SEQ ID NO: 1466 - DNA, 1000 bp, Cardiovirus B
  source 1..1000: mol_type = genomic DNA
gcgtcttcgcggtgaagaacaccccaggggtaccccctttgaacgcgggacctgcgaaagtgccaacccaagtcttttcctgttcttaccctactccctccttgggtccattggaaggaccaactatattatcccttggatgctggctaatcagaggaaagtcagcattttccggcccaggctaagagaaacatataagttagatatgattttaatcccttgacgaattcaaaacttgatgttctccctcccttgccgcttgatcacacccacctcttaaattcggccttttgtgacaagccccttggtgaaaggacctctcttgtttcgacgtggttggaattaacatcaattccgacgaaagtgctatcatgcctccccgattatgtgatgttttctgccctgctgggcggagcaccctcgggttgagataccttgactcttttcttttggaaccttggttcccccggtctaagccgcttggaatacgacagggttattttctatactcttatttctacttttacgggttctatccgtaaaaagggtatgtgttgccccttccatcttcggagaatccacacggcggtctttccgtctctcaaaaagtgtggatgcaacatgccggaaacggtgaagaaagcagttttctgtggaaatttagaatggacatcgaaacagctgtagcgacctcacagtagcagcggactcccctcttggtaacaagagcctctgcggccaaaagccccgtggataagatccactgctgtgagcggtgcaaccccagcaccctggttcgatggctactctctatggaaccagagaatggttttctcaagccctccggtagagaagccaagaatgtcctgaaggtaccccgcgtgcgggatctgatcaggagaccgaatggtaatgctttacattatcactttggtttaaaaattgtcacagcttctccaaaccaagtggtcttggttttcctttttatccacatggcaag

SEQ ID NO: 1467 - DNA, 1000 bp, Cardiovirus B
  source 1..1000: mol_type = genomic DNA
tagcatcttcgcggcaaagaacaccccaggggtaccccctttgaacgcgggtcctgcgaaagtgccaacccatgtctttcccactctttccccgactcccacctcgggtctaatgaaaagaccaaatatttcatcccttgaatgctggctaatcagaggaaagtcagcattttccggcccaggctaagagaaacatataagttagatttgatttaatcccttgacgaattcgaaacgagacgttttccctcccttgccgcttgttcacacccacttatttaattcggccttttgtgacaagcccctcggtgaaagaacctctctcttttcgacgtggttggaattaccatcatctccgacgaaagtgctatcatgcctccccgattatgtgatgttttctgccctgctgggcggagcattctcgggttgagaaaccttgaatcttttcctttggaaccttggttcccccggtctaagccgcttggaatatgacagggttattttcttaatcttatttctacttttacgggctctatccgtaaaaagggtacgtgctgccccttccttctctggagaatctacacggcggtctttccgtctcttaacaagtgtggatgcagcatgccggaaacggtgaagaaaacagttttctgtggaagtttagagtgcacatcgaaacagctgtagcgacctcacagtagcagcggactcccctcttggcgacaagagcctctgcggccaaaagccccgtggataagatccactgctgtgagcggtgcaaccccagcaccctgattcgatggtcattctctacggaaccagaaaatggttttctcaagccctccggtagagaagccaagaatgtcctgaaggtaccccgcgtgcgggatctgatcaggagaccaattgacggtgctttacactgtcactttggtttaaaaattgtcacagcttctccaaaccaagtggtcttggttttccaattttgttgagtggcaat

SEQ ID NO: 1468 - DNA, 1000 bp, unidentified
  source 1..1000: mol_type = unassigned DNA; note = unclassified Picornaviridae sequence
taggatgacatgttccaagtcagatgccaacgacttggtaaggacgaatttgcccgcactacactacggttcccgcccgggacaactggtaccccattatgccacaacatggctgaaaagggtactgggtccccccggattgtgtccgtttgtagtgtgtgtaacgtggtttaccatctccactaacattggactaagcatttcatctttcctccccgattgtgtactcacttggctaacgctgggtggtcgcggttgggtccttgatttactttttctcgtctaagcatgccgactgtcctccccgattatgtgctcattcagttaactgctgggtggtcatgactaatatcgaggaaccttctgtctacgcttactttgagctccggtcgcttgacgcttgtagggcgatagggttatcttcccaacaacatctttattctacctccataggctctatctatggagacggagtgtggcacccgtcccttctttgggagcttcggtagtgacgccctttgtcactctcgccagccgaggcatgcctggtgccaggtagcaaagaaagcatatacttaaggacttgactgatttagcgcaagagtttgtagcgatgtccatagtgtctgcggattccccacacggcgacgtgtgccgcggaggccaaaagccacggtgttcacagcacccctatggatgcccacagaccccagtgggcactcttgttgccggactttcaggaaattaggtataggctcttctcaaactcctggcattggactaggtaagaatgccccggaggtaccccagtactccttcgggagtctgggatctgaccgggggccccacaaacatgctttacgtgtttcgtgcggtcaaaaattgtctaactagtcccaaccttgaacaagggattgttctttcctttttattactgagactggcctatggtgacaacagagattgactgtgaatacagttattttctggtgttcatcat

SEQ ID NO: 1469 - DNA, 1000 bp, unidentified
  source 1..1000: mol_type = unassigned DNA; note = unclassified Cardiovirus sequence
cccccggttaccccttctgaacgcgggtcctgcgatagtgccaaccccagcttatccctaatcccgactccccgaccctaacccagggtcctcggaagaggatcaccaacttcatccccagaatgttgactaatcagaggaaagttagcattttccggcccagacttagagaagtagataagttagagccaaattgatacaagcatccccttgacgaattcgccatgaaacgtcgtccctcacttgccgcttgatcacacccagaactaacaattcggcccctcgtgacaagccccttgttgacacgacctctttctacgcgacgtggttggagattttgaaatcctttgactccgacgaaactaccatcatgtctccccgattatgtgatgctatccgccctgctgggtggagcattctcgggttgagttaacctattcctttactccttggactccggtcccccggtctaagccgcttggaataagacagggttatcttcctaactctctctcttctactcttaagtgtcctctacttaagaagggtatgtgctgccccttccttcttggagaactcgcgtggcggtctttccgtctctcgaagagcgtgagtgcagcatgcaaagacctgcgaagaaagcagtttcctgactaaccttagtttggacaagattccggctgtagcgacctcatagaagcagtggacacccctctcggtaacgagagcccctgcggccaaaagccacgtggatgagatccacttctatgagcggtgcaaccccagcaccccggtatcttggtcatactctggtgaacctggagatggcgatcttaagcaactttgtagagaagccaagaatgtccagaaggtaccccggctcacgggatctgatctggagaccagtacactgtgctttacacattgtctctggtttaaaaactgtcacagcttctccaaaccaagtggtcttggttttcccactttactacttggcaag

SEQ ID NO: 1470 - DNA, 1000 bp, Cardiovirus B
  source 1..1000: mol_type = genomic DNA
tgtcttcgcggtgtagaacaccccaggggtaccccctttgaacgcgggtcctgcgaaagtgccaacccacgtctcttccttcctttaatccgattcccacctcgggtccataaaaaggaccaaatatgtcatcccttgaatgctggctaatcagaggaaagtcagcattttccggcccaggctaagagaaacatataagttagatttgatcacaatcccttgacgaattcagaacgagaagttctccctcccttgccgcttgttcactcccttccattcaattcggcctctcgtgacaagccccttggtgaaagaacctctctctttctgacgtggttggaattaacatcatttccgacgaaagtgctatcatgcctccccgattatgtgatgttttctgccctgctgggcggagcattctcgggttgagaaaccttgaatcttttcttttggaaccttggttcccccggtctaagccgcttggaatatgacagggttattttcttcactcttacttctacttttatgggctctatccataaaaagggtatgtgctgccccttccttcttcggagaattcacacggcggtctttccgtctctcgacaagtgtggatgcagcatgccggaaacggtgaagaaaacagttttctgcggaagtttagaatacgcatcgaaacagctgtagcgacctcacagtagcagcggactcccctcttggcgacaagagcctctgcggccaaaagccccgtggataagatccactgctgtgagcggtgcaaccccagcaccctgattcgatgattattctctacggaaccagaaaatggttttctcaagccttccggtagagaagccaagaatgtcctgaaggtaccccgcgtgcgggatctgatcaggagaccaactggcagtgctttacactgttaccttggtttaaaaactgtcacagcttctccaaaccaagtggtcttggttttcccattttaattgatggcaat

SEQ ID NO: 1471 - DNA, 1000 bp, Cardiovirus B
  source 1..1000: mol_type = genomic DNA
gttcgcggtgaagaacaccccaggggtaccccctttggacgcgggacctgcgacagtgccaacccacgtctcttcccactattattattccggttcccgccttaggtccattgaaaagaccaaatatgtcatcccttggatgctggctaatcagaggaaagtcagcattttccggcccaggctaagagaaacatataagttagaaatgattctaatcccttgacgaattcggaacgagaagttctccctcccttgctgcttgttcacacccatcatttaattcggccctttgtgacaagccccttggtgaaaggacctctctctttccgacgtggttggaattaacatcttttccgacgaaagtgctatcatgcctccccgattgtgtgatgttttctgccctgctgggcggagcgtcctcgggttgagaaacctttaatcttttcctttggagccttggctcccccggtctaagccgcttggaatatgacagggttattttccaaactctttatttctactttcatgggttctatccatgaaaagggtatgtgttgccccttccttctttggagaatctgcgcggcggtctttccgtctctcaacaagcgtggatgcaacatgccggaaacggtgaagaaaacagttttctgtggaaatttagagtggacatcgaaacagctgtagcgacctcacagtagcagcggattcctctcttggcgacaagagcctctgcggccaaaagccccgtggataagatccactgctgtgagcggtgcaaccccagcaccctggttcgatggccattctctatggaaccagagaatggttttctcaagccctccggtagagaagccaagaatgtcctgaaggtaccccgcgcgcgggatctgatcaggagaccaattggcagtgctttacgctgccactttggtttaaaaactgtcacagcttctccaaaccaagtggtcttggttttctaattttgttgactggcaat

SEQ ID NO: 1472 - DNA, 1000 bp, unidentified
  source 1..1000: mol_type = unassigned DNA; note = Saffold virus strain BCH1031, complete genome.1 sequence
ttttcgcggcaaagaacacctcaggggtaccccctttgaacgcgggacctgcgatagtgccaacccacgtcttttcccactcctaacccggttcccaccttatgtccattgaaaggaccagatatatcatcccttgaatgctggctaatcagaggaaagtcagcattttccggcccaggctaagagaaacatataagttagaaatgattctaatcccttgacgaaaccagaacgagacgttctccctcccttgccgcttgttcacacccatttgattgattcggccttttgtgacaagccccttggtgaaaggacctctctctttctggcgtggttggaattaacatcctttccgacgaaagtgctatcatgcctccccgattatgtgatgctttctgccctgctgggcggagcattctcgggttgagaaatctcaaaccttttctttttggaactttggttcccccggtctaagccgcttggaatacgacagggttattttctatactcttatttctacttttacgggctctatccgtaaaaagggtaagtgttgccccttccatcttcggagaatccacacgacggtctttccgtctctcgaaaagtgtggatgcaacatgccggaaacggtgaagaaagcagttttctgtggaaatttagaatggacatcgaaacagctgtagcgacctcacagtagcagcggactcccctcttggcaacaagagcctctgcggccaaaagccccgtggataagatccactgctgtgagcggtgcaaccccagcaccctggttcgatggctattctctatggaaccagagaatggttttctcaagccctccggtagagaagccaagaatgtcctgaaggtaccccgcgtgcgggatctgatcaggagaccgaatggtaatgctttacattatcactttggtttaaaaattgtcacagcttctccaaaccaagtggtcttggttttccttttttatccacatggcaag

SEQ ID NO: 1473 - DNA, 1000 bp, unidentified
  source 1..1000: mol_type = unassigned DNA; note = Saffold virus gene for viral polyprotein, strain Nijmegen2008.1 sequence
gcatcttcgcggtgtagaacaccccaggggtaccccctttgaacgcgggacctgcgatagtgccaacccacgtcttttcccacttttgccccgattcccacctcgggtccaatgaaaggaccacatgtttcatcccttgagtgctggctaatcagaggaaagtcagcattttccggcccaggctaagagaaacatataagttagatttgattcaaatcccttgacgaattcggaacgagacgttctccctcccttgccacttgttcacacccacacttttgattcggccttttgtgacaagtcccttggtgaaagaacctctctctttccgacgtggttggaattaacatcatttccgacgaaagtgctatcatgcctccccgattgtgtgatgttttctgccctgctgggcggagcattctcgggttgagaaaccttgaatcttttcctttggaaccctggttcccccggtctaagccgcttggaatacgacagggttattttccttattcttacttctacttttatgggttctatccataaaaagggtatgtgctgccccttccttctttggagaattcgcacggcggtctttccgtctctcgacaagtgtgaatgcagcatgccggaaacggtgaagaaaacagttttctgtggaagtttagagtgcacatcgaaacagctgtagcgacctcacagtagcagcggaaccccctcttggcgacaagaacctctgcggccaaaagccccgtggataagatccactgctgtgagcggtgcaaccccagcaccctgattcgatggtcattctctacggaaccagaaaatggttttctcaagccctccggtagagaagccaagaatgtcctgaaggtaccccgtgcgcgggatctgatcagagaccaattgacagtgctgtacgctgtcactttggtttaaaaactgtcacagcttctccaaccaagtggtcttggttttccaatttttattgaatggcagt

SEQ ID NO: 1474 - DNA, 1000 bp, Cardiovirus B
  source 1..1000: mol_type = genomic DNA
cccggccaccccctttcgacgcgggtactgcgatagtgccaccccagtctttcctactcccgactcccgactctaacccaggttccttggaacaggaacaccaatatactcatcccctggatgctgactaatcagaggaacgtcagcattttccggcccaggctaagagaagtagataagttagattccaaattgatttatcatccccttgacgaattcgcgttggaaatgcacctctcacttgccgctcttcacacccattaacttgattcggcctctgtgttgagccccttgttgaagtgcttccctccatcgtgacgtggttggagatctaagtcaaccgactccgacgaaactaccatcatgcctccccgattatgtgatgctttctgccctgctgggtggagcatcctcgggttgagaaaaccttcttcctttttccttggaccccggtcccccggtctaagccgcttggaataagacagggttatcttcacctcttccttcttctacttcatagtgttctatactatgaaagggtatgtgtcgccccttccttctttggagaacacgcgcggcggtctttccgtctctcgaaaagcgcgtgtgcgacatgcagagaaccgtgaagaaagcagtttgcggactagctttagtgcccacaagaaaacagctgtagcgaccacacaaaggcagcggaccccccctcctggcaacaggagcctctgcggccaaaagccacgtggataagatccacctttgtgtgcggcacaaccccagtgccctggtttcttggtgacacttcagtgaaaacgcaaatggcgatctgaagcgcctctgtaggaaagccaagaatgtccaggaggtaccccttccctcgggaagggatctgacctggagacacatcacatgtgctttacacctgtgcttgtgtttaaaaattgtcacagctttcccaaaccaagtggtcttggttttcactctttaaactgatttcact

SEQ ID NO: 1475 - DNA, 1000 bp, Cardiovirus B
  source 1..1000: mol_type = genomic DNA
cccccggttaccccctttcgacgcgggtactgcgatagtgccaccccagtctttcctactcccgactcccgaccctaacccaggttcctcggaacaggaacacaaatttactcatcccctggatgctgactaatcagaggaacgtcagcattttccggcccaggcttagagaagtagataagttagaatctaaattgatatgacttccccttgacgaattcacgttggaaatgcacccctcacttgccgctcttcacacccactaattgattcggcctactgtgttgagccccttgttgaagtgcttccctccctcgtgacgtggttggagaaatcttgtcacccgactccgacgaaactaccatcatgcctccccgattatgtgatgctttctgccctgctgggtggagtatcctcgggttgagaaatccttcttccttttaccttggaccttggtcccccggtctaagccgcttggaataagacagggttattttcacctcttcttcttctacttcatggtgctctataccatgaaagggtatgtgtcgccccttccttcttggagaactcacgcggcggtcttccgtctctcaaaaagcgcgagtgcgacatgcagagtaacgcgaagaaagcagttcctggcctagctctagtgcccacaagaaaacggctgtagcgaccacacaaaggcagcggaactcccctcctggtaacaggagcctctgcggccaaaagccacgtggattagatccacctttgtgtgcggtgcaaccccagcaccccggtttcttgttgacactctagtgaatccttgaatggcaatctcaagcgcctctgtaggaaagccaagaatgtccaggaggtaccccttcctcgcggaagggatctgacctggagacacatcacacgtgctttacacttgtgcttgtgtttaaaaattgtcacagctttcccaaaccaagtggtcttggttttccttttttatcctactgtcaat

SEQ ID NO: 1476 - DNA, 1000 bp, Cosavirus A
  source 1..1000: mol_type = genomic DNA
ggctcactcctgtacaccgtgagtccgcgcagtgctgacttaacacttaagtaatgtgtaggccgagaacgacaccgctcggctcccacctttcaccaccgtgggattaacaggttcaatacacaaattcctgtccttggctatgtcaaagcaatacagtgtgtacatgatgtgcacgctcaaggcggagacttaggcctcacagattgtgttttgtgatattgaatgctggatggtcacgttggagactgcatgtggcagtcttgaaacgtgtggtttgacgtctatccattatggcagtgggtggagtactgcaaagatgtcaccgtgctttacacggtttttgaaccccacaccggctgtttggcgcttgcaggacagcaggtttattttcttatgttctctatttctagccaacaggacactatcctgttgggcggagtgatactcccgttccttcttggacagattgcctccacgacctttgtggatctcaaggtagtcaagtcactggtgaatagagcgaaggttgaggagacctgaggaatttccatgtggctttgccaggagttgtagcgatgctgtgtgtgtgtgcggatttcccctcatggcaacatgagcctcacaggccaaaagccctgtccgaaaggacccacacagtggagcgaccccagctccctcctacaaagctttgtgagaatgaactcacgtttattcttctttattctctatttacatcaggccccaaagatgtcctgaaggtaccttgtgtatctgggcatgagcaccatcaactacccggacttgcacttcggtgcagacgcatgtggtgtcccagcccctctgcttcggcaggggggcttttgctcgctcagcacgagatctgatcaggagtctcccccggtgtgctttacacccggcgggggattaaaaattgcccaaggcctggcaaaataacctaggggactaggttttccttttattaacaatgtctgtcatt

SEQ ID NO: 1477 - DNA, 1000 bp, unidentified
  source 1..1000: mol_type = unassigned DNA; note = Human cosavirus A strain AM326/BRA-AM/2017, complete genome.1 sequence
tccgctgtgatgggctcactcctgtacaccgtgagtccgcgcagtgctgacttaacacttaagtaatgcataggccgagaattacaccgctcggctcccacctttttccatcgtgggattaacaggtttaatgcacaaattcctgtccttggctatgtcaaagcaatacagtgtgtactcggtgtacacgctcaaggcggagatttaggcctcacagattgtgttttgtgttgttgaatgctggatggtcacgttggagactgcatgtggcagtcttgaaacgtgtggtttgacgtctatccattacggcagtgggtggagtactgcaaagatgtcaccgtgctttacacggtttttgaaccccacaccggctgtttggcgcttgcaggacagcaggtttattttcttatattctctatttctagccaacagggtactatcttgttgggcggagtgatactcccgttccttcttggacagattgcctccacgttctttgtggatcttgaggtgatcaagtcactggtaagtagagcgaaggttgaggagacctgaggaatttccatgtggctttgccaggagttgtagcgatgctgtgtgtgtgtgcggatctcccctcatggtaacatgagcctcacaggccaaaagccctgtccgaaaggacccacacagtggagcaatcccagctccctcctacaaagctttgtgagaatgaactcacgtttattcttctttattctctacttacatcaggccccaaagatgtcctgaaggtaccttgtgtatctgggcacgagcaccatcaactacccggacttgtgcttcggcgcagacgcatgtggtgactcagcccctctgcttcggcagaggggctttttgctcgctcagcacgagatctgatcaggagcccctcccagtgtgctttacacctggcgaggggttaaaaattgcccaaggcctggcaaaacaacctaggggactaggttttcctttattaaca

SEQ ID NO: 1478 - DNA, 1000 bp, unidentified
  source 1..1000: mol_type = unassigned DNA; note = Picornaviridae sp. isolate bbr144pit2 genomic sequence.1 sequence
tcagaacagaatactcagtggacaggggaccaatccaatataagtcttgaccgggcctttctggaccagatgtccttaaggaggctgtgccaagccaccaggtaaatctctcaaagagagtccagagtctcgtaggctatgctgtattaatacagcaaagacccacacatccccgctttcaacgtctggcccacgaaacgggccactttctcggtctgaccattggtttattattgaaattggcttggaaatgctgacactgtaagttggtttgtgatttaaacaatggttaatctggactctctttgagagatttacctggtggcttggcacagcctccttaaggacatctggtccagaaaggcccggtcaagacttatattggattggtcccctgtccactgagtattctgttctgaaccgtgtaggcagggctagcgccaccatgattgccaagggactacctccctggtgacagggacccttgggcccaaaaggctaggtggcaactctcatgtcaagagaggggtatccaccccaatctgaatcatgtggagtgaagccactcgtcatggctctgaccccgagactgtctacatctagtaagatggatgaaaactggatttggagaccactctgattgtcttgatgagaaagtccgctatttgactgagtagatgccctccagctacccttatggatgtgaggaggggaccgtgactatagcgttccgctaaaccggtttaaaaaacatgaaaggtcaaatatgtggcgccattttccacttatatcaataaccatatgtctgacgaagttgattgtgctgagtgttctaagccctcctggactgtcagattaaaattggcttttctgcaatattttggttgccagtttgtatgggtttatcactcaggaaagaatcaagagaaagattgaaaatcttggattgtgcaacaaaagctcatttttgtccttgtgaaggcaaccagagattgcagtc

SEQ ID NO: 1479 - DNA, 1000 bp, unidentified
  source 1..1000: mol_type = unassigned DNA; note = Cosavirus F strain NGR_2017_NHP_CV, complete genome.1 sequence
cggtgtgatgggctcactcctgtacatcgtgagtatgctcaaccactgactaaagggctgcttgaacttaacatcatggattccgatccgttacattgatcggcccgtgcccttctcaatatgggattaacagagcttcaacttggttttcctgtcttttagcgttccaacggtattatgccacaacatggcagaaagcccgcggtagctatcacagattgtgtaaccaggtttggctgctggatggtcatattcagatcgcatgcatgtgtggtcttgagatatgtcccggttgacgtttcccttatgttacattcttgacagccggtggagtgctgaaattacgtcaccatgctttacatggtttttgaactccacgccggtcgctagacgcttgtaaggcgataggcttatcttcctatttctcttctttctagcccagtaggttctatctactggggcggagcgaggttcccgttccttcttggacagctggtcaccacaccttgtggattcttagactggcaaaacactggtgcaagagttgaagggattatgtgtttaagtgaagttctactgctttttgaggaatcgtagcggtgctgtgtgtgtgtgcggattccctcctgcggcgacgcaggcctcacaggccaaaagccacggtcgaaagaccccacacagtggagatatcccatctccttcctctcttagtagtttaatgaatctttttcacaggatcttataagactactgcatttcagaccccaaagatggcctgaaggtaccttgtgtattcactttggctgaaccaccgactccccggactggctttgccgacgcatgtgggtgcccagcccctgcccttaagggcaggggcttccctcagcaagtgacacgagatctgatcaggtgccaggtcactggtgctttacaccaccctggttaaaaattgcccaaggtctgacaccccaacccaggggactgggttttcttttatctt

SEQ ID NO: 1480 - DNA, 1000 bp, unidentified
  source 1..1000: mol_type = unassigned DNA; note = unclassified Cosavirus sequence
ctcactcctgtacaccgtgagtccgcgcagtgctgacttaacacttaagtaatgtttaggccgagaattacaccgctcggctcccacctttcaccatcgtgggattaacaggtaaactatgtgtattcctgtccttggttgtttcaaagcaatacggcatgtgcaatggcgcacaggcccaaggcggagaattagacctcacagattgtgttacacatttgtttatgctggatggtcacgttggagactgcatgtggcagtcttgaaacgtgtggtttgacgtctaaccattatggcagtgggtggagtactgcaaagatgtcaccgtgctttacacggtttttgaaccccacaccggctgtttggcgcttgcaggacagtaggtttattttcatttgaattctcttttctagccgtgtaggatctatctacacgggcggagtgatactcccgctccttcttggacaggtgacctccacgctctttgtggatctcaaggtgaccaagtcactggtgtttgaagtgaagattgaagagacactagggagtttcatgtggctttgccagggattgtagcgatgctgtgtgtgtgtgcggatctcccctcgtggcgacacgagcctcacaggccaaaagccctgtccgaaaggacccacacagtggggttgccccgacccctccctacaaagctttgtgcaaacaaacttttgttttgtctttcttaagcttctctcacatcaggccccaaagatgtcctgaaggtaccccgtgtatctgaggatgagcaccatcagctacccggacttgtagaacacattctacagacgcatgtggtaacccagcccctctccttcgggaggggggctttgctcactcagcacaggatctgatcaggagatccacctctcgtgctttacacgagggcgtgggtttaaaaattgcccaaggcctggcaaacaacctaggggactaggttttcctttattcaaaagttgtcaat

SEQ ID NO: 1481 - DNA, 1000 bp, unidentified
  source 1..1000: mol_type = unassigned DNA; note = unclassified Cosavirus sequence
ctctgccagtgattcccccttgcgggatctttttaaactttatttcaaactacgtttctaagcaactttaaatacacaagaacgttgacccttccattgggaatggaagagatgaaattgaaatggaagtattctattgtaatgtcaatagtcttaccatccgctgtgatgggctcactcctgtacaccgtgagtccgcgcagtgctgacttaacacttaagtaatgattaggccgagaattacaccgctcggctcccacctttcaccatcgtgggattaacaggtaatttgtatacattcctgtccttggttatgtcaaagcaatacggcatgtgcaaaggcgcacaggcccaaggcggagacttagacctcacagattgtgttgtatattaaattatgctggatggtcacgttggagactgcatgtggcagtcttgaaacgtgtggtttgacgtctaaccattatggcagtgggtggagtactgcaaagatgtcaccgtgctttacacggtttttgaaccccacaccggctgtttggcgcttgcaggacagtaggtttattttctttcaacttctcttttctagccgcacatgttctatgtgtgcgggcggagtgatactcccgctccttcttggacaggtgacctccacgccctttgtggatcttaaggttgccaagtcactggtgtttgaagtgaagattgaagaaacactagggagtttcatgtggctttgccagggattgtagcgatgctgtgtgtgtgtgcggatttcccctcgtggcgacacgagcctcacaggccaaaagccccgtccgaaaggacccacacagtggggttaccccaacccctccctacaaagttttgtgcaaacaagcttttgtttagtctctcttaagcttctttcacatcaggccccaaagatgtcctgaaggtaccccgtgtatctgaggatgagcaccatcgactacccgaacttgcgagcaaatttcgcagacgc

SEQ ID NO: 1482 - DNA, 1000 bp, unidentified
  source 1..1000: mol_type = unassigned DNA; note = unclassified Cosavirus sequence
ctcactcctgtacaccgtgagtccgcgcagtgctgacttaacacttaaataatgtttaggccgagaattacaccgctcggctcccacctttcaccatcgtgggattaacaggtgactagtttgtattcctgtccttggttttatcaaagcaatacggcatgtgtaacggcgcacaggcccaaggcggagatttagacctcacagattgtgttacaaatttagtcatgctggatggtcacgttggagactgcatgtggcagtcttgaaacgtgtggtttgacgtctaaccattatggcagtgggtggagtactgcaaagatgtcaccgtgctatacacggtttttgaaccccacaccggctgtttggcgcttgcaggacagtaggtttattttcttttaaatctcttttctagccgtgcaggatctgtctgcacgggcggagtgatactcccgctccttcttggacaggtgacctccacgttctttgtggacctcaaggttaccaagtcactggtgtttgaagtgaagactagagagacactagggagtttcatgtggctttgccagggattgtagcgatgctgtgtgtgtgtgcggatttcccctcgtggcaacacgagcctcacaggccaaaagccctgtccgaaaggacccacacagtggggtgaccccgacccctccctacaaagctttgtgcaaacaatcttttgtttagcttttcttaagcttctttcacatcaggccccaaagatgtcctgaaggtaccccgtgtatctgaggatgagcaccaccgactacccggacttgcgcacctaacgcagacacatgtggtaatccagccccctccttgaggggagggggctttgctcactcagcacaggatctgatcaggagatccatctctggtgctttacaccggagcatggatttaaaaattgcccaaggcctggcacacaacctaggggactaggttttcttttttatttttcaagtttgtcaat

SEQ ID NO: 1483 - DNA, 1000 bp, Enterovirus A
  source 1..1000: mol_type = genomic DNA
catgtcttgatcaagcacttctgtaaccccggactgagtatcaatagactgctcacgtggtcgaaagagaaaacgttcgttatccggctaactacttcgagaaacctagtagcaccactgaagctgcggagtgtttcgctcagcacttcccccgtgtagatcaggtcgatgagtcactgcttaccccacgggtgaccgtggcagtggctgcgttggcggcctgcctatggggcaacccataggacgctctaaagtggacatggtgtgaagagtctattgagctagttagtagtcctccggcccctgaatgcggctaatcctaactgcggagcgcatgcccccaaaccagagggtggtgcgtcgtaacgggtaactctgcagcggaaccgactactttgggtgtccgtgtttcttttattctcataatggctgcttatggtgacaattgaggaattgttaccatatagctattggattggccatccggtgtgcaacagagctattatctacttgtttgttggatacattccattgacacctaaatccttcaatacattgtactatattttaacgttgaacgcaagaaaatgggagctcaagtctcgacgcaaaaatccggcagtcatgagactggtaatgtagccactggaggatctacaataaacttcactaacatcaactattataaagattcttacgccgcgtcagctacccggcaagacttcacacaagatccgaagaaattcacacaaccagtgttagactctattagagaactatcagccctttgaactctccttctgtggaagcttgtggttatagtgatagggtcgcccagctcactgttgggaactcctccatcactacccaagaggctgcaaatattgtattagcttatggagagtggcctgagtactgccctgacacagacgcaactgccgtggataaaccaactcgtccggacgtgtctgtcaacaggttctacactctggactccaaa

SEQ ID NO: 1484 - DNA, 300 bp, unidentified
  source 1..300: mol_type = unassigned DNA; note = unclassified RNA viruses ShiM-2016 sequence
acccttggacgagacaactttccagatcattgttgtgacgctgctttttctcgcatttgttcttcaacttttttccatcgcgctctcatttgtgagccttcgagaagaacaagtgtggtctcccaaaccacgttgggatcgacgtcgtcacaaccaccatccttaaatggaaattgatgaacttgtgttaattgttttgaccctcaatacgattttatttttcttttttattgttgtcgttgttttgatttttggatttattttgtttaatttttgttttcgaaatcggtgtatacccta

SEQ ID NO: 1485 - DNA, 300 bp, unidentified
  source 1..300: mol_type = unassigned DNA; note = unclassified RNA viruses ShiM-2016 sequence
gtcatcggctttgccttcggacaaggcattataatatgtgtccctctgtgcggtgcctccgtacatctgcggaaaaccaaaaaggcaatgtttgtattggttaccatgttcatgttttttacgtatttatatatttacataggcttgcatacatttgtaaaatagtaaccggcgtacctctttcgcacgggaggtgcgactgtacatagaagtgcgtccaacacaacaatctacgatttagagccgactctaaaaacacaaaaagtcggcaccgtcacgttcgctcatgcggaccaacct

SEQ ID NO: 1486 - DNA, 300 bp, Scarabeuvirus lampyris
  source 1..300: mol_type = genomic DNA
tagtgaaaggcagcctgacatgataataagagttgttacgtacgagagatcttctccaattggacagctttcacagcgattcagattagagaacacaatctgtttgtctgcagagcatttcttccttttgaatatagaagacggtcctgtggccttggtgacccctttcttgaacttctatgcagagcgatttgttgcattcaacacctcgccttcgagtgtactcatttccttcgaccaatccatctacgccccatataatcctcatctccaggcaagacagatccaggcagtgtcaga

SEQ ID NO: 1487 - DNA, 301 bp, unidentified
  source 1..301: mol_type = unassigned DNA; note = unclassified RNA viruses ShiM-2016 sequence
atgatacattaagagtagtggataatttaactgcaaaggctagagaaggggcaaggacgaccaatgtcaactcaattggtggaagctgttagagcagcgtttttaaccctagacataagcttagatatatagtgtaggatataccgttaagataccagccttgtagagatgggattgttttaaaaccttaaaataatgaagatacaacagaattcgtatcaaagattcataccataaattgttattcaatcttttacgagtgattagtgcctgttagtattatctacatttgaatttgaaa

SEQ ID NO: 1488 - DNA, 301 bp, unidentified
  source 1..301: mol_type = unassigned DNA; note = unclassified Riboviria sequence
agctcatgtaccttttacctgtcactcttttacagttgcttcaggttttgttctctccgtcaacaactataactcagaagtgcgaagctgcagagttttaccagcgttataattttctttactatagtaggtgctcttattctgtaaaatattttatctgccccatttgtatccgaagatgttatttttgtgatttctttaatcaagtatttgactgctattggagatttttccagttttcagtttttagaaattttatctgtatagttctttttattcttattattttgtttccgtaata

SEQ ID NO: 1489 - DNA, 302 bp, unidentified
  source 1..302: mol_type = unassigned DNA; note = unclassified RNA viruses ShiM-2016 sequence
cctgtaaacccttgttacttcagtcttttcactgttataaccgtttactactcttggtattccataaataaagaaaatttaagtttcttgatttaacccaatttctaaaactattggttggtttgaatcaaatcttgcgttgttgacacgacactcttgctattaagtttaagagtccaagatcaataccgcgaactctctatactggtgaggaaccgtatagataaccgtcaagttgttgtagacttgcgttaactattttaactttgtttaaaatactgtagtttccagtctgaagcaaa

SEQ ID NO: 1490 - DNA, 302 bp, unidentified
  source 1..302: mol_type = unassigned DNA; note = unclassified dsRNA viruses sequence
atagaacacacttgtgcgcgactgccccccgaagggggcccataacatggaaaacaaaagcaaaagtaataacacaaataaaaacaatactaagctacctcatccagatcagaagggttatagattttacgaattatcagaagaagagaaaaagaagctgattagaccaaggattcaattagaagattatagtacaaaacagagggctagagaggttgaccgagtgacgaggtctcaaattccaaaagaggaaataatattatctgataaagtaaaagaggtacttgagaagtttcctatag

SEQ ID NO: 1491 - DNA, 303 bp, unidentified
  source 1..303: mol_type = unassigned DNA; note = unclassified Arlivirus sequence
gaagttcgttcccgtgtgtttaaggtttcagtttatgactgggtccgagactctcctgctaatggtttaactgaagattctggtcgtcttgagtggatatatgatactaataagtgtcttatcctggctcaaggtgacggctggtacgttagacctttagtccaatctgatataattaatttactatctggtgagggcgatttagtaggagacactctatatggaggtagcacatgggaagagaaccatatcttgaaagtccctagttctgttcataaatttactccgtcttgggtttatact

SEQ ID NO: 1492 - DNA, 303 bp, unidentified
  source 1..303: mol_type = unassigned DNA; note = unclassified RNA viruses ShiM-2016 sequence
aaaagcgacgcaaaccgccaacagcgaaagcacaaaaagaagacaaacgaaacgagaccatcaaggagttgcgaggataataagttcgagaagtgcaaatataatttagtatttgagttaattacaaaagattaatcaaaacaatatatctaaattagaataattgatcgcacttgggataaaagatatctatatatttgaaattctagtagtttttagatttataggtagtagaataaggcaaaataatcctctttacagataagcaagagatctttctgatctagtttcacagatacaatt

SEQ ID NO: 1493 - DNA, 303 bp, unidentified
  source 1..303: mol_type = unassigned DNA; note = unclassified RNA viruses ShiM-2016 sequence
attggcatcgaccgcaatgtcattaaactacgaccggggcaggttaccacgtgcagatcgacaataatctggctaaaagtgatgcacggaggcgccccaaacgacacagttgggtatttacccttacttccaggatgctgttgtggcagccccacgaaaatccaggagaccagatcgacgccgcccagttaagctgctgtggcaactaggctttatgtttagggcgtttaaatgagttagcttgcaacaaataacatcaaacttgcaactctcgaggaagagtttacacatgacgcgactacc

SEQ ID NO: 1494 - DNA, 304 bp, unidentified
  source 1..304: mol_type = unassigned DNA; note = unclassified ssRNA positive-strand viruses sequence
cagagattattattgtttatctctgtgcttccgtcaaatacttattgcttatacttatattttattgaatatttcgaccgagtttacgttggacccaggtgagtcgtaatacgtttactcgtcaagccattttacaagattgatccgcgcgattgggattcaagtctagtcaaacccatttatacatcttctatagcgcgtgacgctttcggtttgtggaaggatattagcgaggcatttgttttagcagtctacctatttgttggagttgttgtgagatctatagacagtgtcatttccaaga

SEQ ID NO: 1495 - DNA, 305 bp, unidentified
  source 1..305: mol_type = unassigned DNA; note = unclassified RNA viruses ShiM-2016 sequence
gttacgtcccgcgtttggcttttgcccgtgctttgataaagagcatttcggacttttcggcgagttttcttcgttagtcgaaggaaatttttgacaacaaatttgttgttttatctcgacacttatcgtggtgtagagatctattaattatttgatacaaatatttgtattagataattttatatatataaatatatataatttagttgtattcttttgctttgtttaatagtagcatttaacctacgctttttcttgctttcatttgttacttgttaatcttcttgagagtttgattttttgct

SEQ ID NO: 1496 - DNA, 305 bp, unidentified
  source 1..305: mol_type = unassigned DNA; note = unclassified RNA viruses ShiM-2016 sequence
ttggctttgactagcttaggctttcctggatgagcctttaatcatctaggtctttttgtgctttatatatttatgggttataaaacttctttttctttagccttttcctgtaaggaaggccctttatataaagtacggttctgcgtgtgagcgtgtggggaggtatttacttccgtcctttggcattacttacgttaagtcgggtatttgtcataaaattttaggaaatcgttcctggagggtctagtatgagcagctagcctcctatggtttaaatatagctttcttttaattatactaatttt

SEQ ID NO: 1497 - DNA, 305 bp, unidentified
  source 1..305: mol_type = unassigned DNA; note = unclassified RNA viruses ShiM-2016 sequence
gtgatcacatcaccattggcttgcgggaggatcgctatccgctagcttcttaagaaagcgaagactatttggtacagtagtcgattgaccattatctcttcatgtactacggtttgtcgccgtgccccaagacacgaaacagttggattaatctgtccactgtgggtgtaatttattactagtagatttctaaacaatacaatgaagagcattggggaacgcggtataattcccccgcggtttggtatcccgcgacaccagaattaccctccacttccgtgcacatcgtgccagcgcgaacggaa

SEQ ID NO: 1498 - DNA, 305 bp, unidentified
  source 1..305: mol_type = unassigned DNA; note = unclassified Picornavirales sequence
tagaatacgctggaacatggtctccagatgctggcagtcatctgggtgaacctaggaaataccgactgcctatagctgccacccatcttccaatacctatcaacccgagggagtatcacattcatttaccggacaaacttttcttcgaactcaccgttccaagtagtttgaggcgccggccgaaggatgttgagaaactccggcggtattgggggaccgtaccatcatggtggcctatatctaacacgacagactgcgcatggcccatctatgtgcactacaactcaatcaaatcttgtggccat

SEQ ID NO: 1499 - DNA, 306 bp, unidentified
  source 1..306: mol_type = unassigned DNA; note = unclassified Riboviria sequence
aacttaatagttttctttagtacattcattataattctagtttttattataatttattattatatatatttttaggatttagtgtagatacagagttataatgcattttttataaaattttttaattgcagctactgaacattttttcctattttcaatttttaaaaattttcgtttaatgattgttagaattgtagtaactaacttaaacgtaaaacaaatgctacagcaaccaatcaatcaataacacaatcaaattcagttttttataataataagagcacggcagttagagactcaggctca

SEQ ID NO: 1500 - DNA, 306 bp, unidentified
  source 1..306: mol_type = unassigned DNA; note = Helminthosporium victoriae virus 145S
attcgcatcgacctcacgtaaaagacgtagagacttcgagatccttcgagtgacgccgaagagaaaatacgcgttattgttttaaaaagtgctcctcatattgagacgaagccgctgtcgctatcacgaccacagcataatcatcttcgtgagacccctcgccagtatctccgaggttaatcctttgattcagcgctcgcgcgtgccacccaccgcttaataagaacgttctgggtttgtcagttttgaccctcacgtggcaccacttaattgacatcaaattaaagtttcgtcatcttctaaaag

SEQ ID NO: 1501 - DNA, 307 bp, unidentified
  source 1..307: mol_type = unassigned DNA; note = unclassified Pneumoviridae sequence
cgataaaaacagaaaatccgatagcacgacaacagatagttggccaattgtttaaaacaagattgagatcacttaataataaataatttaaatcaaaattaagttggtgtcttggctggctggtccagaacaagttgtcgagccgtctgatgagtagcacctcagggtcacgaaacgctggacgtaacggcggaacagattattgaggttagtagaacattatcacaaacaaaacaacaacaacacaatcacacaacaacgaacaaacaacaatccaagacaagcactagaggttagcacatgcaag

SEQ ID NO: 1502 - DNA, 307 bp, unidentified
  source 1..307: mol_type = unassigned DNA; note = unclassified Pneumoviridae sequence
caaatatccttgtagtataaattccatactaataacaagtagttgtagagttactatgtataatcaaaagaacacactatatttcaatcaaaacaaccaaaataaccatatatactcaccgaatcaaccattcaatgaaatccattggacctctcaagacttgattgatgcaattcaaaattttctacaacatctaggtattactgatgatatatacacaatatatatattagtgtcataacactcaatcctaatgcttaccacatcatcaaactattaactcaaacaattcaagccatgggacaaa

SEQ ID NO: 1503 - DNA, 307 bp, unidentified
  source 1..307: mol_type = unassigned DNA; note = unclassified Flaviviridae sequence
ctttcaccccttgtggaccctagtgattactgagtacttctacttagaatcctgtctcacagtttttggtgttttctaaataagcataattaagttgcttggttttgttatatttctattgttgtaacatagccttttcgcgttgtctttacgtcccacttctcattagagtaaagtgtccaaagagataccgcgtttttgttttgagcgttgagagaatccgctcataacaggcaccagtcgttgtagactagtgtatctgcacaaatttttattttatttttattttaactatttgtgtaccacc

SEQ ID NO: 1504 - DNA, 307 bp, unidentified
  source 1..307: mol_type = unassigned DNA; note = unclassified Picornavirales sequence
tccccccacccacggcattggaatggggccttctttctatggaggaaagtgtgaaggcagcaaatcctgaatccaatgctaagagacgagggttatttagcccgtttatgccatggcgcgtctttaaataaaagctcggcatacctccagtcttcccttaggaataagtgtaccttaggtcgactataaaacaaccacacttgctaacaatgatacaacaaccccccaaactgcatctggttttaccacaaaggaggatttatcctctcgaggacgtcttgatactattcaagacgtttcctcctct

SEQ ID NO: 1505 - DNA, 307 bp, unidentified
  source 1..307: mol_type = unassigned DNA; note = unclassified RNA viruses ShiM-2016 sequence
cacgggtgcaccgttaagcacttcaccatgggcatggtaaggttgaatgcccccactcggaaggtggttaacaccgctgaggaccagcgacaccaattccccgctctggactgagccgctcggcgcgatcgttaagagacagcaccaggctagcgtctgccatcaacatagacgtgggaagcatatcccttggaagcgattgcatctgagaacagcccgtaaacttcagcggtaagtgggtcggtcgcctgatcgtgatggccccaggtgcgtgggttaacgcaccatctccccccactaatacact

SEQ ID NO: 1506 - DNA, 308 bp, unidentified
  source 1..308: mol_type = unassigned DNA; note = unclassified viruses sequence
cataaattcattataaaaaccaagtcgtgcaatcaatttgtacgatcataccaggtacagtttcaatagctgtactcagcaatctgctataaatcaattttataacaacatcacgtgcttacggtcaattcgtaagcataataatcagttctaaataattgtttagaaccatcacgccgatacaagaactttgtatccccataacttgaacgctgtcaatcaacgctcaaaatatccacctacagacacttctgtaagtctcgcgcaatttttcaatattttgaaaaactattccccgtttacccgca

SEQ ID NO: 1507 - DNA, 308 bp, unidentified
  source 1..308: mol_type = unassigned DNA; note = unclassified Ourmiavirus sequence
gccgcaaagtcaagactttacgtcacgacatccgtaaggatgtctggccgaaagggtttccccgaattttagatctttcgatcgataggactgctgctcgaatgagtgtgccgtcttttctatcattgattagtaatttttggacccttaggcccggtattaaatattatgtgcccgcagttgtggtctgcgttacctttctccacactagggatagcatctattcagccatcgcgtacatacctgaatcaaaacaaagtgatagcgcgcctggcccccgttacgggccatcgtaaaacccctcgaac

SEQ ID NO: 1508 - DNA, 308 bp, unidentified
  source 1..308: mol_type = unassigned DNA; note = unclassified Picornavirales sequence
tcttgtaaatatatataaattcctagttctaaaatatttattatgctatttgtgtattgtcctttattatttaatattaccgcccaagatgggacgaggcagcccctcaatatctagggcacctaggtgcagattgtctgttttagtggacaacaatctaaagaaactcactagcttcaaataacaatttaaccgaaaccaaaacaaaagacacaacctatcaagctagacttgacgaacacactgaagcaggagatattaatcctgggatcgagtaccaacgacaaattgtcactttttcagaagat

SEQ ID NO: 1509 - DNA, 308 bp, unidentified
  source 1..308: mol_type = unassigned DNA; note = unclassified Picornavirales sequence
aataaacaaatagacatactgtaagtggattgggttataatcgagtaattggcgcttgagccacagcccttacagtaatccacaaaagccaattagagctgatttgattgtataagcttgtaaattcaacaatcgcaaaacaattagataatattgaaaatttaatagatgaagaattgaatctatcatgcggaattaaagaagaatctcaattagatgatgtagtgacagatatatccaggtccataagaccttatctaccatgggaatgtggattaatattagctttagtaccacccttagtaggg

SEQ ID NO: 1510 - DNA, 308 bp, unidentified
  source 1..308: mol_type = unassigned DNA; note = unclassified RNA viruses ShiM-2016 sequence
ccttatggctttatttgtggtggtgtgaggagaccacgttgtgacacaacaaatagcctcgttgccctggtattacgagcgtcggtaaggttagcatcttgctgccagggatcggtaggtgcatatacgtcaagtgatgtgtgtacctttaatagggggcggcataaggccgccactgtagcacgcgtagcgcggtctaacgaaccgttgttggaggggcgtgttaccaccggcttgccggatggctggtcattctccaggtgttcccctccactccatgacaggaacccctaacactactacttcca

SEQ ID NO: 1511 - DNA, 309 bp, unidentified
  source 1..309: mol_type = unassigned DNA; note = unclassified Hypovirus sequence
gggtgtagagaacctctgcgaggttcaatcataatggacatttgtgatgtacttacgtctctaggacgcccattactggtttatactctgtcgagttatcagtgattgtgcttgttctacgtatggaagctacagtttcattcgtaaagctcctacccctgattggttaagaacctgattacactaatgtgtaggccaacccgctggccctagcggtttcattcaattcttgttgggtgttctgtgaacttgaatcggtgagatgggcccgtgtgccccgtctggcctggactttaactagtgcctgag

SEQ ID NO: 1512 - DNA, 309 bp, unidentified
  source 1..309: mol_type = unassigned DNA; note = unclassified Hypovirus sequence
agacgatttcggtcttacgcccactaggggcgcccaatactggtttatactctgtcgagttgtttgagctggcttgcggacattcaaaggaacgtctcgagctattgggtagcagcaaacgtgatacatgggaagcgctgttgatccgtcggggaggctgtctagcgcgtttggcttggccagctgaggtcagtagggctatgaaacccaagggtggcgatcccacccaatcagcctaggaatccacaccaggataggtgcacggcttaacaaccgaggcacgtggaaatttggccagactatgagtgt

SEQ ID NO: 1513 - DNA, 309 bp, unidentified
  source 1..309: mol_type = unassigned DNA; note = unclassified RNA viruses ShiM-2016 sequence
accaatatggttgagtccctggttctctacccatctaactgtcatggaccgttgaaggctggcaaccggaggtgacgcagatttggggtgtttcggactctgtgtattatcttaccgtccggggttttattccctgggaaccgcataattgatattgatgttagacggcagcgaggaagtgatactcagaggaaacgaatctcatcgaaccatcgaggagtccgacgagcagcaggcaggcttgcgactgggattcagcgatggaacgaaaataatggtggagcgtcggcggcagatgatctggccctc

SEQ ID NO: 1514 - DNA, 310 bp, unidentified
  source 1..310: mol_type = unassigned DNA; note = unclassified Riboviria sequence
gaactcgtccgacacaggaaaacgcgctctaaagcgcctaaaacatacagattacataatttcagagtatgatgaggtagttctcaataagtactttgaacccaacctagtgatatcgagactcctcaaggaatcctcccacaccatagcagctgttctactcgaacaggcaaatattgcttgcaacagccttcgcggcccaaggactattgaaataggacctgatgcaagaatacaagacacacacaagtgcgccgggctaatatgggcctgtagtgacggtaaggaccaaaagcgaattatcgagcac

SEQ ID NO: 1515 - DNA, 310 bp, unidentified
  source 1..310: mol_type = unassigned DNA; note = unclassified Fusariviridae sequence
tatttaagttattaattgagctggatcattttgtcggagatttgatggatctccctggctgtcctggccagtcttggatgtgctaagttgtgggtagtttccctaggtttcatgcctgcactctttcggaaaattccgaggtggattaaggtgcatctggctgaaaatagttttaaatcactcgtctccatcgcgttttgttcatttaaatcatgcttggtatcaagcctgatagtgccttaaagaccctgatgagccctggcacgaaacgcacttttgtgcgttggttgattttagttgttttgttagt

SEQ ID NO: 1516 - DNA, 310 bp, unidentified
  source 1..310: mol_type = unassigned DNA; note = unclassified Fusariviridae sequence
ggggtttcgttgcagccttaagtgtgtttcacttgtagactggccagtacggctggcggccctttgtggggcgccttttgtgcaatgcttcgatcccgtacaacaatctggcatttcgccgggcctggcagggcttctcggactttttaatcacgcatgctttctctggctttctcggcgcgtgttttctcggactgtggctaaaattcattaaaatccaaaaacaatgccactacctcaatctcctacttgaccctgatgagcaaggagcgaaacacgactgccatcgtgttggttatgaagttttaaa

SEQ ID NO: 1517 - DNA, 311 bp, unidentified
  source 1..311: mol_type = unassigned DNA; note = unclassified Bunyavirales sequence
ctccacttggtggattgcgacaatcgggctgccactctcattgtagatttgaatgacaggaccccgatggttgcgaccccagtggagtcggaagtggattttggctaattgggtgttgtcgattatggcactcacgtcggcatggcgctgcatgggtgcggtactatggtttgtggacttggcagcaatattgtaatataattgtttcattacctatagtgtgtgtgctgggactggcgtaatacgtaacaactagtcccaaaaaccaaaaaactctttaacaaggattgtcctttgttttcaactgaacg

SEQ ID NO: 1518 - DNA, 311 bp, unidentified
  source 1..311: mol_type = unassigned DNA; note = unclassified Bunyavirales sequence
aagggaagccctcctaggggcagggagtaaaacagccacccgtcgtgcggtctgcaaaagtctgacgctttgtgtgtatcagggtaaacccaccggaaggtggtgctggttttgaccaaaggcctgaatggtaacacattgccccagacagaactcactgtaatgcgtggtaagtccgtcgtactagtgggggggctctgcctcacttaatacaacagccggaatgagcacaccgagtcaaatctgggtgtatggttccgaaccgtctaaccgtaggttccaggtaactggaggcgtcggccgttggaggc

SEQ ID NO: 1519 - DNA, 311 bp, unidentified
  source 1..311: mol_type = unassigned DNA; note = unclassified Hepacivirus sequence
atatatatatgtataataaataaacaataaataaacaaataaaaaagaaacaacggtcttgggaagactaattaaaagcatccctctaggcgtaacctaccatgtctataataaataaccaaaaggaggctctttgtattggattaccgtgcgtgtccaactagttagtcataggacactgcataggcttgcaaagagaggcactttccccgtaaagtacccctattcaggggagtaatcgccatacagaagattaacacacgcattgtagaataagtcttctactttagcgttcataatgacttactagt

SEQ ID NO: 1520 - DNA, 311 bp, unidentified
  source 1..311: mol_type = unassigned DNA; note = unclassified Picornavirales sequence
tcatattaacaagggtttttgggactaccctgcagatgcttttcctgcaattctgtcccaacgctagattgctaacgatttgccgatatcgtcgaagatctttctagcgtcgcgtgatttatattacatatatattgcccattcgtttctggggctaatgtataccggtgtagcgagccatggctgcttggttaaagtgacccgtctgtgtgtataggcataaccacagatgtattttgtctgcgaacaacaatcaaagtaatacacatggtctattgaccgaattcattgatggagcacatggcaccaca

SEQ ID NO: 1521 - DNA, 311 bp, unidentified
  source 1..311: mol_type = unassigned DNA; note = unclassified RNA viruses ShiM-2016 sequence
actggggcaaaccaaacgttttatcccctgatgaagagtggacatatgaagattttagacaaagtatactacattacggagataaggtagcgagtggggaagaaaaagtctcatgcgaatgcgacggaagaataggatgggaaagggacctaactgaatttaaccaaaacttgaagcggttccatctaccagaagtgcacaagagatgtgcagggtgttacttgaataaaggcgcattagaagatgggctacacttactgttatacttagtgccgaaacaacagcaacacataattatagaacagtacaac

SEQ ID NO: 1522 - DNA, 311 bp, unidentified
  source 1..311: mol_type = unassigned DNA; note = unclassified RNA viruses ShiM-2016 sequence
tgaacccacttgggattagggcggagctaccgtcaacataaagccgcagacggccctgcgataacaaacagcaattgggttgatgtacatagaggaccaaaactgtgaaccctccggggggacgcaaaatttcagtgctaaacaaaacgccaagagactgcacggctccgcgttcctctatcgttagagacaaacgtatacatcgatgtacagtccccgtttgtggttcgggggtccaagaccaaccactactttcttcaccatttccgatttaactcttaatttctacaacgccactgtcattatccgtt

SEQ ID NO: 1523 - DNA, 312 bp, unidentified
  source 1..312: mol_type = unassigned DNA; note = unclassified RNA viruses ShiM-2016 sequence
ggaatttgttcccatgtcttcaaggttaggccatataagtgggtattagaatcgccactattggccatctcagatgaaacaagtcagctagaatgggcatatgatactgaaagtaacataactcgtgttctagctgacgggtggaacttgagacctttagctcattcagattggttgtcactttataataagactggttctttaattagtgataatgtgtcgggagcgtcgacatgggaagagaagtatccttcagaacctcctaataatttacatccatttgttccaaagtgggtgtattcattgaagctc

SEQ ID NO: 1524 - DNA, 312 bp, unidentified
  source 1..312: mol_type = unassigned DNA; note = unclassified dsRNA viruses sequence
ccaaccgtttaaaaatccaacgtaaagttctttatataagaacttaacgttccggttgacggcaggatcaaacctcagtaaccaatgaacctgagttaggaactacgggagctgggcgcagctggcggcggatcaaacctggaacccccagttaggaacgaccgagagggcgaggatttttaaacggttggtgtcgttattcacccttgatggaatacaagtaaaaatattaacccttaatgttagcaagtaagttagtttttaagtttgtgtttgtccccttaggttaagtttgtaagaacgtatggcacg

SEQ ID NO: 1525 - DNA, 312 bp, unidentified
  source 1..312: mol_type = unassigned DNA; note = unclassified Polycipiviridae sequence
gaattagaccaacggggagtaggtgagttcctctcctctactagagactgatatagcccttaggtttcatcgctttgatctcagtgtgcccaaattaatagtaaccctcacatcaaaggggaaaatctgccccatctattttatcgttaacattcgcgtgtctacagaccctatactatatctatttttttagcttacattttaatccttgtgtgatttaaagagagaggtgatagaactatgagcccctcttgatttagaaaaaaccaaccatagaagacaaatataaactgcgctcacctatttcataaa

SEQ ID NO: 1526 - DNA, 312 bp, unidentified
  source 1..312: mol_type = unassigned DNA; note = unclassified Riboviria sequence
gttacccctacgtattttgtttaacattaatgaaattgaagtgtctccgcgactttcaattttattcaaccaatgcaagttatcaacgaaagttagttagaaagacataatacacaatttagatgtattggcgcttagtcaccgcattagtgttctgtcggaatttagacactaattattatattaattccattagagcgcatgattttgtcatgtcctttatccacccgcagaattggatatgcgaggtgaggtggtttaaacactcgtccgcgatttgaaacgccagcgaagtttttccacaattaaacc

SEQ ID NO: 1527 - DNA, 313 bp, unidentified
  source 1..313: mol_type = unassigned DNA; note = unclassified RNA viruses ShiM-2016 sequence
cgaggagttatggaagtctcgtaatttaagtgaactcgaattgttcgagggtcttgaagagcctgagattaagccaattaaactcgtagaagaaaaacaagagaagaaggcttctgtattattcacttgtaatcgcgagaaacgtgttgataagatattgtctggtcatactgaactcgagataactaaatctggttatcttagatctccagaagaggtatgcggaattattaggaaaaagatcgagagcagaaagaagaaaaaggccgatcttagaagagagcgtgaaaatagatccaaagagaggggtctt

SEQ ID NO: 1528 - DNA, 314 bp, unidentified
  source 1..314: mol_type = unassigned DNA; note = unclassified Picornavirales sequence
tacaaaaacagattctgaaactttgtcccaagctgagcccattggaactagctgaatttccacttcagtacgtgggtaagcaacggacgaggtatcagactgccgtcgagagcttgagtgtcaagagcttgagacgcgccgatgcgtacaccagcaattttacgaaaactgaacgtacgctcaaggccaatgcagtacctagaaacatctctccgagaagttataggtacaacgcccaggtaggacggttgttaaaaccggcagaaggtgtcctacttgatggcattgcgaaagtcttaaacagcaagaccgtg

SEQ ID NO: 1529 - DNA, 314 bp, unidentified
  source 1..314: mol_type = unassigned DNA; note = unclassified Tombusviridae sequence
tcagctatgtgatacattttgcggtttgtatcgcatagaaccgcggctaagagtttcggaggtccccgtgaccttactatatttatagtaggaattagatgattccacaaaaccccaaaaatgagtggtttatagcattaacccacttcattcaattatagtatgctcctgacaataataataataataataaagggattaacattggccctcctaataccaatgtaaatagtcgtgttcttaagaactcgtctacctgtttgaagcaggaaacactggcgtttcatgatggatcgtcagaatggaggaattct

SEQ ID NO: 1530 - DNA, 314 bp, unidentified
  source 1..314: mol_type = unassigned DNA; note = unclassified Picornavirales sequence
cgagggtttatcactaggtaggataggagccgcacctatcttttcagggaacccaccctgttagccactgttaccagcgaccttcggaaagtcgtgttggatggtggaagggacaagcggattataaacgcctagccgttagccagcattgctgggtaggaacgcaaactgctttgcagtaggaggtgtgtagacaccactcgaggacagcgacggaggggctgtccacggcccacgaccgacgggcgcacaagaatcggctttggtgtccctccctaatatgaggtgacaaatttctcccatcttctctcact

SEQ ID NO: 1531 - DNA, 315 bp, unidentified
  source 1..315: mol_type = unassigned DNA; note = unclassified RNA viruses ShiM-2016 sequence
tcagttttgtttggttgtatctcgcgggagttaatccgtaagagaataaccaaacaaaactgactttcctcttctttgctttcccgtctttatctttcacgttctcttgctgctttgcgattgcttgttcttttaggacccccgatcgctttcctttcttaaggctttcttttcgttacgtgcttctaggttttctttatcgtttcgccttgtttttcttttccttgctttttatctatttctgcgtttttctctttttacgttctgcttttattttattttaaagggcttttcccacttgcttcatgctttacc

SEQ ID NO: 1532 - DNA, 315 bp, Alphamesonivirus 4
  source 1..315: mol_type = genomic DNA
aagtaataaccccgtccgtctagcttagacgaaaaacttagcttggaaatctagccacaacagttgctataagaatctctcgagacactctcccacttaacatcttctaggaatcttgctgctacaacaatttggctagtaaacgaaaaattcatacagttgtaagagacctttggtccgtacttttgaaattttgtttctaatatatataaatttgaaaggagggggtcttagcattgtctaagcactgcctacaaccctagcgaatacatatacattagtatgaatttgttgtaatcgtcctgataagacaca

SEQ ID NO: 1533 - DNA, 315 bp, unidentified
  source 1..315: mol_type = unassigned DNA; note = unclassified Picornavirales sequence
cttagaatgtttcttaaaaccttgccaagcctgaggattttaccatatcgatttcgatcgctgtgataatcttctcactttccccccaccctcccatattgtaattgaagcggggagttttgattgcaattgtatagtcattcctatttaggatacggttggactttaactaatcctccccccagcctattagtctgtaatgcgaacgctaaattggctgtgtaaatttcttgcattaacaatccactacacaaacaaaatgtttctgagggtcctcaaacgaccagcccccaggatatacattcaccagacaaa

SEQ ID NO: 1534 - DNA, 315 bp, unidentified
  source 1..315: mol_type = unassigned DNA; note = unclassified Picornavirales sequence
gtgacaaggtggatggcatgccaccacctatgccccctgagtaaagcaattctatgaccttagactgatcttgattcaaccgtaattgtctaatccaagttaaataaccccaacgtttcgtcgacggatgtggagaaactttgaaatacaactaaactcgtcgctcttgctattttgtagcacaagagagtctagcctctggttgattatatttcaagactgcttgttgtggagaagttaagccattgggaatgggacacgtttgcgttatccctggatattgccgccctttggtgaagctcatgcttgggatgc

SEQ ID NO: 1535 - DNA, 315 bp, unidentified
  source 1..315: mol_type = unassigned DNA; note = unclassified RNA viruses ShiM-2016 sequence
aaatattagccaactgaacaaaacttagaactatactataacctacaactaatcctataacttactttaattttatttcttttcttttgtttgttttgttgactttgctaatatttattgtgtgctttcttttatcccaataaccctcagcggggctctgccttaattaagtttcatgtaacttgttttatccttttgtggtgttagttttaggatcgttttattgtagtattatttttatattcattgtttcttttgtatgttcttgtggtgtttgggttctctgtgttttataggattatctactatgtaatt

SEQ ID NO: 1536 - DNA, 315 bp, unidentified
  source 1..315: mol_type = unassigned DNA; note = unclassified RNA viruses ShiM-2016 sequence
actaaggtacgggcttacaccataaagtccgttaaaccaaaatgtggtccttgtacatagttactgttacttatttatgaatcctacaattaaaaagtaggtagagcgtggatgtacattgtaatcttacctgagcgctcctcgaaatccctatttagggatacatttttggttagagtgtaaacaattttgtaggtagttctaggaattttgagtcgtatcctagaattaacatagagacttagtgtaaataatagttttgaaagcgacgccagcgctaaaaatactggaactgtttttgatggttcagcccac

SEQ ID NO: 1537 - DNA, 316 bp, unidentified
  source 1..316: mol_type = unassigned DNA; note = unclassified viruses sequence
ggcgcacaaacgtacaccacgacggatattcgctcttccgagcgatatctggagtgcttgcggttttgcgccagcccgtagtccggattcccctgcgaaagcaggtgcttccaaaccacatcggcgcaaccgtgccaggtcggtgcgtcaaactattcgtttgaccccggcggcactctgttgtgtcctccctcttccccactggcgagctaagctgctaaacgcaatcgatgacgcagatgcgggcgagaaagctaagaaacgtacgaaagtactgtattcgaagccaactcgcgtcaaatctgcgccaacctgt

SEQ ID NO: 1538 - DNA, 316 bp, unidentified
  source 1..316: mol_type = unassigned DNA; note = unclassified Picobirnavirus sequence
gaagaaaggagaagcactatggagtgtttactaaaacatctgaaaagcctttcttcaaccacttcaaagttgcctttggagtatgttggagtagaggtagagaggaggtggaaatgtgaccaccaatcaaattgagtacaataagttactcgaaactcgcagaactaatttagctaatgaagctgaaactgcgaggtcaaacagggcgcgggaagccgaaaccactcgcgcaaatcttgcttctgaagccatacgagcccatcagaatgcgattggagaagccgcaaatgttattaattccaatcactatgcaaga

SEQ ID NO: 1539 - DNA, 316 bp, unidentified
  source 1..316: mol_type = unassigned DNA; note = unclassified Luteovirus sequence
atatttgcaaatcacggttttgtttcacggcaaaacccaaaacataagtaagatgggcctaactagccctgtggagaggctaccccttgaataagggtagtggttgcacgtcttggcccgacagattccggccgaccatgcttctgtggtatacactgcaccagtaagacctggtttaacaaaactttatcctacccacgatgagatgagtgggcggcgtaaactttgtggaattttacagagaaatctgtaattctgcacatgtttgcgagaggggtctccagtacccctttatagaaataagcgcttctttggg

SEQ ID NO: 1540 - DNA, 316 bp, unidentified
  source 1..316: mol_type = unassigned DNA; note = unclassified Triatovirus sequence
ttttcttggcgtaattaaaaccaacaatgtgatcttgcttgcggaggcaaaaatttgcacagtataaaatctgcaagtagtgctattgttggaatcaccgtacctatttaggtttacgctccaagatcggtggatagcagccctatcaatatctaggagaactgtgctatgtttagaagattaggtagtctctaaacagaacaatttacctgctgaacaaattaatgaaaattatgaaaataaacaacaacttgttgaacagactgaaattaccacctttgaaaacgatttgatcgtgcttgaggatggaccgcaa

SEQ ID NO: 1541 - DNA, 317 bp, unidentified
  source 1..317: mol_type = unassigned DNA; note = unclassified Hypovirus sequence
ggggtgatgggaaacttacgtttcgccaacgttaaggtactgtgattttgtacttacgactcagggtcgaccttaactggtttatactctgtcgagtttgggcaaatagctagactatctccccgggttttcaggagcccttagtgtctggctgacacggtctggaatctctttttacgtctcacttacggcaaatgtgaaatcgcctactgatttagtagaagaatgccggcccgtgtgcccgcattggcaaccgtgatgcccggttttccacttttgggatagggcttccctccgaaaacgggacgaaccaaaat

SEQ ID NO: 1542 - DNA, 317 bp, unidentified
  source 1..317: mol_type = unassigned DNA; note = unclassified RNA viruses ShiM-2016 sequence
gtgggtgttgtcctgaccccatctgcccctacaacgcgccaacattactgtatgacatcaacaggaccaaaataaatgactatgttacgcgcgagggaaaaacacggctaccgacccaagcatatcgacctgacaaaccacctgctggattggaagtgaatcttttcttaaaaaatacaacccagtacaaaccctcttattgggatagtagggcctatgaaaaggcatgggaaaagttcacttacgccaatcctacagagctaacgcatgaagacatcgaatttgcaaagctcattctagctgatgagtatgactac

SEQ ID NO: 1543 - DNA, 319 bp, unidentified
  source 1..319: mol_type = unassigned DNA; note = unclassified Permutotetraviridae sequence
agccttaaggttgaacgggtactcctacatttaagcatgttttaatttacatgggcgggtttggaaccgtcgcagtaataatagacatgggtggatttgaaaccatcgtagtctcttgcttatctaagtagatacaggattgtggtctgtaccctagaggaatgccaccatgcggtaaaaccctactccgtgccccctgcacgaaaccaggatctgaggtctggttgggtgaggaactccaaagtgggaagtccagtagaggggatcattgcctctacatttttcagaagaaacaactcacaacaatacacatactaag

SEQ ID NO: 1544 - DNA, 319 bp, unidentified
  source 1..319: mol_type = unassigned DNA; note = unclassified RNA viruses ShiM-2016 sequence
aactacgagggccgggtaagtgtcctcaacataggttaacaatggaaaagtttcctctataaataacgaatttccactgtggcattggttaccattcgagttcatcgctgtgtgtggaatgcgaagaggcttgtcactttatgaaccgatttttattggtagcgcagttgtatgtgagtaatgtggaaacatatataaaaattataacattgcagaaacaccaaatttaaatataaagcccacaagcgaggaagggctagttcctcgcaacctgtcagcgcccgaaaggacgttcgatattccaactctaattgacgat

SEQ ID NO: 1545 - DNA, 319 bp, unidentified
  source 1..319: mol_type = unassigned DNA; note = unclassified RNA viruses ShiM-2016 sequence
tttgtcaattcatggggagttggggtcgagaattgattaaaataaagtcgtcccgacaccatgggaataaaaattatatatttaagcagatgcctatagagctatgcacaaaaacaccgagcctgtgaccattggcgatatatctgtggcgtcaccaccgccacaacaaaaacacgtcccgtgaccatgggaataaaaatttatattggtcggtatatccaaataccagcgtgatgtttcatgttcatgtatgttgggtgcggcacccggtggttggaggaatggaggaggttggttaacataattcccctatctgaca

SEQ ID NO: 1546 - DNA, 320 bp, unidentified
  source 1..320: mol_type = unassigned DNA; note = unclassified dsRNA viruses sequence
gttggaaaatagcccacaccccccccgccgggcgggctatttttccccggggcggcgggactagatggttgctagggccccgggcggtggtggtcgacgaccttgtggggtcgtcgacgttttcatttgtcttcatccatgcctgttctgatttccttccgttcgatttgttgttttctacagtcagcacctgttccttgctgactcgcctctcccatgggcgagttgtataaatacatgggacgtgagagaaccgtgctggatacctcacgtacacccaaagtcggtacggggatcgtaaccattacgctttttcctta

SEQ ID NO: 1547 - DNA, 320 bp, unidentified
  source 1..320: mol_type = unassigned DNA; note = Fulton virus isolate CHABV1/NYC/2014/M026/0243 segment L1 sequence
agtagttaacaaacgcttcacaacaatcatcgattacttgctctctcaatatattgcaaaactgaaaaaataatatttctcagcaacctatttcaacgaatttgaaataactaataataaaaagcaagccaaagcaaagaaatctaaataattcacttctaaagcaaaggaacaaaagaaaagaaaagaaaacaaataaaggaagagaaacaaaacaagataaagtagataaacaggtagaaaaacagaacaaagaggcagaaagaggagagtaaaggctcttgtagagcattaccgcattaataaggcccacaaccaaa

SEQ ID NO: 1548 - DNA, 320 bp, unidentified
  source 1..320: mol_type = unassigned DNA; note = unclassified Anphevirus sequence
tacttcttttctttatttgctttttattcatactcatatatcatcgtattcaccatgcatgatgtggtgttgattagtgataggtccaatatcaatttgagaaataaggcggagatataaatatgaaaaatggaaataaaaaacataaaatgaaaaatgaataactccaaaataaaaatttatagatataagtttccaatcatgaggtatttaggcctcgctaacctcactattaagaagatttctaacctatttttaaaaacccactagtagcagattcaagtacccttctgtcaaacatcttgaaaagattattcgat

SEQ ID NO: 1549 - DNA, 320 bp, unidentified
  source 1..320: mol_type = unassigned DNA; note = unclassified RNA viruses ShiM-2016 sequence
gtcagcttctcgaaagcccgccctgggggcttctaataccgggggccaccgcaactatgcgttggataagctaaaaatagttgcttgtgtttgattaacgcacaggttgtaggttctgaattacctgcaatttgtggacagctacacaagtagtcattgtatatagtcgttatttagcgacggggtgacgcccacaaaaatagcactgtcatgttgtcgattgatgcaccgctcatgatatttgtacaaattgcattacttatctacataaaattttggaggacggtaccctcaataaaaataccgaattgaacactact

SEQ ID NO: 1550 - DNA, 321 bp, unidentified
  source 1..321: mol_type = unassigned DNA; note = unclassified Narnaviridae sequence
agtatacactccactcgactaccaatgaaaggaggactattatgtcccaattcatttacactcagaacgaccttgtcgaagtcgatctgaatgaattcgatcaagggacgcttattcttgcgctccttgcaatcgaggcgcaggtgcctggcacacttgccagcatcttgcgtcaagccgcgttagctaacggggggtggagaatatcctccaacgtcagcaatccggggaagtccatcaatgatcagagggactttctcgcttggatgagaaaatttcaccaagccctgcaggaagagcaggcagaaaggagtgtctgag

SEQ ID NO: 1551 - DNA, 321 bp, unidentified
  source 1..321: mol_type = unassigned DNA; note = unclassified RNA viruses ShiM-2016 sequence
tttctttcattatgtcctgggatgacattaaaagcatccagcctctcgtccatgtcgtgatgggttatacaagcgttatttttctacatctcttttattaaacgtgccttaacttcatggatcggttccaggtatattaacaagcctgtgggcgggtatttacccgcggccattatgattacagatgctcattcctgtatttcatataaaatcctaaaagacatgtcctgccagttttccgagtcacgaactggtttatgtatacactgactttctttttctatttctaatatcgcgcgatgcatatcgccttataaatat

SEQ ID NO: 1552 - DNA, 321 bp, unidentified
  source 1..321: mol_type = unassigned DNA; note = unclassified RNA viruses ShiM-2016 sequence
ctatgcccagtcctggaacgagagagttaatctatcaggatttgatagatcaaatgccctctccaacaatgttgaagggaccagacggtttaccaataaatctcagttggaaagatctgatgagtaatccggaaaataacttgagacaaatcatatccagcatcggaactgatgcatttttcaaactatcgttggaacaaaagatttttaaactgcttgatttggagcagatggcagttgacgttttagacttaatgtccgttgaatacatgtaatcggtgaaaccattgttgaaaaaaactaaaatgcaacacccctcac

SEQ ID NO: 1553 - DNA, 321 bp, unidentified
  source 1..321: mol_type = unassigned DNA; note = unclassified Riboviria sequence
cctataattatgataaccgcacgcaacgaacaagggcttttgatgaactgatttagttcggttcaccgacagcaagattttacgaaatggatttaacttaccacgcaaaccctcagcggaccgcaggtattttgatcgcactggactctttagatcataacgacaagattggatcatatccatgtagttaacgtagactacactaaagagattttaagcacggtaatgtaatagaaattacccgcctggtaaagcaccaaaccttcgtggcagttatggcctagtcacgattgcatcgagccatttactcaatgtatcaca

SEQ ID NO: 1554 - DNA, 321 bp, unidentified
  source 1..321: mol_type = unassigned DNA; note = unclassified RNA viruses ShiM-2016 sequence
ctggactaccacccgtctttcactgcagacgttaaacactgtgccgacctgagggttcaggatgtgcgagcgtgtgatcttgctcccagcgatattggacgtaaagtcgctggcagtactgctgcactcattaagcacataggtgggctatttagtccagagacgcctcgtggcagtcccacaaagtctcaccccgtcctcgggccgcagcgccactgggcagtgcgcgcagctgacatagcgatatgtcagtgtggcctagaaaagataccgcctgcacaaccaaactcaaacattcaaactcaagaccaaacccttagt

SEQ ID NO: 1555 - DNA, 321 bp, unidentified
  source 1..321: mol_type = unassigned DNA; note = unclassified RNA viruses ShiM-2016 sequence
gggggcctagttgccacacatgggttcgacactgatacagctgccaatgtcagtggtctgccaattacggtgtgtgtgacatctgggaccccaaaggtgcgcaaggcattggccttgccaggattggggctgggcgtgcaatttggtgtgcacaaccagtccctcagaaatgtgctgcgcgggttggtggagagggtgttcaaggttgtcaaaaatggcaaattggtatctccacctaaacccgtggcgaacgttttcgataagttgagtggctttcgggcccggttgttacgtgtggtgggttcatgccgcccttggact

SEQ ID NO: 1556 - DNA, 322 bp, unidentified
  source 1..322: mol_type = unassigned DNA; note = unclassified Aparavirus sequence
gagctcggtacccggttttcactccgtgcacgattccattcactatctattgagcttcgatatcactctgttttgactctagttatactacactcaagcacactgatattatcgttctgatagtttgtggtttcattaaaagtgtatacatttatttatattaaatactgacactttgcgggttaaaatgtttaatactatttttcaatttgaggttgtatgagataattttgatttctatgttatcattgaataagggagtctggccctaattgatgtacgactcttctttggttgcgacccgagtcccttctacatcaag

SEQ ID NO: 1557 - DNA, 323 bp, unidentified
  source 1..323: mol_type = unassigned DNA; note = unclassified Picobirnavirus sequence
ctattttctattttattctagtgttctttacctattccaaggtgaacaccaattgtagcagaaaatttacactagtagcacacttgcaagcggtgtggaattagtgtaaagagatagctacgcagcaacaaaacatccacaaatgtcacgtccaaggaggtgaaccctaagtgacaaacaaccagatacggtactgggagtatcgtgagacgggtcggcacaaccaagaaactgaacgcgagacaaatcggtccaatctagctcgggaagctgagacgaatcggtctaatctagcgagagaagctgagacgcgtcgctcaaac

SEQ ID NO: 1558 - DNA, 323 bp, unidentified
  source 1..323: mol_type = unassigned DNA; note = unclassified Potexvirus sequence
ctacttggaaacatcatttcgagttccgaggaaagtggcagatttgatagcaggctgtggtttcgatttcgagaccaattcacaagaagaagggcacttagagatcactggtatattcaaagggcccctacttgggaaggtgatagccattgacgaggagtctgagacaacactgtccaggcatggtgttgagtttgttaagccctgccaagtgactggacttgagttcaaagtagtcactattgtgtctgccgcgccaatagaggaaattggccagtccacagctttttacaacgccatcaccaggtcaaagggattgacat

SEQ ID NO: 1559 - DNA, 323 bp, unidentified
  source 1..323: mol_type = unassigned DNA; note = unclassified Luteoviridae sequence
atgggctctgtcacgcatccggttttgaatccccttttaccattttgggattaccggatatcgtggtgcgtacaggggccgtccctaggaagagtcgtagtgtaattagctacttgagtcagttttctttaggtttagacttccgggttcccaacccttctctgcacaatgcccttgttgctgtggaaaggagagtttttactgttgggaagggtactgatgttgtacttccattggtacctagtcatggcattttcaataagctcgcttatttccgtgactccataataaaagaagtagggttctgtaaggtacatagtcca

SEQ ID NO: 1560 - DNA, 323 bp, unidentified
  source 1..323: mol_type = unassigned DNA; note = unclassified Flaviviridae sequence
tgcaggccgcactagcaattttccaccactgagcgacctgaactcagaccaatttctgacgggactgtcagggcaacccctgtaaaacgaacccatacgggtcggggactaacgcctgaatggctacctgtctgggtttggcctgatcaaggaagtctagtggtgcagttagcatcaactattgccggttcggccttcgggcagaacgaccctcgggtaagacgtagggccagggcatttggatagcacaatgggtgcgggatgtgcagctggtaacagtttcccccaccgcgtttgcctgtgcataaggttcatgtgattcc

SEQ ID NO: 1561 - DNA, 323 bp, unidentified
  source 1..323: mol_type = unassigned DNA; note = unclassified RNA viruses ShiM-2016 sequence
ctttctacaagaatatactgctattaagcttcctctcgggttttttactaaacgcgggaaagatggtatctctgcctaccataattcgactaccggcagaaatttgggttgcaggtaagaagaagaagaattgacaatcttctccttcgaacaataacctaatcaaaggtcacagaactagtgataaggagtggttgctttaaaatctacaccttaaaaccagttaacgtgagccgcattatttctaagggccactagatttggacttgggtctcgagaaataatttgactatcctaaatagctagatcgtgaaacggcaaat

SEQ ID NO: 1562 - DNA, 323 bp, unidentified
  source 1..323: mol_type = unassigned DNA; note = unclassified RNA viruses ShiM-2016 sequence
attgacattcttcatgaggtcttgccattttcctatctcctgccttttcttcttcatcctagacccttactcattaatatttactccatttaacatccctttggactttacagtgtattattgcactggcccttcaactagggtcaaacctgcctgatttgatatcatgctctaccacagggagagcaccctcgaacacgccatcagtagcagtagccgaagccggggttatacctcaatacctaggtgttgtatatgatcaagcttcggccgtagttacagtaggcgagcaaacaacaccaggaccccggggagaggctgca

SEQ ID NO: 1563 - DNA, 323 bp, unidentified
  source 1..323: mol_type = unassigned DNA; note = unclassified RNA viruses ShiM-2016 sequence
atacgtggccttgccttgggtgcaggctttaaacgcattcattcccgtgacgaggaattcaagtagtcgttacttaccgatgctgtcggtaataaagtaaaatcagctgcaacatagaaacataacggtgttccgatgtggaggtgaattgccacaatggagcatgacaggctatgattgtaaggactagggacccgagccctgaggctatttagtctccccgcattgtcctgtgggaaaaagttaccactcgcgtatgtcagtttgcacctgcgtacgatgattttgtaaatattgctaccgaaactaaacaaatttttagg

SEQ ID NO: 1564 - DNA, 323 bp, unidentified
  source 1..323: mol_type = unassigned DNA; note = unclassified RNA viruses ShiM-2016 sequence
ccgatcgtttatcggtgagcagcggctcacgaaacctagatagaccaccagaacaacggtacccccccttctccaatcataagaccctcgctttttttctcgctctctaataatcgtatacggtctaggcaggtgaacgcaataaacgccctttatggcccgatcatagaggaggctttaaagcaagcagactcacatttcctgtggatatacagtagagtttgcagtggactcataaatccatgagttgttgatgcgccaacacaaaattttgccacaaaactgaaagagacagtaaacctcagtaccagctgtaaacttgg

SEQ ID NO: 1565 - DNA, 324 bp, unidentified
  source 1..324: mol_type = unassigned DNA; note = unclassified RNA viruses ShiM-2016 sequence
gtcggcttctatggcccattcactggggccttgtaccggtggccaccgcaactatgcgttggataagctaaaaatagttattcacatttgattaacgcacgagttgctaggttctgcattacctagatcttgtggtcagctatgtgaatagtcatgtatatatttccattttttagtggaggggtgacgcccaataaaatagcactgttatgttgttgattgatgtaccacacataatattttataaattacattacttatctttatactttaaacgaggagagtgtcctcgataataacactgcgcctctcactaatttgaga

SEQ ID NO: 1566 - DNA, 324 bp, unidentified
  source 1..324: mol_type = unassigned DNA; note = unclassified RNA viruses ShiM-2016 sequence
aaagcagtgaaaaagtttttggatctgtcttcctgggcatcacatgattggactctcattgagggtaacgtcgcggcctgggagcgctttcttgataatgtattcaagtgtgagtatgtttctgaaggtgtattggtgaaaagtggatttgatttaatttatcatggaaaaacgaaatggtctgaagacatatggaagagtatttctatcgatcttgaaatccgtccaaaatttaagttatatgaagagtgtatcaagcggtcgaggagtgttccggttaatcctagagctatttaccttgacacttgggaaattaatgaaaag

SEQ ID NO: 1567 - DNA, 325 bp, unidentified
  source 1..325: mol_type = unassigned DNA; note = unclassified Picornavirales sequence
ttgaaaagcaatctgcgaactttgttactatttgttctcctcagctagttattggacttatccaattctctccgttttcgcacttactagcactgggcttatccagatttccttttagtacactctcactttgcacttccagcacaacttaattttccttggtgcttttagtgcattcacaacgtttactttaagcaatctcgcttccccgatttgtcaagttaggggtttttgtttttcctttgttgtcacgcagcaatcttttactcttttccttttctttctaattctttgttatattctcatcccaccagcaatccaaaat

SEQ ID NO: 1568 - DNA, 325 bp, unidentified
  source 1..325: mol_type = unassigned DNA; note = unclassified ssRNA viruses sequence
gaagttggaattgatgagggagacttcatcgttgcggctgcccttgcggggaatcttacgggtcgactgtccagggtcggttcgcatgggtgacctcatgtgggatttgatgttcacaccacatccagaaagcatcttggcgccacctcgtcgttagaggtaccttcacagggcggagcagaccgttacaagccaatgcaccagtggcgcctttgccgtaggtgtagataaatttacaaaagtggggggagtccaaccagtacatacactcccatcagtagtgatctgggtctggcatactgctgccactttccaattcttaatc

SEQ ID NO: 1569 - DNA, 326 bp, unidentified
  source 1..326: mol_type = unassigned DNA; note = unclassified viruses sequence
tacatggggagataaggctcactcgactctaagcgtcgaactctcatcaaagcctaatctcacctcgagcgccgatcttcacttctgaagctctcctcccgctcaccactcgcaatggatttacatcacaaagctcttcgcaaactcggaatcaaccccgattcagatcctggactcgtccacatctacaacgaaagccctccgccccgttttcaggtcatcctttctataaggagaattatcaatcagtcgtcattgacgcactcaaagaagtcctcccatcagaagacctagatatagtccttcacggctatttccgaagtccc

SEQ ID NO: 1570 - DNA, 326 bp, unidentified
  source 1..326: mol_type = unassigned DNA; note = unclassified Picornavirales sequence
ttgaaaagcaatctgcgaactttgttacgatttgttacttccagctagctattgggcttatccaatttctttcgtttccgcaatcactagcaccgggcttatccggatctctttttgttttctttgttacctctgttctgtgcgcgctttaattttcctttgcgttctttacagcagtcacaacgtttacattaagtaatctcgcttccccgatttgtcaagttaggggtttttgtttttcttttttcgtttcacagcaaacttttgctcttttccttttctttctgctcctctgctatatagttcttccccctttgatttctaac

SEQ ID NO: 1571 - DNA, 327 bp, unidentified
  source 1..327: mol_type = unassigned DNA; note = unclassified viruses sequence
tgattcaagcacaacatcgtagacacgatcttgtggttgaatcattttaataaaacttcgcgtaccaaaaacgcgtgtgcatacgcactaattctggctgtcgaacttcggatcggctgaaatttgtccgcacccctctgttggccgggggggtagacgtaaaaacttccagaggtgaccctacggggatcgtggctcttgcgttgtaagattcgcagtgtgttacaagcattcaacgactacacgccacgggagagaaggaatagtctggcctcatcgcgcacaaagtacgaggaagaattgggtatttccttcatcgagcagata

SEQ ID NO: 1572 - DNA, 327 bp, unidentified
  source 1..327: mol_type = unassigned DNA; note = unclassified vectors sequence
gccaatctcccttccctccgaaagaggcgaataatggcagaggcttcaactgctgaactatagggtacgttacattaatgatacacttgtgagtatcagccctggataatataagtcaattaaacgaccaagataaaattgttcatatctcgctagcagcttaaaatataaatgtaataggagctatatctctgacagtattataatcaattgttattaagtaacccaaaccaaaagtgatgaagattaagaaaaacctacctcggctgagagagtgttttttcattaaccttcatcttgtaaacgttgagcaaaattgttaaaaat

SEQ ID NO: 1573 - DNA, 327 bp, unidentified
  source 1..327: mol_type = unassigned DNA; note = unclassified Picornavirales sequence
gggggccgcgcatctttacggagatgcgtggtccaccggcctgtttccccattcccctatccctttattttgcccatattgggcattaagatcggatttctcaggtttgacgcggattgggtaatggataaggtttggtgtattgcttaggtaatgttataccaagactgtagcagctagactagggggcacagtgtttatggactccattggatatcctgccctggtaggcactcactgtgtacgggaggttgggaagcctcgccctggccctagactgggtgatagcctggcgcttgctgagccagttgcttacagtataatcag

SEQ ID NO: 1574 - DNA, 328 bp, unidentified
  source 1..328: mol_type = unassigned DNA; note = unclassified Picobirnavirus sequence
atttgtataaatggcattctgatatgcagcgttggctgaagcgtaacctgctccagcgttagccattccagtagcataattggcttcgatttgtttacgataattactttcactggctttgtttgatcttttagtttcattttctatttaaatctcacaattctaaaagtcttagcatggagattcacatgcgacacaccaatgagtgaaattttagtacctatcaaacacaataggaactacatccagtgagatttcgtgtagcaagcgaagttaagcaggatgaacaattattatcagtgttaaaaacattcagaaaggaggaaag

SEQ ID NO: 1575 - DNA, 328 bp, unidentified
  source 1..328: mol_type = unassigned DNA; note = unclassified Picornavirales sequence
cgctcaaacttttacccaacaatttgaaggtcgtcgtaatgcttcgaatattgctcagtcattcgacagtggtaatcgtatccaagttaacagaaacgccaatgttgttccaacccaaacgttaagatgtgccccgagcattcctcaagatcagactgttttggccgatggtcgggttgagaggcgtgtccgggatgcggcccaacaaattgctattgtgaataacaacgttcaatttgagacttcatggaaatcgtttgtttatgtcctatgtcagaatgggtcacaacctataatcgatgcctccacttcgattgagactggtcgg

SEQ ID NO: 1576 - DNA, 328 bp, unidentified
  source 1..328: mol_type = unassigned DNA; note = unclassified RNA viruses ShiM-2016 sequence
agggacactccctacacccaaattcataacacgcggcggattctcgtaaacccctgcatactcttagaggcttgtagcttaatagcgcgtttccttatgtgtgttatttccctttttctccccttccctttttaagttcttagtaatttattgctctgaactaaatctcgtggagattcattatcccttgtctatattatgcattgcgaagctttgataacaacagcgtcaaggtacgacgatcttgtaaatatggactttaaacttcatagctatatttatagcgagttgttgttggtagttatagtacgaatctaccagtaaaacc

SEQ ID NO: 1577 - DNA, 328 bp, unidentified
  source 1..328: mol_type = unassigned DNA; note = unclassified RNA viruses ShiM-2016 sequence
tatagagcgaatactctatatacaatatacagacctaagttggtggtattcatggtctctaaataaagcgaaaccactacgttgtgcgaataatcaaattgcggcagtgaacccagagaacggcaattctgaatattagcattcgatctcacctaagtttcagcttgtgtttcatggtgattaaataaagcgaaaaacaagcaaaatttttgttattaataagcaaccccgaagcatttttgagcgaaagaaagttattaatacgagtattatcgaagaaaccattttagctaatactccaggaaataacgtttatcgcccaacaaca

SEQ ID NO: 1578 - DNA, 328 bp, unidentified
  source 1..328: mol_type = unassigned DNA; note = unclassified RNA viruses ShiM-2016 sequence
gagaaaggaaaaacgtgtctccctagccatggattgaattcacggaccatggttagtgtggtgaaggcgataccgtgagtcgatcctcaaccacccttcggctggtgaacctgtgggttggaagcccactgggggtggacaggtcgaagtgtaaaaaatccacaaaatttcctctaaaaatcaaagtgaagatgacgcattactcgaagtgatacgtaacagcgcagtgaaacagactcgggaaaactttgaacaggaggaggaattcactgtggcctcaggtgttgcctttttggcggcactgaatgcccgatattctgactccgta

SEQ ID NO: 1579 - DNA, 329 bp, unidentified
  source 1..329: mol_type = unassigned DNA; note = unclassified Picornavirales sequence
gctgtgatgttcggcttcggccatgccaatcagcggctgtatttgatcactattgtacttaataaacatatcatacgagtatatttaacagcattacagtgtcagtgggaacagcttttcagctgtactgattcttaaccgcccatctttaagacttagcagtctaatagggtttgaatctgatatgtacgcctagcaccgggtcgaggcacccagctagatcgttttaccgccttcctaacactactacatcccagcctgccggctctacaggcaccgcatccgacaaaggtgccgaggaagttatttccgccgacaattttcaagtt

SEQ ID NO: 1580 - DNA, 330 bp, unidentified
  source 1..330: mol_type = unassigned DNA; note = unclassified RNA viruses ShiM-2016 sequence
tggcgctacagaagttacttagcaacttgtcgtgatgttagaattggtaacatacaacgaccggatgttaaagtaaatgtcgactctgttggcagccataaattttctaaatactattcaatattccacagcaacaatttaccaaagtggttttattacaacaaatgtccttgcaacgaatatgaagccatattaaaacgacactgtgtttcaacatcatgcaacactactcatccacttttcctaagagcaaaggctgtatctaatgagttagcgacactagttcgggaagatttactcgattataggccattaactcataaagagctt

SEQ ID NO: 1581 - DNA, 330 bp, unidentified
  source 1..330: mol_type = unassigned DNA; note = unclassified RNA viruses ShiM-2016 sequence
cttacttctgggggaaatacaacggatattttagcatgccgtttcgcgacagaagtttggcacagagtgccgttctagccgtaacgtctctgacaaacggtgaggtgcgcgtgagagcactagtggtgggcaaccgcgggtccgcaaggacttgtgtagcaaagcaacttcgacgtctcgtgtcaatctgcaatacggttgactaaagttgcgctaacccggctacacacattcataagtatctcccataacaccccggtatgaggccaattgcgataagagccaatatttttagcacgaaagcacggaggaaacggagagaaatccata

SEQ ID NO: 1582 - DNA, 331 bp, unidentified
  source 1..331: mol_type = unassigned DNA; note = unclassified viruses sequence
atccagagctaggagctctctctaatcgccgcaaggagggagcagcaaagtccggtctctggtcttcgttttagaagggcggagagtttcggctctactggctggtgtgtgccgcctaaaatccaggctaccagctcggcgcttttgaccagatccgtttaatcgagcgactgggagttagccaactcaatcgattgctacatcacaaaatcaagatttgtcccatattgggccgcaagaagacgttcagcagatcacgacattcgtcgacgattctaacatccagtcgtacgaaaagccacatatatcatctgtgactgcatggacaaaa

SEQ ID NO: 1583 - DNA, 331 bp, unidentified
  source 1..331: mol_type = unassigned DNA; note = unclassified Picornavirales sequence
ttgaaaagcaatctgcgaactttgttacttttttgttttccaaaactagctattgggcttatccaattctcgttacttgtttccctcactagcaccgagcttattcggattttacttggttctctttgttacttgtttttaaaaaacgcgctttaattttcctctgcgtttattacaaacagtcaccacgtttaccttaagcaatcttgcttccccgatttgtcaagttaggggattttgctttcaattttttgtctcacaacaaactcttctctttttcctctcctttttgttgctttgttatcttttgctccctcccctttattggacg

SEQ ID NO: 1584 - DNA, 331 bp, unidentified
  source 1..331: mol_type = unassigned DNA; note = unclassified RNA viruses ShiM-2016 sequence
cttcatcgggagcccgttgggctcctaggaggtacagccaagtgacaggctgttttgtgttttacgttgtctcaaaaacaagttctaagactatttatgcttttatgaaagcaccgtatgtgtcattgtatattttaaaaattataaaaatttcaagaaatgtgttactgatcagattagttaatcagaactatgggataatgttccccgtttttggccatttgaatgttatcaaaccccagaaggcctagatgtgcggactaggagtcactgtataaattcacagacataggacttgcccccctgtgtactagttaagcgatttattttt

SEQ ID NO: 1585 - DNA, 331 bp, unidentified
  source 1..331: mol_type = unassigned DNA; note = unclassified RNA viruses ShiM-2016 sequence
cccggatttagagcagatcgactacgccctattaatagggtgtcggttggtcttgctcatagccggagcggtgattctgtttaatttgcagcggaaagtgttgagaacgatctccatcaccaatcctgttcgacaatatgtaatcgagttgtctaagattaaacagtaccctgacgatctccgaaagaaatttcggaatctcaatgtcctcaagtatgctccgtctttgaacggtcatagccatggtgtgtgtgccgcattccgagctgcggccgatgataccatcaatacgtttatacaggaaaacggttttgaggtttactcggtcggc

SEQ ID NO: 1586 - DNA, 332 bp, Yingvirus charybdis
  source 1..332: mol_type = genomic DNA
aaccactgtatcaacgtaggcatgacaactgactctacatgttgaggcaactccaattcgacgttacttatttctacctctatttttaaatcctgcagtatctcttcttcattcagtccagggggccgcaagtccaaagtgccgcgggcacggagatggccgccttgcctatggggaggagggatgcattgaaggcatagtccggagaatggtagtgccctgtcggtgtcggaggagacggagcaatcaggggaccgcgtctggcacaggcaactggccggggcgatcccgacagtagttcgctggcacaccgccgtactcgttaggtccaa

SEQ ID NO: 1587 - DNA, 332 bp, Culicidavirus culicidae
  source 1..332: mol_type = genomic DNA
tcgaaaggtaacatcgagtacttataccatatacatgccattaactagaaagtaagtttaatagtaaggaccatccatgtaaccgcatttattagaatattaagacagttttaatccatatagtggttttattgtaaggttttgtagtacttagagagagttttaagaaagagttgaacgtggacgatagattttggatctcaccatacgagcttgcgcgaaccctaccccaactcacctcccctccccttcctatcctcaccctatcccccaatccgccttttggccttagcggattggtttaaaaacaacaagaggtggcccgagggcac

SEQ ID NO: 1588 - DNA, 332 bp, unidentified
  source 1..332: mol_type = unassigned DNA; note = unclassified RNA viruses ShiM-2016 sequence
tgtgtttttgtcaagataattgttctgtgattaacagtgattgtggttcgtgtaatgcgacgcagtcaaatgctagttttgatgaagtgtatgagagagtggaaaacttatctcataagaagattgaagagtgtgtagatcaggctattgatcgagcttctaagcttcgtgattacaagcttaatgttcacaatggctcccgacgggaatcatctgatcctctctttatttcgccccattcgttgttatcgcttggggtatctaagtttgttgcgtttgagcagcatcacagtttcgcttcagttgagtctctgaagttgcttgctctgtct

SEQ ID NO: 1589 - DNA, 332 bp, unidentified
  source 1..332: mol_type = unassigned DNA; note = unclassified Riboviria sequence
gtgtataagagacagcatctctcgtttgcccgccaaaaattctggtagctagcgaccgcccctgtttcatcttcacccccgaagggtggacactaccggaggttcccacatacccacatatgggtatggactccgcctcttgtgtcaggaaaccggagagatcggctaaagctgccagcccttcggggtcattgggaacggtccttctcgacgattttactcggagaaggtccgcgcaccgtgccctcggagggcgtggtgcgtagcaatcgaggctcgtcctcctttacactctcattcaaattcgcatagatcaatacacgtataacaag

SEQ ID NO: 1590 - DNA, 332 bp, unidentified
  source 1..332: mol_type = unassigned DNA; note = unclassified RNA viruses ShiM-2016 sequence
cggcaagtacatgcgattccttttcgccacgttagtggtttttgcttcactacccaaaacagaagtttttgttttggggccgtgctatgcacgaccattcccactaggtcaggaatggttgctatgacctaccatatagtagagagcggcacagggggggttttacggcaaagcccatatgttttgatgttttaaagaaatgtcagtaaaaaccgtgtgccccggaggttgtattggtgtatcacatagtgctctacatcggtacctcctcaggatggggcacggagttacaactccgcaatggcgacctacattaattggtcacaaacctt

SEQ ID NO: 1591 - DNA, 333 bp, Botrytimonavirus botrytidis
  source 1..333: mol_type = genomic DNA
cagggatgggagaggtgggtcttttttgaccgttcatgaggctctggccgtctacctcttccagccctgctgggtggatacagcatacctaattttgaaacatcaactggaatcttagaaaaaagtataagataaaaacggcctttatcatatcgagacctgtataccacccaaacaggtgacgatctacacgctactctatctaggaaatcatcaatcaattaggaccagaaattgttacctttaaacaaaaagtaataacgttaatcttgtatcgttcatctagcactggtataatcttataacaaactagcgaatacaggttaatttaca

SEQ ID NO: 1592 - DNA, 333 bp, unidentified
  source 1..333: mol_type = unassigned DNA; note = unclassified Hepacivirus sequence
agggtctgcgcctgtacactcccccacgggaataacaccagctccgagaaagtctgacgagtatcggtgttaaaaaggtggtgtgccctaccaacgtcataacgggtcgtgccgatgttccgaggcaaggactaccactgggtgcccgtgggaaaaaaggggcggatagggagctggggtgaaccgaacggccgtagacggccgaggtcacaggcatgggacgctttgagcctccgtagcctggttggatcttggattcccggtgtagctaccagtttactgcctgatagggtgcgggccagcgcatccgcccttctggttgttcataacgcc

SEQ ID NO: 1593 - DNA, 333 bp, unidentified
  source 1..333: mol_type = unassigned DNA; note = unclassified Picornavirales sequence
tgtactaatgtgatcttgcaactagaagtaaataagagatgtaaaaattttagttgtattgctattagtataaagaggttggttatttaaccttacttccaggatgcctcgtgagcagccctcataatatccaggaaccatctctcgagcatacattataagtgacatgtatgctttaaattcgaaaaccttggtgcaggttcaaatgttaccaacgacaacgactcgaattaccatgaccagaaacaaattatttctttccaaaatcaaggtcaaacggtagctgatgaagctttgccaaagattgtagacttgccaaaatcatatttagac

SEQ ID NO: 1594 - DNA, 333 bp, unidentified
  source 1..333: mol_type = unassigned DNA; note = unclassified ssRNA positive-strand viruses sequence
cctcattatagtaatattatatctcctgaatactatgtctattttgatggttatagtggaaaacctcatggtgaaactctttccgatttagatatatataaagcatatacaacatattacagatatattaaggaattttcagaattttgtaacaacgataatgattctaatactagcaatattattgaatatgagaataaggttagaaaatccacgaaggctaaggataaggatttaaaaaccaaaaactttcctgtgtttaatccagcattacaagaattgtataatacatacatcaaagataaatcggaagttaataaaaccaggttatta

SEQ ID NO: 1595 - DNA, 334 bp, Salem salemvirus
  source 1..334: mol_type = genomic DNA
ggcagttcatcgtgcttaggaccagtgctggatcactttctccaccttcgcccagcacccacaggcctcaccatcctatctctcattctcaaacagcaccagtagaccagtcccctcccacagaatctctccaataaagaccatccaaaatcagtctttccaccacatttgtctagtcctagaatttcaatattccattaagtatagtaattattattttaaaaaacgtagacctactaacctcttttaaaacagcactcaggacaagaaagaaaattaggagcaaagaccaaactcctgcgatctcatagatcaagttctaatttggtataca

SEQ ID NO: 1596 - DNA, 334 bp, Mogiana tick virus
  source 1..334: mol_type = genomic DNA
tttaaatcactcttagactcactttacaaactcgaagataaacaggaaaagaaacaagtgagttgttcatgaacttgacatggctgccccagtggtggcggccttgagctgcgtattaggcgggctgaggcggtagcatctgctgctggcaccagaattggtgttaggaaactcaccatgagtagaaaccagttacatacagcgccatttccgtgagatactccccaccataggatggttatctctggaatatgtggcgcccatcgacatcgttctaaacgaagaagacagcccttaccaacttgacaggaaggtttacgagaaagccctagca

SEQ ID NO: 1597 - DNA, 334 bp, unidentified
  source 1..334: mol_type = unassigned DNA; note = unclassified Picornavirales sequence
gtttccacgagtcatagctttatctttaattccttgcatatttattttatatcagcttaatggagttagaaagacttcatcaaccaacatatttccttctctgagaatagtgcggtaatcctccgtactatctttcagtgaatcacggctttcaaagattagaaatgctatgagaataatacttttatatatattatatcattaattataaataacaaagtttagatctaattttgtccccttgaggaaaagacagaacaataaagaccagtccacttaacccattggaaagctattttagaaatcccttggcggtggaactaattcgactaaa

SEQ ID NO: 1598 - DNA, 334 bp, unidentified
  source 1..334: mol_type = unassigned DNA; note = unclassified RNA viruses ShiM-2016 sequence
attgaattacgtacaacgttttaaattgcactgcgtataatacgtttagtgtaattggctgcgatcttattggtctgtataatacagttccaatacccaaagtcccccccgtgtagctcacggggttttattttccgtatatttacggctccccaaaatatttcgtatagcttacgaatgccaatatttttatttagtttaaatagatttttaatttggttttgttttatattatatatttgttttgctctctttgttagttttatcaacttatgtttacgttatattgtagtaagtgtcgcaggcccatttgggactgtatttgttaatttta

SEQ ID NO: 1599 - DNA, 334 bp, unidentified
  source 1..334: mol_type = unassigned DNA; note = unclassified RNA viruses ShiM-2016 sequence
gttttgtagctttattcttcgtgtaatcgtagaagttgtgtgtagaatacttcaaatatttattgagatattcaatgcgcgatttccttctcctaaacaaactatacaatgaggtaagttgtatttttaatgttgggctccacccctatgtgaagtgtcgactcacatagtatttagacatacggttttcgttttgtagcaaattattggcgatcaagcaagagagacaaaccaattacctgtctcaaacaacgttgagttaggtggttggaacgaattggaagtatctactacacgtgagactgtagaaacttctattagtaactttaaccct

SEQ ID NO: 1600 - DNA, 334 bp, unidentified
  source 1..334: mol_type = unassigned DNA; note = unclassified environmental samples sequence
tacctgtgattccttgttgtctttgacaactaaatattcactaagagaatgatctcactagacattctcgaattgggcaagcgcctcaccatcgcttgttccacccgcgcccttgcactcatcaacgataggcagagcatcggaagctatcactcattgtttgacaattgggtgacgctcctgatgtttgtgctgcttatcaatgttgtagcgcaagttaccggacgactgcgcctcctaccgggccctcttcagcaatggattggctgcctggctgttagggttatcgtgttcgatcaactgtggagggtgttccactacttcctgccttgca

SEQ ID NO: 1601 - DNA, 335 bp, unidentified
  source 1..335: mol_type = unassigned DNA; note = unclassified Ourmiavirus sequence
ccgtttgttaacccagtttactctgggggacacgatcggaggggttcgccgggagactctctgagttcggcgtccaacgagtcgttctttggaaaggagcggcgagtggggcctgtggatttggccgtcacacacgttaacagaaacggcatcccgcaaccaactcgtaagtggtacctactcgaaggtagggggatcgcagtgtcctgttcgggggcttccccgggttcgcccggtgtcggagccacaagatctttgtggtcttacccgatcaacaccctctggcttgccggtacgcgtgtgccacaaacacaactgccattttatattttaaa

SEQ ID NO: 1602 - DNA, 335 bp, unidentified
  source 1..335: mol_type = unassigned DNA; note = unclassified RNA viruses ShiM-2016 sequence
acttgctaaattacgtaaataagggagttataaagtagtttagtattgctatctctaggacactgttggctatttagtcttaatgatcaagatgcagtggagcagccctctaaaaatctaggtcacctccctagcgatagttaggatgatccacctacgtcgcgaaataccggatcgctacaattaaacaagatgaaacatctcctcaatctcaaaactatgaggaggcaccacagataacccagactgtggaacagcagcaagagttaattacttttgaccaggataaagctatagtggcagagcattatccgggagaaattaattatcctcgt

SEQ ID NO: 1603 - DNA, 335 bp, unidentified
  source 1..335: mol_type = unassigned DNA; note = unclassified RNA viruses ShiM-2016 sequence
agccgtggtgggatcaggcattggggaggactgatgcagatgaaataacattattgaacacaattcctgtgcaaggtggttctcataggccaaatagcagtaataataagaataaagataaaaaaggagaatttgtgaaaactgtgaagctgaccaaagataatataccggtatggtgtagtataaggaacaataatataacggtggttgatagagctaaggctagatttgtactggtacatgtgtcgtatgaaaacacacagggagtgggtggttttggtgctcataggataggtgatgtggtcgttaatagtcatgccatacaacttgatgat

SEQ ID NO: 1604 - DNA, 335 bp, unidentified
  source 1..335: mol_type = unassigned DNA; note = unclassified RNA viruses ShiM-2016 sequence
tagtacccaacttgacccacgacagtaagacagtaacattcataccctacatcaatcaattcggctatgcaagtaacgtacactccagttgtgtttgcaatgaatatcgtgccttggtcgatcgccacatcacagatcgcacatacatcaagtttgatgccaaggcctggcgagaagccgcccgtcacacccttaaatactaccccgggggtgttagtaaatgtagttacacccagatcatcaatggctacacgggcgggaagaaggctatctacatcaaagccctagaaggactgcgcgcgcatggtttacgaccatccgataccagggtgcgc

SEQ ID NO: 1605 - DNA, 335 bp, unidentified
  source 1..335: mol_type = unassigned DNA; note = unclassified RNA viruses ShiM-2016 sequence
cttacggcctctaagaggaatatcctctccggctctcgccggtcacctatcttacgatggtgatatcccataaccagcaactataggagagaagatcatgaaagacaagagccttgcggagattgctgtatcttcgccatactttgacgaatacgacatcaatctctacgtcgcaatgctcgaaatctctcttggtctcatcgaacctacagacgctgtttgctcataccattatggttgtgtgctcgcagctgctgagttgttgggttttgactggtccaaccagttgaaacttctccccagtgtcccgtccgaccctcttcacggagggttcc

SEQ ID NO: 1606 - DNA, 335 bp, unidentified
  source 1..335: mol_type = unassigned DNA; note = unclassified RNA viruses ShiM-2016 sequence
ccggcggcacgcgtgagcgtgctgtcggtgaactcggtggcgttggtgtaaaagccacgtcccgtgcctcccgcctgtctgggctgactacccaggcaggtgtaaaaccagtttacaaatcgaatcaggattcggcgcttgctagccagggggctggagacatccagcccaaaggcaaggaaacgcggaatcctgctcgtgggaaaggcataaccccgagtgccaaacatcaacgtgtttcgcagctcagaggcttcgcaaccgtgatcaacttctggttgtctcagttgcggctccgctgtagcctgtcggaactccaggatcacttcacggaa

SEQ ID NO: 1607 - DNA, 336 bp, Culicidavirus quitotaense
  source 1..336: mol_type = genomic DNA
agttaatatgaccggtcgaacatcaccctggaattggggaagaactaccgtacttaactaaccacactagtatataagatatatactatatacccgcatttacataggaagataaggattttaaactattttgtaagttgatgttaaggtttaatctgtaagctaacagccataacagtagaaataagtttgccatatgttgtgtttcatctctttgtttctggctcttcaatccttgggtgtactgctgatagatgctcctctttctacaatcgcgctaaactgcccctccccaatctaccttttggcctcggtggattggtttaaaaacaaact

SEQ ID NO: 1608 - DNA, 336 bp, unidentified
  source 1..336: mol_type = unassigned DNA; note = unclassified Metaavulavirus sequence
aacatatgtatcatctcgctcatgctagccaggatattgtcataattatgtagattacatatgtttcaatcatatgtcactattgtagtgtaatcaattcgcgatggtactgaattatcatcttatattccctggacagatttccgaaattgacaacatactctcttacgccaataaacgaaaatatctgattacggtgcaatctgtattcaattctaaacagtatatacacaatcatacacaagatagcttatttggattgttttacaaattactcactcataattaagaaaaaatcaaagagaacttaccggtgggggcgaccccaaatcaata

SEQ ID NO: 1609 - DNA, 336 bp, unidentified
  source 1..336: mol_type = unassigned DNA; note = unclassified Sopolycivirus sequence
ctccctttgggtttgagtcgtcaggctttgttctcgaagggtcttgatggtgattcgtcccatccccaatatagctgtgaaatgcttgagggccgagaccatgtagggaaaggtaagtcgagccgataagatttgacaacgctatatctgtgcattaaatatttatccagtaccaaaggaactcaagtgtaatgctgacctagacaagtcttaggacgcgctgcttgaatacattccttgtacgacactcggtggtgatcgtaatttggtcggagttaacctctggataatatttgcccgtgtcggagcggtgatatagtcggcggactaatttac

SEQ ID NO: 1610 - DNA, 336 bp, unidentified
  source 1..336: mol_type = unassigned DNA; note = unclassified Picornavirales sequence
agattggctgtgggtagcgcataccacgttaataatatgtgctagcggaaatagaggtattttagagatgcgcacatgcttgactttgccggtgtgtctcgaacgcgcgtactactcacacgtttatggagaggagcgaagtccgaagtgcagtgattgagcatccgcacgggtttatagcttacaaaaacagaaagtgacgtcacgacacaagacgttaaatgtgaagagtttgatgggttaactttaaaccctactcctgagctacttggagtagcttcctttagcaatgaagctggtcaatgcgcggcaattaaggctacacagtactattcg

SEQ ID NO: 1611 - DNA, 336 bp, unidentified
  source 1..336: mol_type = unassigned DNA; note = unclassified RNA viruses ShiM-2016 sequence
gaacaggagagtaacgaaggtggtacggccgctacagaggcgcctcaccttacaaaatctaagttcaagcagcaggcgggacggccaccccgcgaactaataactggtgttgatcacaacacaaacgctattattgagaggcaggactgcgtgtccatcgtacctgccttggcagccagtcagaagatccacgatatcggagttggaacttcggacaatgtagtcttgaggattaataacgctcggaagagaaaagtgaatactgatcctcttgactcatgtgtacaagcaacagagtccgactgtgagaatcctctaggattcaggcgggttcgg

SEQ ID NO: 1612 - DNA, 337 bp, Wenzhou crustavirus
  source 1..337: mol_type = genomic DNA
ctgtatgaagaatttacaaaaactgacaccatggagaaatcattcaaagagtgggaagagcttctcaaccagagacccccctcctcgacacctgcaccccttgtggagaccaggttctactgggagggtcttgtaatgggactgcttggagctgctctggtgattgcactctgtggaattctcaagcttgtgggatggaggtactgtcgcaatgtgattagtacacctctctagggctgagatgtccgggtgggtgggtgggatgggtccattgtggtgccttctcgtggcgggcctgtctagctaaaccacaactataaaaaaatgacaatacaca

SEQ ID NO: 1613 - DNA, 337 bp, unidentified
  source 1..337: mol_type = unassigned DNA; note = unclassified Marnavirus sequence
cccgatatttggcataaacctcgatgacacgtctagcgtaatggctacgctggatgcgacatgtaaggttgatcaaccgtttcaaaactaaagctgctagctgcgcacgcgcgtagtacattggcctctgctctttttgagcatgttcacctctggaccatgaatcacaagtgacagctttttaattgtttttgatcccgttgagataccccaagtctcgctccgctggacctctatctgagagtaccgagcaggtgaaagcccagctcagggaggtaaccctttattccaccgggcctcgtcccacaacagcacaagaatcagatacaaccgaaca

SEQ ID NO: 1614 - DNA, 337 bp, unidentified
  source 1..337: mol_type = unassigned DNA; note = unclassified RNA viruses ShiM-2016 sequence
gaattatagtaagattttctttgcgacttctccctgcgtttgtgattctacagtcatttctgctcaactttgttgctgcggccgctgtggacacaattttatttgcagagaatttttccttggtgaatgtttgcaattttatttagttttgtaatagactttgcttattattcattttcaggttactttgtttgtaatatttatcaattttgctctgataaagattacttgtcgcttatattttccttcttactatacactataattcttgttgctctttgtttattaagtttttgtggtgtaagttgttttatattcttattattagtgcttcatt

SEQ ID NO: 1615 - DNA, 337 bp, unidentified
  source 1..337: mol_type = unassigned DNA; note = unclassified RNA viruses ShiM-2016 sequence
cccctcccggggttctgcatccttatctattactagataggttgtcctttcggctcttcaaccacctaggaggcaatcatggaaactaatttaagatttttcttaaccatagatacatgcactctttcagaagatgaaagagagtatctaaaaattaagttaatcataaaatttcctgaatttagaaattactctttctgcaaccactttttaggcatgctacgattccgtgttttttctacgggtcgttacatgtacttaaaagaggctatacagaatttgtatcctgaattcgctgatcgcatccggtttgacttccaaacagacggggtctggc

SEQ ID NO: 1616 - DNA, 338 bp, unidentified
  source 1..338: mol_type = unassigned DNA; note = unclassified viruses sequence
gcaggagtaaagttaagatcatccaagctacatacctaagggacgtagtcggtgaccgaaacaaggctttctacagactattgcctgttctgaaagccctgcaaagtgaaggagctatcgatcgatacctctaccacttaccgtccggagatctcctatcggagaagtaccgaggacagtctattaaagaccaaccttgggaccggccggaaaagttcttcacacctgatcaggctgaaggacttcgaagaatcttaacccgagatatcggattaaaaccccgagtcaccaatatcctgatctcgcgaccgcgagttcaattcaatcgaattcaggat

SEQ ID NO: 1617 - DNA, 338 bp, unidentified
  source 1..338: mol_type = unassigned DNA; note = unclassified Hypovirus sequence
gttctaattggaagttccctggtaaaggtgcacctgaaggcattcaagataaatccagttttggcgagggtgtattagagcctgccaaatccgaaggtttattttactatcatcctgatctgatttctactccagtgttcaaagtactaactgtaggcaaaggaacttgggctattggctaccttaaatgcgacgatggtttagcgccagtgcattacgatgcggacattgaatctttctatagcttttcatattctggttatacttggctcaacgattttaaatcgagtctgacatctggaactgagttgccaaaggacaatcctggacatgtgcaa

SEQ ID NO: 1618 - DNA, 339 bp, unidentified
  source 1..339: mol_type = unassigned DNA; note = unclassified Reoviridae sequence
tcttcctactacttcgtgtctgtcgtcgttcgtcggttctgttatttaacaatcttaattcatgtcattttcatcaaatctgtcgaatctttgttgtggagggaaggaggattctccacagagcaatcaatcagagaaaaatttcgatttcgtaaacgagatggatcaactgattcatggaccgacattaactcattgctagaaatcattgattatgaaacaggttcacaatatccaccagttccaaacatcccagatgcgttactacccccaaattcaacaactggcgtaaatacacataatgtcaatcatcttgttagtaatattctttgcactagt

SEQ ID NO: 1619 - DNA, 339 bp, unidentified
  source 1..339: mol_type = unassigned DNA; note = unclassified RNA viruses ShiM-2016 sequence
cgttttctccaaccatttcctgtttgtctgtcgtcgagccagccgcaaacagtttctatcaccgtcccctttatcttttcggtgaatccccttataccctaaccttcgttggttttccgcttttacccgcacgtccccttcttttcatcctttcggtgaaacccctgcaccctaactttcggtttttcgcctttttccttacgtcccctttcgcgccccccctttttctttcttctctttttctttggttttgttttgttctccccttcctgtcccctttcccactttctttttggtttctcggttcttcccccttcttctgttttggctttagccaat

SEQ ID NO: 1620 - DNA, 339 bp, unidentified
  source 1..339: mol_type = unassigned DNA; note = unclassified Negevirus sequence
aaataagtaaataaattaaactaaataatctaacaaaacacacactaaagacttgtaaacaatgactatatactgacttctttattgttaatagttagagataagtgagacagtcgttaaagtatccaaaatttgaggtaatatgtcttaaggagaataatataatcaaagattgactaggcactgaccgtaaatacatcagaactaaagtacagggggggtgatggctgagatgaattgtaacttgcaggtatataaaaaagaaagaactataaaatgaattaaaacaactaaattaaaataaaggagaaaagtaaaagaaaaaaatcaacagacctc

SEQ ID NO: 1621 - DNA, 339 bp, unidentified
  source 1..339: mol_type = unassigned DNA; note = unclassified ssRNA positive-strand viruses sequence
cttccgctcgctctgccctcggatatggcataaaactgtcccccccgtcgatccatgggggtccggtgtatagttgaagagatccgtgttgtattggataccacgcaagtagaacggttttatcgttctttctaaacctacttgtacgaaggcttgcaacacgagggctgctcctattgaggagagcgtacccgcgcaccgagaaacaacggaccttctgggttgggtgacccaggagtgtatataatatcacctactaattcatatttcataaattttatagatagatatagtagaaatacacacccgtcacaggaagaaattgaagtggctactgcc

SEQ ID NO: 1622 - DNA, 340 bp, unidentified
  source 1..340: mol_type = unassigned DNA; note = unclassified ssRNA positive-strand viruses sequence
ttctatattacttttaaagtataaatggatattcgtaggtacttactccgggagttttcaaccctctcctggattgctatcgtaattttcattaacgtgattattctggttataaactatccctcaccacagtacataggcgaaggtcgcgttacttggcgtggtatagtttacacccagcaggatattacttttgtctgtcgcactagcaccaccgtttgcgtttttcaatcactcatttcactaatcattgctctgggttaccctttgtacccaattggaattgttgctgcttttatttatctgcttaacaagtggatttatttcctaaagcttcgtt

SEQ ID NO: 1623 - DNA, 340 bp, unidentified
  source 1..340: mol_type = unassigned DNA; note = unclassified ssRNA positive-strand viruses sequence
agcgcacaagaagagaacgataggagctttatgaaatcaccaagagttgacaaaaggtttcccaagtttggtactaggttttgtgagagctcaacaatgaaaaccgcactaggcacgttggggctggctatacgcaagtctttttgtcaactcttggtgatttcataaagctcctatcgttctcttcttgtgcgctttaagcaaaacccccttttcaggcttctccgccttctaattgagagagttataggctcctccccctactaatagtgaggaaattatatcgtatacttgggaccattgtaagtcgctaacgcttttgttagcccaggatacagcc

SEQ ID NO: 1624 - DNA, 341 bp, unidentified
  source 1..341: mol_type = unassigned DNA; note = unclassified Riboviria sequence
tgattcaagcacacaacgaggggaccctctcgtctgtgtttggattaaataaaaacttcgccaagcaagcggtgagtgcatgtgcacatattccgggttcgatttcagtggtgttttaccatggattcgttctgtatttatccgagcctcttattgctttaggggggtttcgtacaagctgccggaggtgagtctacggattagtagtggcttttgcgttgtaaaattcgcagcaggtaataccctgtacactgaactctacgccactggaaagaagaatgagtcggccttaacacgtgcactaggtgaatacttacttagttcatcttcgagataataca

SEQ ID NO: 1625 - DNA, 342 bp, unidentified
  source 1..342: mol_type = unassigned DNA; note = unclassified Picornavirales sequence
tttcgtggatagcggagtttccagtctctttaaaatggtgacttcaggaaagactggaccgtgtgagtatggcagccacacggatagtgcccctcaaatgtttgatcatcatttgttgtatgggaggaaagatcctctgttggttgttgaactgcttgttatgttggacggaagcgggagggtcgagtgcgaacccaactaagctggagaaaacacagcatgccggtgatacgagcgcaagatttagtacaatttattcccgatccacaccatatttcccccgtattaatttacacatttacggcttgcgtggttaattccgcaacatagctggcaccagtc

SEQ ID NO: 1626 - DNA, 342 bp, unidentified
  source 1..342: mol_type = unassigned DNA; note = unclassified Riboviria sequence
attaaaatgtgatcttgctttcttatacaattttgagaggttaataagaagaaagtagtgctattttaatatctaggttaactatttagttttactgttcaggatgcctagtggcagccccacaatatccaggacaccctctctgcttcttttatgattaggttgtcatttagaataagaaattaacctgctaactttcaaacaaatactagtaacattgaagatgaagaccggaaaattacttccgaacaaaaagagattgtacatttttctagtgaaggagttacccctagtaccactgcggtgcctgatatcgtcagcctttcaacagattatttgtca

SEQ ID NO: 1627 - DNA, 342 bp, unidentified
  source 1..342: mol_type = unassigned DNA; note = unclassified Riboviria sequence
aatttaaacaagctcaaatgttttattccgacatttgggcttttaaaacaggaatagggttgcaacctatagcatagaagaagtgtatatggttacaagagaaatgttgctgtcgctattcgccgtgctttcttctatatttgagacagttacacgagttatttacgtcgactcgttgaaatttaacgcgtaacaaattttacaaataatgatcaaaattttataaaacaagaacaacaaacaatagatattattgaatctgaaggctccactcatgtagagaatcgagtggcgtctatatccacaagaacaacacaggttgctaaggctgtccctaatcaa

SEQ ID NO: 1628 - DNA, 343 bp, unidentified
  source 1..343: mol_type = unassigned DNA; note = unclassified Chrysovirus sequence
gcaaaaaagagaataaagctttctacttttttgctccacacacgctcgactcagatggctgctcaaccaaacagaggcttcgactcattcttcgcagattactacgatcaggacggcttctcagatctcaccagcgtacgcgcgtccaccatccggccggcgaatatagtcgtagagccggaccacacggttttcgacacctaccgcacacacggcgggagccccccagactacacaaccagccaagtggcggacgcgttcggccagcgtgcttcagcaagcgacagggttcacggagtgaggagagacacagccgcttcagtgtacagcacgagaccgtacg

SEQ ID NO: 1629 - DNA, 343 bp, unidentified
  source 1..343: mol_type = unassigned DNA; note = unclassified Solemoviridae sequence
tccataggaagcccgcacagatcagtaaccatgccggtctcaggtaccccaccacgcatagcgtgaccaagtaatgctcacatgcaaaccgggccacaaccagcgagatggcaaacactatctcagcaaccttccagatcgctaggcaggccggtcctaaggactgggcccacgctagggtcactctgggttcaacaaagtctcgcacttggttaataccttccatctttttcttgacttgtggaacggacaagattagtacaaagaaagaaagtgatatcttcaagaatctaacactcacaaatatgtacggatcttatccgttccacaagtcaagaaaaag

SEQ ID NO: 1630 - DNA, 343 bp, unidentified
  source 1..343: mol_type = unassigned DNA; note = unclassified ssRNA positive-strand viruses sequence
caaccctgctggaactggatcatcagaaaaaggagaagaattaacacctttcgtaccactagatcagatttcgtttatttcacgttatccccgaaaattgccctctggagtgtattctggtgctcttaagaagattaccattgaaactttctttcactggactactagtacaactaaggaacatctaggcttactattgtcactagcctcgtttgaaagttgcttgtgggaatcagaataccattcagctattacaaaggaaattgaaaatttattgtcaaaatttaaatatataagatcttttgtctatatctatgacagagaagttgtagcagactctgtc

SEQ ID NO: 1631 - DNA, 344 bp, Obscuruvirus quintum
  source 1..344: mol_type = genomic DNA
cgaaatcaattactttaaaacttatatgttgaatttataatgagtggtaaaagcgtagatctgagaaaagttcgccacatggcaactactggcaaccctgtgactaaggtcgatttggaaatgattatgaaggagttgatggagatcaagagagagatcaaatcaatacggcaactaatagagggtgcctcatccaagaggtcaattagtgaaccaactgctcctactttggccctctcagaagttccgtttcatatgagatttaaataagggaaatgaaaacaatcattcttttttaaaaaatcttgagtattttgttggtaaagcaggaatctttgtggaaa

SEQ ID NO: 1632 - DNA, 344 bp, unidentified
  source 1..344: mol_type = unassigned DNA; note = unclassified RNA viruses ShiM-2016 sequence
gtaacgaggtcgcgctggtgtacccgccactcgccggagtccgaggagcagtacgctccctcttctccttttgcgggctctcctcgctgttcgcatggttaggttgctgggagtaccagcaaataccggtccatgtgcggctcgcctccgagctgcgatcgtctacggcgttcagcagtatatggacggcgcgaggatttgatgccacggcgctgcagttcagagtgcggcgcgcggaagctattgtgaagcgcaacgagtggaaagtaacaccgggtgtggtggaaacgacggtggccttcgtgtcggtcgaacaaccgagcgaggttgacgctgtccggttc

SEQ ID NO: 1633 - DNA, 345 bp, unidentified
  source 1..345: mol_type = unassigned DNA; note = unclassified RNA viruses ShiM-2016 sequence
ttagcaagaaactacgctcaagtgacagaggaaggtaggttcacgttggttaacaacagtatcgtaacagttaaacaaggagaatcttcttacaggtccgatctgtccctatcagcagacttccagtttgctggcagaaatgtaaggacaaacacgagtaacgtccacacggactactcggggtataacaacaagtacatcacgtcagatggagtcttcgatgctgggctcgcactgaccgagtttgcaagaactacagcggagagacgtctcgtaaaagaagacactttcagcttactctctcagcaaactcaagctgatagccacgaatctttcatttacaac

SEQ ID NO: 1634 - DNA, 346 bp, unidentified
  source 1..346: mol_type = unassigned DNA; note = unclassified Picobirnavirus sequence
aaacattgtagtttacaaatctgagaaaggagaaaccgcttatggttttacaagtaaacatccaatttacacacatccttagctcagccattagtggtctgagatttggagtaaatctggatgtagaaggaggtcgaatgtgacccgaaatcaaatagcttggtatgaagctagagaagggaagcgtcacaatgttgcaactgaacagctaggagttagagctcaaggtgagactgaacgatcaaatcgtgcgagagagttagaaactatacgacacaatgtgatcacagaaggtcaaacagatcgtactatccaggagcaacgcaggcataatataactggagag

SEQ ID NO: 1635 - DNA, 346 bp, unidentified
  source 1..346: mol_type = unassigned DNA; note = unclassified RNA viruses ShiM-2016 sequence
cgaggggcgaatcccctcgtattcttttcaccaattgctaggtatactgggactcttagaggcggtaccgaaactatatatcatgatagtgtgtgggactcttagaggcggcactagattttgatatgtattgcatttggcttttcttacttcttcaaatttgatgttgtgtttaacacctagttaggattgtgtctaagtaactacccgtcctttggataggctctgcttattgatacgtcaaacctgggatgcggattaagaattgtgcactctatggacatggctcgaacacgatttgttttgacgacactttgaacccacactttggtcctgcgaactatat

SEQ ID NO: 1636 - DNA, 347 bp, unidentified
  source 1..347: mol_type = unassigned DNA; note = unclassified RNA viruses ShiM-2016 sequence
ccctgtacactggtccaggcagatcggtgtgcagtaatgtaccgtctcagaggaccccatgtttggctcagaaagtacttgagccccagttgatatctgtcactggaagtacagataacttctatggaattgaccgaccatatgattttagtaggtttgaactgcagtcggaggtggttgatgatggaaccgttccaagcgtttctgaagaagaagttgtacaaacagtttcttttacggataacgctagaggcgtttctgtcgatctgccaacctcaacgaatgcagtggctgtcgtagataatacggacgatattggtttaggaacttttttgtcccgtccagtc

SEQ ID NO: 1637 - DNA, 347 bp, unidentified
  source 1..347: mol_type = unassigned DNA; note = unclassified RNA viruses ShiM-2016 sequence
gttcctgatagaacaaaacagtttattatgaattcgtaacatccaggtcaacgagcaagaatagagtgaatgaaaagaccgattataaatgtaggtcgttcagtaattcattgatacattaaggtcgcctaacacccttgtatatctatttttcgttctagtaagttggagaaatgttatcatgaaattttaaatttgtctagttttaccgttgtagtgacggaaacccctgcagaaagaaatattttcagagaatacaggtatcaaacttattattttctatatctaaaaattttaaatattattattgcctaaattgaattgtctcaaccttaacttttaacaat

SEQ ID NO: 1638 - DNA, 347 bp, unidentified
  source 1..347: mol_type = unassigned DNA; note = unclassified RNA viruses ShiM-2016 sequence
ccattgacgtcttgctcatggccttcgattgggcaagaccttggttgtaaccggccagtagggtgggtgtgcgcagcatccagcccgagtgtgcgggtgtgtggcgtgctggggagcttatgcttgtggagatttgcggtcatttagggacgaggacctaggtgcgagcaatatcctagagagccaacagcgatgacctaagagccataccttgatcactgaccagcacagggggattccaccgcggtgtggcgctcatcccggggaccggcccgtgtagagtgtatgaaccggataaaaccccacgaaccagccacaacctacgcaacacgatttgctacttcaac

SEQ ID NO: 1639 - DNA, 347 bp, unidentified
  source 1..347: mol_type = unassigned DNA; note = unclassified Riboviria sequence
accctagggatgttgtcggtgtggggtattcacccttttacgattaccttccggtactttcgacgaaagtacaaccggatgggagaagacttcgtctttacaccatcccggagggaaccatacttcaacgttctcatggcggtcaatccttaggaaagctgccatgggaggggggaggctccttctcgacgagaaggaggaaactccttagagttgtactcacaaagtccttaggcctaaggcctaccgttgtggatatcctattgacgaggtcaataaggcattttcaacggatagagggagccatcaatgccgtcgtcgacagcctagtgtgctctgaccctact

SEQ ID NO: 1640 - DNA, 348 bp, unidentified
  source 1..348: mol_type = unassigned DNA; note = unclassified Totiviridae sequence
tgataaatgagtcaacgtcacaactggacacggaaacaagaaagcgattcgcaccctcgtctccagtgctggcatttacacgactcatagtatcagctgattgatcccttagctgcatactgaacgcgaaccgggcggtccgcagggtgccaaataaacgagtgggaacagctactttgaaaggttgttgtttggcgggctgcacttgaatccaatgtggtgatggttgggataatgtacactagtcactaatgcggagacgtatttaaaataatatcacagttgaaatgcgtaatatgttaagcatattaagtccgattgtaacctgaacaaggccaacttaatcgg

SEQ ID NO: 1641 - DNA, 349 bp, unidentified
  source 1..349: mol_type = unassigned DNA; note = unclassified viruses sequence
ccttcttaagttcttaagaaagaataaaaactttccatccggttttggaataccaaaccactttctatcgttcgttgaaggtttttgtgttatcacaaaacagaacgactgctttttggaaatccaaaagctaacagcttagtcaagcatactaaaaacttggaataccagtttttgcctttaactactagatccatgcatttaaattgcacttataacatcttctacagtagttaccactgcgatttggacgattttacgatccgtgctagcagtgaagatacttggcaagtattaatttttaccacgctatttatcctgtccgcttttatattcattgtcttctata

SEQ ID NO: 1642 - DNA, 349 bp, unidentified
  source 1..349: mol_type = unassigned DNA; note = unclassified RNA viruses ShiM-2016 sequence
gctatatacggggctaacatgtaaaaatgctaaacggcatgttagcttgaacggataaaccgaaagcgggttgtttaaccttactactcagagcttatcagagagatttagcaacttgtatgaattgggcgattcatgcatgtacatatagtctgctacaataacaaaagaaacaaattgtaatgaaatagaagggatttctaatcctactttcactgatttaacaggcactttggtctcggcaggtgttgcaccagtttgtgctgagattccttacacagtgccatcatcttttatttctacttctgaggtgtctcaggatttgagagactatttttccagaccaagg

SEQ ID NO: 1643 - DNA, 349 bp, unidentified
  source 1..349: mol_type = unassigned DNA; note = unclassified Riboviria sequence
tcactccggggactttaaatccggcccagttttaaatctgaaggtaagcaaaattaatgtatgcatatggataccaagtgtagtgtatatttgtatgttttgtaaactagcttaggctttgcatatttaagggtccgtactgcggaagagagatctgagttccccctgctcaactgtaaatatacccttccactatattgagcgtagttagtggattgtacatagttcgttcggtaataattgtaaaacttacattaacatctgtcgagatgctaaaaacgacgtcgaggtcggtactggaagccgacctttgattgaggtaaattccaacgcccatgacaaacctgaa

SEQ ID NO: 1644 - DNA, 350 bp, unidentified
  source 1..350: mol_type = unassigned DNA; note = unclassified Flaviviridae sequence
aacaacgctaaaccctcaaacttttaatcaccacaaacaaacgaaacaatggcttcgaccaaagttttctgtgtgcgtgacgaggacgcgattgcggaacgtgctgccttgctgagcgacgtaggtctcaaaaccttcatgtcggcaggagcgcgcaacgctgagagggccgccgagtgccaatcggagtgcatttaccgtccaacggtcgagcctctgactgggctgtgctcaggcggtgatggtcacagtggcacccaccctaagcccactgaccaaggagaagaggcggcaaacatcgtcgtcgggagtgacccttctggcgggagtacttgcctttatggcatggc

SEQ ID NO: 1645 - DNA, 350 bp, unidentified
  source 1..350: mol_type = unassigned DNA; note = unclassified RNA viruses ShiM-2016 sequence
ggaacttcagaccgtcatgtcttaaaactgtctggaggcctgcctaggtcgtcattactccaaggagaaaccaaaaggcgtgctatgtactggatacctgatccttcttggtttgtggttttgccaggagtgtcttgcttgcatagttgatggactgtagtggtcgaggctgtttagcttcaggtgtaaagtcgccatcagtaaaccactgaaggcagttgtgctgatccgcgcagctgaccttgagaaaaataaattggattactaacttatatacacttttcaaagagtcctgggtctctcaatacctagggaacacggacggattcttctttgacccctgtctcgag

SEQ ID NO: 1646 - DNA, 350 bp, unidentified
  source 1..350: mol_type = unassigned DNA; note = unclassified RNA viruses ShiM-2016 sequence
gtcgtaaaatattttctacgttaaatttctttcttcagatttcaaacgttgctgaagacaaaaccagagtttgcacatactcttaaatcaatgtacatgctcccttaattgatccggagcttgataggattttgtggtcctattctcaaatactgtaagaacggcaacagtacacaatatgttacattatcatttaggtcagaaataccgagttgattgaagcagatatacttctgtgaaatccactattagcatttagtggtcatgtctttcaagaagacacaggcttaggtccttggcgtgccaaaaacaacagcctatattaaatagttgtttgaacgtcgtaaaca

SEQ ID NO: 1647 - DNA, 350 bp, unidentified
  source 1..350: mol_type = unassigned DNA; note = unclassified RNA viruses ShiM-2016 sequence
gttatccttaaccacagcactttgtgacccttcagggggatatacctgtatcattcatccacgccgtcgaaagagggcagcacgtatctgcacagaaggccagccgtccggtggtggcgggtgcatgattacaaggccagcgggaatccgccctttgcggtaccgctggctggcaggtgcatgagcaccggtatgtgctgaccggggggccccattggggcccccccggttcattgatttgggatggcagggccccaacgcctgctccggtcacccatggtcggttatttccaatgggagctttggaaatttgggctcaccaaaccatttaacaaccatgaacagtacac

SEQ ID NO: 1648 - DNA, 351 bp, unidentified
  source 1..351: mol_type = unassigned DNA; note = unclassified Gammacarmovirus sequence
aacaaactaatcctcggggaagaagtaaagaacgtggtgacagcgggggaaaacaaaagaactcaatggggcgaaagatagccaatgacgctatcgctgaatcgaagcaaggagttatgggtgctagcacatacattgctgataaaattaaggtgaccattaactttaatttttagtgtatggcctgttaccgttgtgactccagccccggggattactccggagcattgcttatattatttatctcatttgttttcttttatattacctcgcttagcccgcaaggaaatacttacgttcatcacttcgataattcttccgtcaaaacacaatacgttggcatctctacaa

SEQ ID NO: 1649 - DNA, 351 bp, unidentified
  source 1..351: mol_type = unassigned DNA; note = unclassified Dicistroviridae sequence
aacaagttaagatgtgatcttcaaaattgaaataattttctcaggctaaattcattttgtatgctatcttaactcttggtgttacctatttaggtttacttccaggatgcaccgaggcagcccctcataaatccaggaaccctgagtgcttgatatttgtttaggtagacgatatcgataagaaatttacctgctgactttcaaaaaacaaactcaaactcaaatccagaaattgctaattctagcatctcgactgaacaacaagaaattgtacatttcgcaagcgaaggagttactcccacgactagcgcagtccctgatattgttaatctttcaacagattatttggat

SEQ ID NO: 1650 - DNA, 351 bp, unidentified
  source 1..351: mol_type = unassigned DNA; note = unclassified Picornavirales sequence
tgcactcctcaccacttgggcttaactcacaagtccttgcttcggcagaaaccaaaagagagtaaatatatgtagtcactgtgcgtaatgcgtttaattgtttgtcgcttcatgttgcgtaagaatggatgtatatttgttaatccgccagggcgatccctaaagtctcttttcagagaaaggttcggctgattcctagagtgcgtaaacaactcgctcccttatagttgtaaaggagggttttaaaaatcaactgcccaaaatcaaaataatccaaattggcgagatgagttccaagatctcctcgacctctcaaatgaaaaacttggcaaattagtgcgggatacgtgg

SEQ ID NO: 1651 - DNA, 351 bp, unidentified
  source 1..351: mol_type = unassigned DNA; note = unclassified RNA viruses ShiM-2016 sequence
aaggtccctctctccggttgactcctggaggtgcttgtatatattaagctaaagagtcatgtgtatatatggttacggccactgcatgttattttgtgtcttgttgactgcttgtggaacgctttgtacataaggaattgatgggtatttacccatggtctcgccaaccaaccacaacgcaccgtgcatttatggagttaatacgctcctatgtaacgttttaaatgtattactacgcttgaaaataataacaatgtaaattcatatactttaactgtagataatcataaagagtcgatcgttgcgttccatcacgctgatgccgcctggactacgaaggtggattctatt

SEQ ID NO: 1652 - DNA, 352 bp, unidentified
  source 1..352: mol_type = unassigned DNA; note = unclassified Picornavirales sequence
gaattttggaagtaagatcgattttaaactttgtagcctccgcaaagcaaaataagagaagtacccacttgttgcaaccgcaagttgaaataagagtagccatttttgtagcataccgcaaattgaaataagagtagccttttctcaaatacttatttaaaccataaagattgacaaatataaaggattgctgatactgttgtatctataccttcctcaaataacactcctattgtcttcaattgccctcctgaatacgttgagagttttcgctcaattcttttcgtaattagattacctataaccattcttagagttatcaagagatcaatagacgaaatactcgctgaat

SEQ ID NO: 1653 - DNA, 353 bp, unidentified
  source 1..353: mol_type = unassigned DNA; note = unclassified Riboviria sequence
atcttccgtatgatccctcacatgacggaagaatccatagcaacggtaacgttgttggaggaattcttgagggcgctggaaaaggaatcgagaaagagaaggagcaagagtggacacgagaagagcgcaaacaacatgagcagtggcagtctggagagtcatctaaagaacgtggatggcgctctggagaaaacgccgctgatcggcgctctcgtgagagagagaatgaacttgatcgtcaatggcgcaaatggcaatctgaatatgaaaatggacagatagccgagcgccagagacaaaatcaaggatggcaatccggcgagaaccaaaaaggaagggagtgggaatctcga

SEQ ID NO: 1654 - DNA, 354 bp, unidentified
  source 1..354: mol_type = unassigned DNA; note = unclassified RNA viruses ShiM-2016 sequence
caaagcaacatggataccaatgtgtaggaagcattaggcttatagctttgtttaataccggcatcccaaagccaatcttaagataaaaatgagtgtattatcttattatatacaacacttactaattttttaaatttatatttatcagagctgggatatgtttcccagtattgcagaaatgcaattattatagaacataatggtgtttttaattatagtaaatttgtggagcaatccgggaatttaatatctttaaatacaccattagatacaaacgtgcagcaattcacgctaggcgcccctataaacagtacggaagtaccgggagaatcggatgagacttttcacattgct

SEQ ID NO: 1655 - DNA, 354 bp, unidentified
  source 1..354: mol_type = unassigned DNA; note = unclassified RNA viruses ShiM-2016 sequence
gattacatgttttgtgatttatgtgtttgtttaagtgttagtttatgtgttttacgcaccatggctaggggtcacaacaatgggattagagttgtgtcagcagagcccggtccatgagtgtaagcaaccagggttactttggccctatactagtgttcgggttgttaaatataggatactagatcccgagtccttttttaagagtaactcgccttactacgggactttaatgaatgagttgccgatcatcataaaactaaggaggattattaccacgacaatgtgcaagaaacttaccgtttcttgaacaacaatcaaacaacggaagcgacgcgcttagaagtacagacaccc

SEQ ID NO: 1656 - DNA, 355 bp, unidentified
  source 1..355: mol_type = unassigned DNA; note = unclassified Bunyavirales sequence
agacagagtcttccatggtcttactttggcgccttgagatacttttaccttttcataggcactttaatagttgtaccactgcttgtaatggtgtataaggcaataaaaagtttgctcaacttcatgttcaaaaggaaaagagttagggcctgtcatccaaagaaagtttaggctagataactaggtgcgtggcttgattaacacaaagcagccttgagttgataagagtttaattttgatagacaaaggtgaaaactgaattattggtttctatcaaaattactttctttgcttcaaggtggggctgggaattttccctcctcctgtaaaacccttaaaggccaaagaaaacgcc

SEQ ID NO: 1657 - DNA, 356 bp, unidentified
  source 1..356: mol_type = unassigned DNA; note = unclassified Picornavirales sequence
cgctaaacaagttttccgtgcgttcgactaaacgtcggctgggtggacctattaacgataagatcggcgctcatgtgctgattactgataatctcccggataaattaccacttaagtattttgatggtattaatctctcaggaaagaacatccctgggaagtattcatatattaaggtacctacgcgtgcgaatccagagatagctgaccaagagaaagactcacctgaagcattgaaacatcaagatgcgggcggacctgaccagacaactgtcgaccaatcagcacaatcagcaataacaactcagagagatgagtcagcacatgaagtccccgtagttaataaggattctggc

SEQ ID NO: 1658 - DNA, 356 bp, unidentified
  source 1..356: mol_type = unassigned DNA; note = unclassified Picornavirales sequence
tcctttcatttaaaactcattaatttcattatggctcaatggaggatgtgaatctctcatatatggccgcacgtaccatatatgttagataagcactatgaacttagtgttttagatcatcttcacttgtataattattttattatactaaatttgagtcatgttagatttgttgaattatcaaaatagtaaatgtagtgtattctctccaaaggagaactttagtgctatttctttgtaatatccatttattctaggaaagttccgaaagaattgtaacaatagatatacagagtgttttgatatgaaaacaaatttgacaaccccttgtaaccaacagtattattttaggcttt

SEQ ID NO: 1659 - DNA, 357 bp, unidentified
  source 1..357: mol_type = unassigned DNA; note = unclassified Totiviridae sequence
tgaatgaaaagcgcgagcgcggcgtcgtgtcgaccgcttttctgatcctgctggttgctggaccaatacccatcagtagcaggcagggggagtgcctcgagtcacagttaacgtcggctgtgtcacgacggtcagctcctagtaaattgcataggagttcaccctgtgtattcgccctgcggggtggtacactggaaccacggtcccttagcccagggatagcgccgtggggggatcgcatgagggcgtagttagggttctgctattcagacgtacgcacattaagtgtagtaggccgtcatgtggtggtaagcctaccgctggtaccggggtacagcgcctacgacctacaagctc

SEQ ID NO: 1660 - DNA, 357 bp, unidentified
  source 1..357: mol_type = unassigned DNA; note = unclassified Orthohepevirus sequence
tcttttgatgccagtcagagcactatggccgccggccctttcagtctcacctatgccgcctctgctgctgggctggaggtgcgctatgtcgctgccgggcttgaccaccgggcggtttttgcccccggcgtttcaccccggtcagcccctggcgaggtcaccgccttttgttctgccctatacaggtttaatcgcgaggcccagcgcctttcgctcaccggtaatttttggttccatcctgaggggctccttggcccctttgccccgttttcccccgggcatgtttgggagtcggctaatccattctgtggagagagcacactttacacccgcacttggtcggaggttgatgctgtt

SEQ ID NO: 1661 - DNA, 357 bp, unidentified
  source 1..357: mol_type = unassigned DNA; note = unclassified Rhabdoviridae sequence
tccaccctgatctccgaaactccccaagtcagcagccggacatcaaagcaaccagagcaaccccaaaccactcagaaccaacctcactataaaaaatacatatcttttctttctcaacaataacttaagctccgcagctctcaatctctcaaccagaagaagcagctccatctgaccctagtcaacacactccgatttagcaatcaactacacccaaactcaaacaccccgttcaaacagtcctgcaaccgctgcacgcaccaccggaacacatagataggtgcatacttctgcactttagaaaggttaaaaacgctccaagtcaaagaagtcccttaaaacttaatagaagccaaa

SEQ ID NO: 1662 - DNA, 357 bp, Hubei hupolycivirus
  source 1..357: mol_type = genomic DNA
tgtagggcatcatttcggattgtgggttgatgtcctgggcaacggaagccttgagatggtacgaagcatttttggaacatatgaaccctgacatggtgatattgtcgtttgacttcggttaggaccctcatgcggaccagtgaagaaaattcctattggaatgtcctgtacgcccgtctgagaccgtttaccgtggaatgaaagcgaagacttatcatgtaaagattgtgtggaaagaatttgtgggtaacatggttcattagagctccttataaaaaacaaaatgggtttcgacttcccaaacaaaaacataagaaaaataaaatgtagtgtaattagtaatttgcccctaaagag

SEQ ID NO: 1663 - DNA, 357 bp, unidentified
  source 1..357: mol_type = unassigned DNA; note = unclassified Picornavirales sequence
ggccggccgggtagccacaagctacccgacccatgctttaggagtcctttaggtgtattgtatatattaaacttcttgtatattattgtacttatattcgggacggtgatgtcccactcttgtcaacaggcgttgagagaactccattgcggcgttccttgcactgtgaggctgcagactgcacattgcgttgatctttctgtagtagcaaggttactggatgtagtgccagttggaggaaatacctttctagcgtccctaggaaatgttcccccctgggcccaatttggcccgagtctgataggtaattcagaccccttctcgtgtttgagcgtcacgcgagaattcagggaacag

SEQ ID NO: 1664 - DNA, 357 bp, unidentified
  source 1..357: mol_type = unassigned DNA; note = unclassified Picornavirales sequence
atgtgatattcaagaggcattctttcatggtcacccatcacataaggaaatttccaataaacttgtgtgtaaggcttgaaagaatggtcggagtactctatttagagtgaggagctccgctggcagccccagcaaatcctctattggataggaacagctatatcgggtagctatagcagtcgtacagtaacatgtgcggcgttccgaaataccatacctggcgattcaaacaaagaaaacaatactaccaacgtacataacacggagctcgcgtcgagttcccaagaaaacagtgtcgaaacggaacagattacaacctttcatgatgtggaaactccaaataggatcgataccccc

SEQ ID NO: 1665 - DNA, 357 bp, unidentified
  source 1..357: mol_type = unassigned DNA; note = unclassified ssRNA positive-strand viruses sequence
cagctctagcggtctgttattttgtttaaactttttgtttgcaaactagactttgtcgaaccccttgcttacaaaccattaaacaatttatatctcacttactgcccatattagagttagcactttgttaacttacaaagttaaatagacagttgtctatcgcttcgcaaggagcactcaccctctccctcaatcactactaagtgtgcgagagagatccaaatttttaacatttttataacttggttttgtttcatcagtctcacaatattttctgtccgacaaatccaagttattcaaatttataagtttttaaatttttatttttggaaagttgtctgacttcccccggaagcc

SEQ ID NO: 1666 - DNA, 357 bp, unidentified
  source 1..357: mol_type = unassigned DNA; note = unclassified RNA viruses ShiM-2016 sequence
cagggatcgaaaccctgtatatatcttagagagtttagcagtcgcgcattgtaaccaagacgggccggccctcaccaacacgtagtgattctgcggtttggtgttcggtgcagtgtaagtccctacccttgtttatcttgtgatcagagtgtaagtctactcgaccaaagaactcggtttttacataagtttctattccgaatccaaagaaactcaggagtgatcgggctccacgtacagttgcgacactgtgcgtggcgtcgtcaggtagtgtaccttgaaggttatcctagaataatttgcaaatttaggacatttgcacgtctcccaggacgttaaacggttcgaaaagacagt

SEQ ID NO: 1667 - DNA, 357 bp, unidentified
  source 1..357: mol_type = unassigned DNA; note = Changjiang tombus-like virus 5 strain CJLX42586 hypothetical2 sequence
gggtgcctagcgaaggtgtcgggtgtggagacaaacacccccattggtcatgtggagatcgatggtgacgttttgagatggcgtcagacaaataagctggggaggtcaaaagtgcgtgggttgtggacggtgactggcgccgggttccacaacagatatggcgtgcacaatgcgagtaaagccaacttgctgcgaggtgtttatgagagggtgctctaccgtgtggtaggtggagtagcacgcctccctccaagaccctcgggggatgtgttcaatgaacgcttgtccaagtttcgctctgccttggtggcggaaatccctgaaagtctccccataacgcgtgcccactttgtggac

SEQ ID NO: 1668 - DNA, 358 bp, unidentified
  source 1..358: mol_type = unassigned DNA; note = unclassified Orthorubulavirus sequence
taatcagacatgatcatatgccttgcaacagctgtctgctattctaaaagtttcagtaaccaccgatccaattaactggcacccatttaatccatctatttgcctttcttgactcccagctgcacactcctccgggcaactctgccatcttctggcttctatagactcacgatctgcaatccggcccccgccttcctgcatctggcattccaaagtgaggctcgatctcagcatttagaaaaaaccatataggcccgactggcaccacccacccccccgacccaaccgccagccgggaacacaaccccacaccccacagcaagcccacacccgcccaccagcggagacccagcggaga

SEQ ID NO: 1669 - DNA, 358 bp, unidentified
  source 1..358: mol_type = unassigned DNA; note = unclassified Picornavirales sequence
acgtgattatgtgatcttgctatactgaataaataagtgatgtaaaattagtatagtattgctataatcataagaaggtggactatttagtcttacttccaggatgccttgaaagcagccctttcgaaatccaggaaccatcactcgattatacgtcataagtgtcgcgtataatttaaaaactgcacttgccgaaacgaatacgaacgaaaaccctggtacaggtttaaatgttaccaacgatgatgattcgagatataacgaggtaaaacaagttatatcttttaataatcaaggccagacagttgctgatgatgctctagctaaacaaaaagatttgcctcagtcttatttagat

SEQ ID NO: 1670 - DNA, 359 bp, unidentified
  source 1..359: mol_type = unassigned DNA; note = unclassified Blunervirus sequence
cacaaatctgaaccactcacgctggtttgtcacctgtattattcaggtttactaccttcactacttcttcactaccatgcgcttaattgcgtgactacatgcgcttcggcgtgactagcgcttcgtgcgccttccactactgtattatgtaatatatccgtttctttcttcctcagtcaattgtgtcggattgtgattattaccaatcaaaaagcgcggttcctactacttcaccgtgtgttattggtactttttggttaataattacattctgatcaattgacactccctaaaatccaaattctttccctaaaatccaaaagtgagtgctattatacgtattagtactttataatatt

SEQ ID NO: 1671 - DNA, 359 bp, unidentified
  source 1..359: mol_type = unassigned DNA; note = unclassified Picornavirales sequence
tgaatactgcagttaatacagctaggccgacgtgaagtatcataggcggagaagggaaaatccggttatgtaacgtcgttaatataaactcgtgcgttgtgtgtttggcgacatactcaacttaaaacaatgttctttggatggagttcagctaacccctgttaatttcatcgttctggagtagtttaaagtagtgaagacgagtgtatgtgaggattccagcgatggatgaaagtaaggctcccgaaaggtgcaacctcatatgtctcgttgtagtagcgaaatttatgaaactcaaggaatggaccgttgggtaaaaacactcaaaactctctcttttcttatttggtacactacat

SEQ ID NO: 1672 - DNA, 359 bp, unidentified
  source 1..359: mol_type = unassigned DNA; note = unclassified Picornavirales sequence
cacaaattaccttttccccctctactgattggttcactcgttatgactaggactggatgtttacgttacggaatttgcgatttcactgagtttggccagctcggaatggcaattttggcgaatgtgggttattgtgaaacgcaccgaatatactcccgaaaggaggttagtaggggcgtgtagcaccacatagctgagaccacatgcgacagagcagataggagccaggaaatacgcctcatttgttgacaagtgtaccggctctgaatgtgtggggaggggtccccacatgggttctgtactgcctgatagggttgcggctgatcagttgcaatgtggtataatcagttggaattcac

SEQ ID NO: 1673 - DNA, 359 bp, unidentified
  source 1..359: mol_type = unassigned DNA; note = unclassified RNA viruses ShiM-2016 sequence
gtggggcacacagtagttatagtagttatatgccggacccggctggggggccctgtcactccttgacaggcagtgaacgtcactggcttatgcaaaatagcggatgcctgttggaaacatgggctgaaaacacaagaaccaacttagtattggataccactttgtatataattatgaatatactgtatatatacaagtaggcttgctaagtttagacacgtccctcgtggcgatgccatttttatggttgtatggtcgtacattccagtatattcctttctgtggtgataatcatatatcatagggagtagaacttgattgctacaaattcaaattcacagagtagcccactctataac

SEQ ID NO: 1674 - DNA, 360 bp, unidentified
  source 1..360: mol_type = unassigned DNA; note = unclassified Flaviviridae sequence
gttgacagctgcacaatacaattcctaccttgaaggtacgcgtgttctcggacacaaggcgtgcaagtggaccttcggtctgcgaaccccaaagcgttcaaaaacgttcacatcgttccgatctgctgtacaattcgctcttccgtatctaccactctattgatttagtatcactccttgctgttagcctttcaagaaatttagatttactcttacctctttgcacctccactgctccgcagttgtaggtgcactctctcaattcgtagttccgtcttccctaaagatattctacccgcggctcgtttacacctcgtaaaccccgttacgctccttgccacctccctcaaagaggcagtt

SEQ ID NO: 1675 - DNA, 360 bp, unidentified
  source 1..360: mol_type = unassigned DNA; note = unclassified RNA viruses ShiM-2016 sequence
catactgccatagcggaggaaggttgcgcgtgagatatattggatacttatggtttaatagcttgtatctcacaatttattggtggaattaaccatttcatcaaccagtatcatataatgagtgtaatatgatacttaaacgcacttactaatttaaatatttacacatcagagtgggagtatgttctcccacatgcgcataacagcattaatcaagatagtatactatatgcaagtatatcatgtatatcagagcattcatcggtagaatttaatgatacaaaagtcgaggatacgaatgtgttgcgttacgcattgggagaaaccagttataaaactgaggttcctggtaatcgtgac

SEQ ID NO: 1676 - DNA, 360 bp, unidentified
  source 1..360: mol_type = unassigned DNA; note = unclassified RNA viruses ShiM-2016 sequence
ccttgggggtcatctggcaatgccagggttcggatctgtagaaatacagactatggtaatccataggaaattaatctccggagtctgtctggatactgctgagacagatatgtcttaagtaggttaagtgtgctttgccagcacacgtgtcattgtgtgatatacgtgtatagtaacgttggctaacgttaccgtgctagttgttatatgatggcgcccgtgccgacacgagtacattctagtagttcagtatgcttagcatgctgttctgctggtctgtacagatgtcatacacacaaccagggctgggagtagtaactaggaccggtccttaacactgtcaaacagacaggaggactt

SEQ ID NO: 1677 - DNA, 361 bp, unidentified
  source 1..361: mol_type = unassigned DNA; note = unclassified RNA viruses ShiM-2016 sequence
tatagacgtacaacttaaacagttgtcgtactagtatatatttgccgtatcaggtgcgtaaacccgggcggctggcagacgcgaagctccaaacctttagaaaacacaattttaaataaaagttatgtaagatttgtccctatcatttgatcgaactcttaaattagatcatttgagaactccctgtttgtctctattcaaactactatttgagagtagagagattcacatttcttcgttaccctttaacgttaaaagggacattcttaaagcaaatggagtttggcttacgttattgtgcgttaatcttattgctggaattgagctggattgctcttccaagcgtaatgtttgatctacg

SEQ ID NO: 1678 - DNA, 361 bp, unidentified
  source 1..361: mol_type = unassigned DNA; note = unclassified RNA viruses ShiM-2016 sequence
aagaatcaccagcctcggcttcagttatggtggaaaagtcagaccaatccacagagatcttgctccagcaagcgagaataactacatcgctcgagcgtttgatttgtttaatggaatccaagaacttcaaccatatggagtccctgacttcacagaccagtggtccaatacaagggccgaatatagcagcttcttaaggcatgcggaaattagaagtgcgttagaggtccccactattactcaacaacaaaagaacgcactgttgaacatcgctgaggaccgatattctataatcaaacataaaatacaggatgattatcttgatcctgtaaatgtacgggatattatttgtaatttgaat

SEQ ID NO: 1679 - DNA, 362 bp, unidentified
  source 1..362: mol_type = unassigned DNA; note = unclassified RNA viruses ShiM-2016 sequence
ggtagaaggccctgcaaggcctccctctatcttagtgaattgatgagtagatatatgtatgggtgggttgggatacgaatgatccctcccacaacacaccgtaagactacatgttggcacaaacgaccatgcttgcctctgaaacactctgcatgtgatgatgaatcactgttagccaggtggaggttttcaagaagtccgctttgtgttttcacgaatattacgttgagaatccatatgatcgaacacccgcgacaacacatgctcttatgggtacgcattaaaatataacccttctaaaccacattcgtccaaatgtggtccattgacttaggacaaccaaccccccaaaccaacacgcc

SEQ ID NO: 1680 - DNA, 362 bp, unidentified
  source 1..362: mol_type = unassigned DNA; note = unclassified RNA viruses ShiM-2016 sequence
gatcaaagagttcttcaccggagagaagtcgggaagggtataacaagggagcaatgaagaggaaagtggccattgatgccattgataagaatgatggttcagctattgggtcgatggtgattaacgcagatgaagtaacaatgaccatcaacttcaatttctaatggagtgtcccaaaggattcatgtgtctttaccagaggcccagggaatacgagccatcattcctgattgttttattcattgcagttctgctgttcacttgtacaatccttagtgctacacaacaccaaacaataaacaccgacaactcatctgttaagactcagtacatcggcatttctacaggttcgaaatcttaac

SEQ ID NO: 1681 - DNA, 363 bp, Lophuromys jeilongvirus 2
  source 1..363: mol_type = genomic DNA
tgattaaattggataaaagcttagctgcttggttatgagtgatattgtgataaataatgtgatcaattgaagatacttgattactattagtgataaatagattgttgtgtatgtctgtgattactaatgtaactgaattgttgagtttaatcagaccacaaatgctgctatattgccaatgagctattatctcatgactgatgacactatgcgagagattagtcccaacacaattgattgatataatttatttacaatagttctcaaggataattactaagaaaaacttaggcggcaggtcataatccgtcaaaagtttggatgcatgacttctgtctttaagatctgttaaatcatttttta

SEQ ID NO: 1682 - DNA, 363 bp, unidentified
  source 1..363: mol_type = unassigned DNA; note = unclassified Bolenivirus sequence
aaatattcatcactattagtatatacgcatacccatacccgagattataatacggtttctattaggtcgttaaacgagaccaaacagaattttcttgtgcttctttagtctatgttactatcgcataaccagattcaacaactatagtagttcctgagaaaaattccgcgaaaacgcgcacagaaacgttataaaaggtgtagtgtatcctattatacccatagttggtatacagatactagtggtgaaacattcacactcgcgacaaaagttttacattttaaaacaaaaagtaaaaacaggctcgttaataaaacaaacgatcccgctcaaaggaagtttgtttagtctcctctaagcagg

SEQ ID NO: 1683 - DNA, 365 bp, unidentified
  source 1..365: mol_type = unassigned DNA; note = Posavirus 1 isolate Ishi-Ya8/JPN/2015, complete genome.1 sequence
ttcccggtgtaaaaagctgggcgcggtctggctcccgtcgggtggaaaggtccaccaatggctggttgagtgtaagctccggtgctctggttgtcgcaattccagacgtcgtaataacctatattgcatctgactctaatatttgtggccctactgtatctagttcttcttctgctcaatctgactctaaaaaacaaaaactacaaaaaactgcttacaaccttgaagaattctttgatcatgatcttcctgatcctatggtctcttatcgttctaaaatttcaacaagaattcttgaaaatcaaggttgcattcactctgattctcatcttactcctcgtgtgttttcattctctactgttggc

SEQ ID NO: 1684 - DNA, 365 bp, unidentified
  source 1..365: mol_type = unassigned DNA; note = unclassified Picornavirales sequence
ggacctacacaagcgttaattcgcctgttcgtcccacccctttgcggcgcatgccatcgcgtcgcggagctagctccacaccaactgaggcacacgatgatagttactgctctgaggtcctgagtgaatctgaagagagaatggatcatcatgtttctgcgcctgagcgtccctcaaagtccatttttatggaagtacccggcacaggtataaatacgctcaaggatgggttgggtttcggcgaaccttaccctggtaaacaaccgcctactaaccaaacaacatacatgtcgggagactttaaatcacacacacagattgcactgcaagtgcaatcacaagatgagtatgaggagttgttgcaa

SEQ ID NO: 1685 - DNA, 365 bp, unidentified
  source 1..365: mol_type = unassigned DNA; note = unclassified RNA viruses ShiM-2016 sequence
aacttctggttacccagcttaaaggaaatttccagtaaactttaaagtcaaggctttagttctaggtcgaggtgccctatttagggtgaggagcctcggtggcagccccatcaaatcctctattggataggagcagctacattcaggttgatgtagcagttgttaggtaacactagcagcgttccgaaacatccagacctgcccaatccaacagtacgaacaatggccctaacggcccaacgattgatacgacggacgtcaagatcaacacaacccttgcttcctcttcacaagaaaactcccttaaagaaatcgaaatcacagctttccaggatgtggaagcccccgcgcttgccctcactcca

SEQ ID NO: 1686 - DNA, 365 bp, unidentified
  source 1..365: mol_type = unassigned DNA; note = unclassified RNA viruses ShiM-2016 sequence
tgtggattgcttctggctccgttttgttttgacttcgttaatcgaagcttcggatatttccgagacttgactcaaaccggcgttagacgcgattggctggcgtaaccgttactgaggctagaagggacgcgtcctcgcgatcccttcgtttctcatatttggtgcagctgtacacgtccgttttctcttaagtgtaggtgataggatagggtgagaacgcgggcgccacgttttagctttttctaggacgtccccagtggtttaatacctcggagcttcggctctcgggtccttccccccccgggtggtgtagttagttgggtccccagggttgtttcatcagcgcttcgttgtttttaaaaaca

SEQ ID NO: 1687 - DNA, 365 bp, unidentified
  source 1..365: mol_type = unassigned DNA; note = unclassified RNA viruses ShiM-2016 sequence
cgccattactactgtaccaagaaaacttcaaacaaacaacaactgcgacaaccctaactaatgtaaccgaaaccaccaatgcactcgaacgcggcaacgcatcgaacgtaaatccgtatctgcactcaacactcaaaaagacaccaattccaaacgatagattaggaacatatatatctggaccacagttaggtgatgcacgcattacaactggtttggtatacccactatcatttcaaaaaatatgggctaaattattttacagtttttacaaagtaaacaacaattcatactacggattagatcgtttcattcatcaattaagtaacggataccttaatgttacaggaacagaagatgatttc

SEQ ID NO: 1688 - DNA, 366 bp, unidentified
  source 1..366: mol_type = unassigned DNA; note = unclassified Omegatetravirus sequence
tttctctctcttaccaagtgcggtaaaacaaacaaagaaaggaaatcgagtgacaacggcctctacacacctcacgtccgtgaccaccggattatacgtcgcccgcgcacggcgccttttccgaccactcgtgagagtcgctggacagctgtccgtgaccacccgattgcagtcaaattactgctttcggaccactaagtttgtcctcgaacgacatacattcgttcacacactgtcttagcgagacctaaactcgccttgatagacagctcatgacagatcgttgccggcgcatctgtttcatctacctcctggctattccgttgctattatccctcccgagcaagacggctgggaacttttaga

SEQ ID NO: 1689 - DNA, 366 bp, unidentified
  source 1..366: mol_type = unassigned DNA; note = unclassified ssRNA viruses sequence
ataacgttgagaacgtgtgtgggaatgcctttcctagactagcttgcttggtaaaaaggtaagacccatgagggtcatatttgattttgttggttccgcttttggaatttggactgttcatgtgtgtacagtgagttcatcgacacatgtttttgaggaacgcctgaattggttttcaggggtgtatcagccccctcatgagtgggtttatcccactctttgggagcttttgcagcgtgtgtgtgatgaactaaatgagcagatcttatggaaccatgatgagggcgacatagacatacaacaagaggtgtgggttgaccctgaggagtttttgaattaggctcttgagttgcggcaagctctcaa

SEQ ID NO: 1690 - DNA, 366 bp, unidentified
  source 1..366: mol_type = unassigned DNA; note = unclassified RNA viruses ShiM-2016 sequence
gggagcttggtcaaacgaccaataacatgcacaggagttcatagtttagagttgaagcaccacacttggtgtgagtgctcctcgaacaagaattttaagcttcgtgttgttggcctgaccgagctcccttgcgattgcagggggtttaaggaggttgtgcacttaccccttgcaatcaagaattgtagtgagtggttctaccactgcaattgcgtgcacaatatagtcagcgcgttggtgggtcgcgttgctttgtgcgttccgtcacccaccactcatcgaattgagcaactttcaaagatatcacagtctttggctcgatcactggggcatgttctccctattagccaggaccaggttattagg

SEQ ID NO: 1691 - DNA, 366 bp, unidentified
  source 1..366: mol_type = unassigned DNA; note = unclassified Riboviria sequence
gtaacactcaactgtatacccgcgacgcgtacgggtcaacttacgctaacccttcttcaccagactacactgtcaggtttaaaacccaaaaggcagttaaaaccattaacggcatccgagtgacgaacttcgtcacagagatcatcgtcaatgatctggtgggcgttgatgtcaaaggcacgagtgccgttgataacattgccatccgcatacgggtgtcgggagccgctgaggcccatgatcgcgtgaaagcgattctgaaagccttagccacccaacttcccaattggtgcgacgagaacacgttcctcggttttgaaccgaagacgcttccttccgtcgtgagctgataagaggtccaataag

SEQ ID NO: 1692 - DNA, 367 bp, unidentified
  source 1..367: mol_type = unassigned DNA; note = unclassified viruses sequence
tttctctggttacccagctcataggaaaatgtcttttaactattgagtcaaggcttagaaattagaatggagggtcctatttaggatgaggtcctccggtggcagccccaccaaaacctccaaagactaggaacagctatatcgggttgctatagcagcatcaaatttatttgatgcgttccgaaacaccaaacctgctgataatcaaacgaacaacgagcaaacttctaccctcacaaatacaggacttagcacgacttcagaagaaaataacatcgaaacggtccaaatcacgacctttcatgatgtggaaactccaaataggtacactaccccgctggtgcagaacactgcagcaactagccgt

SEQ ID NO: 1693 - DNA, 367 bp, unidentified
  source 1..367: mol_type = unassigned DNA; note = unclassified viruses sequence
gatctccggtctggtgagaccttaaaccaccaatcaggccaatggccttcagcttagcctggcataatcgcactcgaccgtaagctgaacgaaccaaaaccggatgagtgagtgcaactcatctggacgactcatgtaccagcttgacacagctaagtacatgtaaggaaaatgtgtctctaaaaatcaaactcaaaataactatgattttgaacagttatcacaaactgttgaactcacggacattgacaacactaatgttgtgtctgcgcagtccccagaagtggaactctcttctggtgacccttttccagatataactcccacttcctttctctcacgccctgtgaagataggaacccatgtg

SEQ ID NO: 1694 - DNA, 367 bp, unidentified
  source 1..367: mol_type = unassigned DNA; note = unclassified ssRNA viruses sequence
gcccgctgtagctcggcggcattagggagttcagggtttccatatggggatttgtctgtcacacctttgataaagaaacagaatggccgcaccacatgttcgttagtatgtagctcacgcgggttggttacctaaaaccctctgcctagttggatgaaaaccagtaaggcatatatttacaaaaatgaacatctgagtgggatctcagtataactcttccccctgtccgtgggtccacggtcgatggtatgattgggggtgatgcaccatctaaacgcaagtgcagtgcggttcagtctcgcgcggcttgtcagccccccccaacccgggttcagagaccggtcttattctatttagtggtcacaac

SEQ ID NO: 1695 - DNA, 368 bp, unidentified
  source 1..368: mol_type = unassigned DNA; note = unclassified Picornavirales sequence
ttttgattactcccgaggtggttagcaacacatttgcaggtgttgttctaaaaaataatgcaaaaagcgaagagaaccttacagcagtggttcaaattcaaaaagaattcttagcagcagctgaattcgaaaacgaagaactcgttacagcagtcgagtgtggaagtggagctagtagcagcagcgctagcagcattgggtttacagaagtgcctgaggaaagtagtgaggaagaagaagaagagcttacagccgtgctcaccgaaaccagtgattttgatgaaatcgaagaaatcatagttggtaaacatcattacaaccaacgcccccgcaattcatatgtcgatgacttgtcctttgtgaacagc

SEQ ID NO: 1696 - DNA, 368 bp, unidentified
  source 1..368: mol_type = unassigned DNA; note = unclassified Riboviria sequence
cgccgaatagacgtcatgctctacgtttccagatttctggagatgtattgtgctacgcctacgtaggtgcgttcccttcccaactccccctgctcattagagcgggcttgttgggaaaacgccgtagggacatcgattctcgtttgaggctaggcctcaaacgcgatgttctagcggtatccgatttaacaagcaaccgtctcgcggttgcttcgcagatctggtctggtatcattgcatgtaccgccggatctggcttcgtctcccttcgccttgacaaggctcaaggaagagaagctattcatggtctcgcgagactagctttgtggctagtctcgaccattcgaaactctggcgcaactcacgtc

SEQ ID NO: 1697 - DNA, 369 bp, unidentified
  source 1..369: mol_type = unassigned DNA; note = unclassified Hypovirus sequence
gggggttagagaaatcttgggagatttctatcgtcatagacatatgtgatgtacttacgtctctaggacgcctatgactggtttatactctgtcgagttgaacgtctggtggttcctacgtataagaactgcagtcttatgtgtgaaaccctacccctcgctaaccgagaacggttgtgtgatttgaggaacgttcgctgtttaaacttctttggaggaactttaaattgtattaattttgcatttgcaagagttagcccatctctaaaatgaggctatcgctgtgaacagccttaaagaccctctgggcaaactgattatgaattgagagttagacttctcagaaaaagtctggtcttgtcctagatt

SEQ ID NO: 1698 - DNA, 369 bp, unidentified
  source 1..369: mol_type = unassigned DNA; note = unclassified Picornavirales sequence
tgcggtttactggtttatgtttatcattttaaagtattaaacaacgtaatggcttcatcagcaaaaactaacgaacaagctttagggactacagtagcagcacatggcactagtggccaagtgttagctgaaccaagtccaattgatcaacaaattcatgataaccctggtacgattaaggcgtcgactgcaattgaaactcttttcaaccttttgttcaaagattatatttttaaaggattgtataccatctctactgatatggctcccggacaaatcatttggaaattacctattcatccagcagtttgtaatcaatataatgatcacgtaagaaaaatgtttaatgtttggacaggaggaatgaaa

SEQ ID NO: 1699 - DNA, 369 bp, unidentified
  source 1..369: mol_type = unassigned DNA; note = unclassified RNA viruses ShiM-2016 sequence
agcctatgtgaaatagttggttttggcttaccaactagcgccactgtaatacgcgccgcacagtcagcttctgtaaataatgtaaatactgtcatcgccgagggtcaacaggttaccccggctgataaagacactaacctgacccacttcgaagatcttaacactggcggagacgccaagatctcggaggtagccattgccagttctggcaagtatactgagtccgctctgggggattggtttaagagacccatccttataagggaatttgtgtggcccgaggacactttgctccttgactcatttgacccttatttgctgtatttctcacatagtacaattaaaccgaaattgcatgggtatagtcga

SEQ ID NO: 1700 - DNA, 370 bp, Alphamesonivirus 2
  source 1..370: mol_type = genomic DNA
actaaagaaaattttgttttctcccataatactactactacaagtatcaaccccgtccgtctgctagagacgctaaactctagcaccaaaaatctagccacatcagttgcttaaagaaccccttgagacactctcccacttaacatcttttaggaatcttcgatgctacaacaacttggctagtaataacagcaaatccatatatttcaacagttataagaggctttatgtccttactttgaaagatttgtttactattgtcacgattactttaattaacagaggctatatttagtgctcagcacgttaacgaaagcatttgtacaatagtatgagtttgttgtaaattgtcttgatacgacaccctatc

SEQ ID NO: 1701 - DNA, 370 bp, unidentified
  source 1..370: mol_type = unassigned DNA; note = unclassified Riboviria sequence
cataagtacctatattcagcgccccggagcatcagttccgaagaatcgataacgattatccagagcattagctacaaaacgccttacaaagtaagaagacacgatacgataacgttgagtgtatgcgaacacaaagagacgaatacttgtggcatttaaagctgataacagctttacgtggcaagattccgcgtgaggagttgagggagataattataaaatatcaagtacattttaaaataaccccatcaatatatagcagtcataataggaatatagttagacctaagttagaagaatactataggatagcatattaggataagttagattataattagtggaactttccacctaatctacctccact

SEQ ID NO: 1702 - DNA, 370 bp, unidentified
  source 1..370: mol_type = unassigned DNA; note = unclassified RNA viruses ShiM-2016 sequence
cgatgggccggtgcttaccccgccaccatccaagtgcccggaggtcacatgcttgacctacgaatgccccaaaccccgggcacttacctcctatcccttcaacgagctgctgcaagccgcttcgcagcgattgtggtcagacgcccagagcgtctgttcccgcttttgcgcgaagggggtagaggcctcagctattttgctgaggcaaattcgagaatgggcctccaagaccgcgtttgcagtcttgagtatactcctgtattgtgtcaccttcgtatgttgggggacgctttatggcccgtggctactcgtctcgacctacccggccgagaccctcaccgcatgcttattggccctttgcgtgcgcttt

SEQ ID NO: 1703 - DNA, 370 bp, unidentified
  source 1..370: mol_type = unassigned DNA; note = unclassified RNA viruses ShiM-2016 sequence
tccgatctctcgtcgattggcagtacgatgttggagatgtaatctccaattatgcgtccttccaaggcgacggccttgtccttcgttatggctatctgatggacaccacaaggtgggacatcagtgtgtcgacgaagaacccgggtatccggggtcttccgtccacgttcgacgctcactggtggagaatccagaagcgtagaacgcgatcgactccatacggatttggctctaatcctggtgaattctcatcaggtcagtgggccattttggccgctcttggtatgaccaagacgccaagatcgctgcgataactttgtcgctccgatttacaactgaattaacaatttaataaacgaaggacaatgct

SEQ ID NO: 1704 - DNA, 371 bp, Odonate anphevirus
  source 1..371: mol_type = genomic DNA
aaatgaatactaatgtatatcatatgataagtattactacaactcatttcccgaaaattcaggatttttacgagttgaacgtggaatacttcaatttaataagagaaaaatatgatgcatacaagggagataaaaattctcctgaattctttgcatcaatcgacaatcaaaaacttctcttattaattgaagtatgtaactacataaattcaagacatggattattccaggtgccaatattactgttgactccacagtcaacattgaacgcatattggcagaagatcgtaaaaggcgatccaacatccctgcaagatctagttcgattttattcagctaaataatgagaaaaacccgtaagagtcaggaag

SEQ ID NO: 1705 - DNA, 371 bp, unidentified
  source 1..371: mol_type = unassigned DNA; note = unclassified Picornavirales sequence
atagttacataaattcatattcctatgccacaaatttaaaacaaaaaattcttgcacggttaagtggctcgtgcctacatatttccaaggagccttgattcttggagtgacccttgaggtccctgcatatagtgtgatggtgtagtataacaaatctggtaataaatatctccaggttttgcttgctgtaaagtacctagtgtctggctcatgcaagcacacgggaatcccgtggttgctatttcttcatattatatgtagcctgtgtaagatcaggtcgattggtggcggtaccaccctaggtgactgagttgtgtcacacctgggaactgaggttaatcagaacaatcttaaactcttatcttttcact

SEQ ID NO: 1706 - DNA, 371 bp, unidentified
  source 1..371: mol_type = unassigned DNA; note = unclassified Riboviria sequence
gtaaaactcaacttttatcacgcgatgcatacggcgttacatatgcagatcccaacgaccccgactttactgtgcgcttcaaaaccgcacctaaagcaaagagtcttaatggggctcgcaccactaactatgtcacagaaattatcgtaaacgataatgtggctgtaacagttggtgggcaagcggcggtagatgcagtatcattacgtatacgcacctccggcacccgcgagtctatgccgcgcctgaaggcgatgctgaaaagtgttgcctcccagtgcgaaacatgggctgacgataacgttctattaggttttgaacctcctgtagggaatgaacccgacgttgttgtttaacgggagtaaacgaaa

SEQ ID NO: 1707 - DNA, 372 bp, Menangle pararubulavirus
  source 1..372: mol_type = genomic DNA
ctcagaattatctgaacatctacatcaccaacttctaacccaataaatttactgtgtggtcatcctgcaggactcacttgctattgccaccctacaagtaaaagccaattcaacaaatgcattgctttaccgcacatcaactgacctggcacttcaaattcaaggaccccgccacagcgcatgacagcagccccgaggcaaccccctccccacaacccactacacaattcctctcccatcacccaatcccctgctagtttaataaaaaattagagaggtgaaatgcacacacacaacgaccggaaaggagcacgaacaggtgcacccacacaccaccccacagcgaccaacccgccagccatccaaagcatc

SEQ ID NO: 1708 - DNA, 372 bp, unidentified
  source 1..372: mol_type = unassigned DNA; note = unclassified Orthorubulavirus sequence
gaaatctatcacaagtctatatatgtccacaattgacccttaagaaccaacttccaacgattatccgttaaatttaagtataatagtttaaaaattaacattaagcctccagataccaatgaatatgaatatatctcttagaaaacctgattattatgtgatagcgtagtacaatttaagaaaaaacctaaaataagcacgaacccttaaggtgtcgtaacgtctcgtgacaccgggttcagttcaaatatcgacctctaacccaatttaacacccattcttatataagaacacagtataatttaatcacaaaagacctcaaaaactgacacagcttgatccactcaacatataattgtaagattaataata

SEQ ID NO: 1709 - DNA, 372 bp, unidentified
  source 1..372: mol_type = unassigned DNA; note = Human parainfluenza virus 1, complete genome.2 sequence
gtctacactcctcaataatgacacccattagctctaaatcgtaccattaatcaaatacagatcaattcgatacaatcagttcaaataagaaaaacgtagggacaaagtcctctaccaacatcaaggaagacaagagtctcaaaaagctcagcctaagcagagagaaaaacaacaacacaaagaaagaaaaggacaagatcacaaacaagaacaaaagcaaaaacaaaaacaagaacaaaaaagggaagaaaaacaaaagtatacacaaaaaccaaaaaagaaaaaaggccagagacaaaaacggaggcaagaacaaaaatttaaacaaaaacagaatttaaattcataataaacaccaagatagagacaaaa

SEQ ID NO: 1710 - DNA, 372 bp, unidentified
  source 1..372: mol_type = unassigned DNA; note = unclassified Picornavirales sequence
agtttagttttcacatttaaatttgtaaagactgaatttcactctgggagacttgctttctgtttcttcccccaggaaggatacgataatcctaacgcgcctgttccctcttatgcgaattctaattatgttcatagagaaattgtagatattaggttatgtaatgaagttacatttactataccattcatttcctcctcaccatggagacctactgacaacacaagttatgctagtcacaccggatatttatcagtgtatgtagttgaccaactggttgctccatctggagtatctacaacagttactattcttaaagaaatttctgctggaccagattatgaagtagcactgcctaaatcaataaattat

SEQ ID NO: 1711 - DNA, 372 bp, unidentified
  source 1..372: mol_type = unassigned DNA; note = unclassified RNA viruses ShiM-2016 sequence
ccctggggcccgcccacgcgcaacaagcaagtgcagctggaggccggcttgtatgcagccctgcgactggaagccgcctttaacaacaggcgaaacggggcactcccactccagctcaaggcaaaggcgattaggcaccttgccgcgtacgacactagcgcttattctccgctagagttgacggatttgatcctcaacacggtcgtagccgccatgcgtcctagtggtcccgaacacctcctagcctcgatgttcggcaaccatcgcttccaaaaggagctcgcccgccttgaccctctttataaactagcttgaagaggccctgctaggcttgacgccacctgcgtgaagggcacccccctggggcccctc

SEQ ID NO: 1712 - DNA, 373 bp, unidentified
  source 1..373: mol_type = unassigned DNA; note = unclassified Narnavirus sequence
aaataagacataaggcagttcctatctcaatatctccaaaactaagaaacctacatcaagactcgctccggcaatcaagaagctcaaataccaacgttatattcttcaatcatcaataagcaatcaaacttgtttatccatcatcaagcatcagtaataatgtcaggaataccatctgagtttggaattggtgttgatatgagcaaaacgattgaaaacatgaagaaacttcaaactgccatggaaaacgacccaaattttgatccttcattgttcgatgacaagaaacctgataagaaagtgaagggtaaaggtcctatttccgacttctttcgacaatctggcgactttgttactgaaactcctatgggta

SEQ ID NO: 1713 - DNA, 373 bp, unidentified
  source 1..373: mol_type = unassigned DNA; note = unclassified RNA viruses ShiM-2016 sequence
tgaaaataaagcgctcacaattgagaacaaatatttcaaacaaattatattgaaaatttaatttaaaattttattaaaagtcttttaacagaaaggggtattttagtattgaggtattattttacgttgagtaattaaaagcagtataaatctttacttttggctagtagtgctgcggcatattaatcaagagaaagttagatcttgtcatttggtataaaatcgaggttttatattaaaccaatttctagtaaaaatccttacgaggtagttattattaaactaaaaataaattagcaaaatccttctacttgaaaaacactgtgaagtaaggtaaggtaaaacaaaattaaaataaaacaaattatataaa

SEQ ID NO: 1714 - DNA, 374 bp, unidentified
  source 1..374: mol_type = unassigned DNA; note = unclassified Picobirnavirus sequence
gtaagaacagagaagtgaaggtaacgaagtcaccttcagaacagacaaacggagcctcaaagccgcagcagaagcagcagcggcgttcgagacccacaaagaaatcgttcaaagaaagagcgaaattcaacgttgacagatcacttactgaccagtcagcaacagaagtaagcgaaacactgtctaacaaaccgacatcctcttcggttttcttcccgagccataaggcatctgctctcagtgccgggaattttattgagtccgcaggtcaggaaaactttgttgaagatttttctcgagtaaaagagaaatacagaccaggacacacgttcagtattcgggctaatacacaggcaaagcgtactccaaacgct

SEQ ID NO: 1715 - DNA, 374 bp, unidentified
  source 1..374: mol_type = unassigned DNA; note = unclassified Tobamovirus sequence
ttgtacttcgaattatctataacttactgaaatttttgttttgttttgttcgttttgttttgatttaatatttgaattatgagaataattttgtcattcgcgattttatgatccaaacttgaccacctgggtgatcacgattcgggtgcagggaatgaaacgctttccagcgcgtgtagttttgaaagtttacttgttgttatgatgtgctggactaaattaataagcacacattgtggtttgtgacggtcaaccataaatactaagattgacctaatgacgtagtcagatggcgaaattaattggtataggttttgagtatctattaggtcaatcatcgcatttcttatacaattttgcttttatttagaatc

SEQ ID NO: 1716 - DNA, 374 bp, unidentified
  source 1..374: mol_type = unassigned DNA; note = unclassified Mivirus sequence
agtgaagcagagcggcacgcgggctcaggaaaaagcgcctggcttccctccacctcgctctcactggaggtagaccaaacatggccctccatgagccaagcagcctattatcaacccgtatatatcatttatgtttgtatatcttatgaggacgggtgccgttatgtactctgaagggccctcactcctccatgacggcctctctattagattttttcgccccgggaacacaggaacgagggcgttcagctattagatgagaagatcatggaggcatgtatccaaaattgtatcctcatctagccctattgtaatcctcttctcagggcaacgtttttctctgtttgtattaaaaaggatgatggaacgataca

SEQ ID NO: 1717 - DNA, 375 bp, unidentified
  source 1..375: mol_type = unassigned DNA; note = unclassified Partitiviridae sequence
caatgcgtatgtcgcccgatggggaaatccgaagaggcggtatatctgcagtatcatgggaactttgttccatgctaatgcacgtgtattctaagattttccggtttgcttggatagtattaatcaatactacttttataacctaagccggatatattaacaaagagagacttatgtcaccttggttcgcatctgctattgtccgtattctaattgcagtcgttgagatcatatcaaaagcgcctttaaaatagaactatgagacgactaattcgacaagtttactattggttgcgttatcgctacccttggtaataattttgattcgttctcctctttgacgtgattacctatttatttaacaaggattataaa

SEQ ID NO: 1718 - DNA, 375 bp, unidentified
  source 1..375: mol_type = unassigned DNA; note = unclassified Picornavirales sequence
gaagctgagtccttgacaagacgttaaactgtcgctagatgagtgtgatcttgcaaaactatataaaatccaaagtttcaaaagttttgtattgctgctcatcagttggtagggtcctatttaggattactgctcaaggtcctacgaaggcgtccccttcaatagcctagagcgctttggtacggtctcatttatgggtttatatgagtacttaaattttaacctgcttcaaactctaatattaaagtaggtggggaaactactataaaagcccaaaacagtatgcaagaagacgtcacttctggcaagttatctgatgaagttcaggaaactactgtttttaaaactgacgctaatattgtcaaagcttctatg

SEQ ID NO: 1719 - DNA, 375 bp, unidentified
  source 1..375: mol_type = unassigned DNA; note = unclassified RNA viruses ShiM-2016 sequence
tttttctgcaactataaagaaattatcgtgacgaccgccgctgttggcggagtcactgccatttgcgtcttagcttataagcgtgaatggtttgtttcaaaggatgccgtttatgctaaaatactcactgtatttagtacgaacgtgcagccggattatagggaaactgttcgccttgttcgctatacgccgctgaaagtgggtggagctcattcacaccccgatgctgcagctgggcgcacaagcgcaaacattttcatcgataaagtgtgtgcgagcataggtcatatcccgttctccctttcgagttcgaatcgtgatgtcagagctggaaatgacggatgccgcaatttttatttcagtaaggatttgacc

SEQ ID NO: 1720 - DNA, 377 bp, unidentified
  source 1..377: mol_type = unassigned DNA; note = unclassified Morbillivirus sequence
gcactgaccatatgatccactgtaataagtccaatgaaagtatcaattaataatattggtagtgcaatgagtattgattgtataatatactcctttaaactagatagtgataaagggttatagatgatttcagttattttaatataatcatatattgattttattatcttacatgactattatgtaattgaattatgtgtcatcaattaatagcttaataatatcgtttaatgtacttatattgatggatagatgtgttatattgtaatcaaggatttagtatttagaaaaggaaagagtttaatttgttgttaattagttattgtgtattcaattagaaaaaacttaggaatccatgttaataaaaatttattatc

SEQ ID NO: 1721 - DNA, 377 bp, unidentified
  source 1..377: mol_type = unassigned DNA; note = unclassified RNA viruses ShiM-2016 sequence
tagcacctaggggaagaactcttttgttcttcctctatgtagtgtagaataatatataccagttataacatgtagactcacatggctagggaacttctacacttgaaatacatcgtggagtctcacgaaaactactgcacattgtggcgttatgtgtggtttttaattttaatgccagtaaatctcgcgataataatgatacaaattcttctctggatagctcattatccaattttaacaatgagcaactttctagctcagaggcagttggctctgacaacaacacgacgacgatcgagagtcatctatcagatattgtactccgcaccatatcgagaacagacccaatttataactcactccccaaaccatatggt

SEQ ID NO: 1722 - DNA, 378 bp, unidentified
  source 1..378: mol_type = unassigned DNA; note = unclassified Hypovirus sequence
gggtgtagagaactcctggggagttcaatcgtaatagacatgtgtgatgtacttacgtctctaggacgcctattactggtttatactctgtcgagtttgctaggatatggtggttctacgtaaagaagctacagttctttatggacacactctaccccactttggacctctttaaaggtcaactttctttaaatttcttatttgttaaccctgatgggtgttcatttctatgcctggagcaacgttaagctggagtgaaaggcccgtgtgcctgaaacgtgagctgataacgagagtcagcgaaagagaaatcccgacgaagggtaaattttagattttaagttggagactgcgacagactgcagacacttggtcaaa

SEQ ID NO: 1723 - DNA, 378 bp, unidentified
  source 1..378: mol_type = unassigned DNA; note = unclassified Astroviridae sequence
caaaacaattttaaaaattcaggactttttggacaatgccggtatggaatatcccatacttacggatgtgaattaccaggccttatggggcttataattatggtaaccaaaatattttatgtgcttaacgtgcgctatactcatgttcggaaaatcagtcaaagacgaagaagaagcaaaaagagtgctaggacaagttttaactgacgaagaaaccttgggactgttcatactatcttgtattgaacagcaagagttagaaacagaagtagtaaataaagaaggagacgaagttgactgttggttggtacccatagtcactgcactaactgcttttatacctctagctcaggatataattagatactttatatcaaa

SEQ ID NO: 1724 - DNA, 378 bp, unidentified
  source 1..378: mol_type = unassigned DNA; note = Barns Ness breadcrumb sponge aquatic picorna-like virus 3 isolate2 sequence
acctgtgatatgtctttaaaagatcagctcagttttaaatctgagttctacggaatagcaaaattaatgtgtgtatttggttaccatgtgattatacatttttatattattattttattgttatataggctttgcacatatgaataaacttaggtttaccctatttagggaggcgtcgttcaccaatgtaaataatgtcacccatagagttgagtcactctttgggattgtaaataccgacttactaattttaaaacacaaaataaaaacaaaaattctttacagaagtccaagaggcttcttcaacgggaaattgatctcaactatcatgttgtttttgataaaggtttcccaaccgtcttccaaattttgacgaat

SEQ ID NO: 1725 - DNA, 378 bp, unidentified
  source 1..378: mol_type = unassigned DNA; note = unclassified RNA viruses ShiM-2016 sequence
tcttaaaaacgtatatatagtttcgttaagagtttttacaactcttctcagaaactacgagcttggtttttataaccagctcaaaacgatcagtccggatagacttttcgtctcacacttgtgtttttacagcacaaaatttgtttctcgatttctcaaatcgactaagattttatatcttaggttgcaccgcaaacataaaacggtagttcatttattgaacgaaacagtgttaaagttcacttacaaaactcttaggattttatatcttaaggtcgtcccgacgaacataatcggaaaagtgttaaagttcactcacaaaactcatagaattttatattctgtggtcgtactctcgaacataaagagcgtttcacg

SEQ ID NO: 1726 - DNA, 378 bp, unidentified
  source 1..378: mol_type = unassigned DNA; note = unclassified RNA viruses ShiM-2016 sequence
aaattggaactatgaatttaataaatacagctgagaagattaagaaattttataataataaattaagttacttatatatcaaattcaggaaaatggagttcccaaaattctatatggatttccagacagcgactcactttaaacctagaggaggcattcaatatttagatgaagcgaaaagagaaatgtattcgatatcttttgatactaaaggggactatgaaacggttagaaaatatcttcagcaaagccaaataaccggagcaagatttgcagcacttttgaaaggacaggaaagaattattggaaatggtcaacccgaaattttaacagataactatcaagctcaatatattaaaatttaaacaaataaataaa

SEQ ID NO: 1727 - DNA, 378 bp, unidentified
  source 1..378: mol_type = unassigned DNA; note = unclassified Riboviria sequence
cttaactcggagatgagaggagttgacggcactgcatcgaatttctgatccgtcgtctctggttagcgacgctataggtataaagtccagcactttcttgcatgggactcgtgccacttccatgtgggattcgcccaattcgggcggcactaatctgctaagagctcccttaacggtctgctcttcagcatcgggcatatttattaatgcacgacgggctgaatcgcctaactcccgtagatacacatctccgacccaagaggggctagagaacctgggaactccacagatcttctaggttctctagcccctctttagttagggggagcagcccttgtttttgttctattcttttctcgttcgtataaaataaaaact

SEQ ID NO: 1728 - DNA, 378 bp, unidentified
  source 1..378: mol_type = unassigned DNA; note = unclassified RNA viruses ShiM-2016 sequence
gacttattaagacacaaggatatccgtacattgtggtcacgaccgggggttgtcaagttcatggcgataaagcttggcgggataccctggcccatttggaggaggtggcaaatcattagtaattagtagattagtgtgcaatacgtttcgctgacggctagaacccgttgcttcggaaagcgcacatcgaacgtggaaaagacaagccacccggcctcacgcagatgcgggttgggcacaccacaatgtaggtacctgcgattcgcaagtgggtgcgcggcggcaaccttcagggcaacctgttgattgcgggacctggcgaggaacgctgactggaggggaaagacctaccaacccaaaagcaaacacacatacaca

SEQ ID NO: 1729 - DNA, 379 bp, unidentified
  source 1..379: mol_type = unassigned DNA; note = unclassified Hepacivirus sequence
cagggtttcgaccctggcccggatacctatcgccttacgccgaaaggtaacgagtaggagtcgggtccccaggcccttaccgccaccaagccaggtggggaggtatgggagccggggggtgcagctggtagctccatgggggacgccccgtgagcggatgctgcatcgataccgggttagctctctgggagagcggcacttgacaccacgaatccgggaaccggacaatcgccggcgtgggacgcgttgcctccgtggccgagcaatttggcatgcccgtggtgaagagtgatggtgggggggggccccccttccagtaccgtactgcctgatagggtcttgcctcaagcccagagagtcgaggctgaaaaccgccatc

SEQ ID NO: 1730 - DNA, 379 bp, unidentified
  source 1..379: mol_type = unassigned DNA; note = unclassified RNA viruses ShiM-2016 sequence
gtaggggataaccctaccataatatagtgtgatgatttagtcatctctattgattcacgcttgtaaaaagtcgtgttatgcacgacttcccgttgatcgggtttcacagagtttatgactcttaaagaattttctatgcgtgcactgccatagtgtgtatatgtctcccttgttcaacaaatgttggacatgttacaacgtcaggagaggaagaacgtttgccgggttaccacgggagtttgccgacactccgcagtacccaatggctttcgggattagccaaactggcttttcccttttgtaggatgccgtggcgggcctccgattcgcgtgtgtttgattcggcgcacgcgtcttatctcaatggattgcttcactt

SEQ ID NO: 1731 - DNA, 380 bp, unidentified
  source 1..380: mol_type = unassigned DNA; note = unclassified RNA viruses ShiM-2016 sequence
ggagtctgactcacgctggtgagcagtagagcatgttggaagaaacctgaaagccccgttggctgatggtaatggaccgggcgaagtccttaaactcaccattgggtctcacaatataaactacccaaaacggtgaccaatcctgtggcgtcgatcagccgtctgatttcttcggaataagatgtgtagctgaggtcagcaggtcgggtcttaatacttccgtgctaagtgtgttgaacctgtagcggtaaccccccctcctaaagtcggcgaagggtacttcgaaagtttggcactaaatgccgagagactacacgggtaggcggcgcgtgtaggaagacagagaggtctggactggcgatatatgccaggcttcttgg

SEQ ID NO: 1732 - DNA, 381 bp, unidentified
  source 1..381: mol_type = unassigned DNA; note = unclassified Rubivirus sequence
gaagggggttagaggacgcggcgcgatgatacccctggccatccggctgctcatctgttccgtggccctcgttctgtgtcagctgctgcgtctcacccctgaacagctgcaggcgcttgagaatttcctccaggcgatcggtgtgcccggctgcgtgttggcgctgtttcacaaccgcaccgcatgatctgggccgctctcctcctttggctgctcgcctgtgtgcttagcgccaccgtcgccagagtcacagcggtcctgttcctcgggcttgccgcgctgtacgtgctggcccgaccgtacggatcgcccctctgcaggttgttcgagctcttatgaactccgtctccaatctggtcagcggcctcatcggggtgggaa

SEQ ID NO: 1733 - DNA, 381 bp, unidentified
  source 1..381: mol_type = unassigned DNA; note = unclassified Mononegavirales sequence
gtgacagtcaccttaacctcgcaaaatcttagaaaataaatccttctgaaaaactcttgagttcataattatacctaggcttaccggattatgggtgcatggttgatacttttccgcactagtattattcttgaactcgtgcaagtctgtttcgagattactaaagggctggttttatcacaagcagaaaaagaaacgcttaaagaagaacgcaagataatcaaggaaaagatcctcacttcgttgccacctagtataagagattctgctacgcattcgtcttaaggaaaaaccgagttcacaattcaatctattacaaatcactaaagctcatcttaagtgccttatttcctctgtttttcttccctcgtacgtgtcttc

SEQ ID NO: 1734 - DNA, 381 bp, Hermit mivirus
  source 1..381: mol_type = genomic DNA
agcacttgagtagacaaatgtcaaaaccaagcgctgaacactttctaagagaaatcatccgtcttgaagcggagtctcgctccatgatggaagattcgtacaaggattctcctgcggtgattttctgtcaacagcactttggtcctggtcggggtctttgcgcctgtgtattcctacgggtagccggagttcccctcctggactgtgtggccatgggggatgttgagaggtatagccttgaggcacaggagttgatcggaagaccattcgcatggaggagtgattgtccaaggtgtggaagggagtaccactgccccagccagtgagtagacccagtaaagatagctgtttaaaaagcattcttatctgatttctctctgc

SEQ ID NO: 1735 - DNA, 382 bp, unidentified
  source 1..382: mol_type = unassigned DNA; note = unclassified Riboviria sequence
ggaaccggctttcctctgattcaagaaagcgcagtgtgtgtaaagcaatagtgcgtgcaagcttacattagatgaattgttagtacctatacgaatgaggcagatattctttgttgggatcatatatggtaacatatacccttcgaaatgcgtctgaacctcaggatcatgtgcggaaaacagattcttttgtaagatcttttactagtgtttttacttttgcaaaattgattaagttcggttttacgacagtttaaagaaatgctagagtttgttataatatttctggagagactttgcggctaaagcaaaagtaagtccagatgactttggtcactttgaagaggaaagtgacaggtgtttttcccctctctttttaact

SEQ ID NO: 1736 - DNA, 383 bp, unidentified
  source 1..383: mol_type = unassigned DNA; note = Picobirnavirus sp. hypothetical protein and capsid protein genes,1 sequence
gcctcttttgcaatgttagatcgatgtgcttcatcttccatagcctgattatgtctcttcagttcataattggctgcagcactctgtctttcagcttccatattgtgacgctgatcttcggctgctttgaagaaagcaatttggttacttgtcatcattcattcctcctttctgttgatgatgaaagttgtaatcatgtaatttgcgaactagtccacagcaccgaatggctgtcgctagtttacatgaaagtgtggtttttaaactgtgtaaaaccataaagtgttctcctttctgtaaactagcgacagccattcagtgctgtggactagttcgcaaattacatgattacaactttcatcatcaacagaaaggaggaatga

SEQ ID NO: 1737 - DNA, 383 bp, unidentified
  source 1..383: mol_type = unassigned DNA; note = unclassified Aparavirus sequence
ttagggaccgttgacgacagctccacgtatatgctcattacgcccactgcggaaacaatgtgatgctgtggtgtatacgtggtcaagctagcggcgtgtcccgcttattttagttttagtctatcttaggttaggttaatttagtttgtagttttcttttctccatgtctggttacctatctatcttaactacgctccagacgactaaatttagtatggctttcatggagaggtttgctattcagcgtgcgtgtaccatcggcagccccaaaaacacgcgtcaggagatctccccagccaccatgggctaggttggcagccaggttttaacttggtggggagtaaaatagcctgctccaattcaaaattctgatacttctata

SEQ ID NO: 1738 - DNA, 383 bp, unidentified
  source 1..383: mol_type = unassigned DNA; note = unclassified Picornavirales sequence
cagtactcagtgtatcactgcttactgtgactagatccctagtaaagattttaacacgtaatatttattttgtttatttattatttatgtgtgtaagcgactttgtgctttccacacacaacaaaccattatttagactgctggacgcgtgtagtctcgtgagagttgcgtgaaaatggcttgtcccgagggacgtagttatctggtagtttattaatgcatttgttgtgtgcccatttccttttgtgtgctggaccacggtggtgtaggtgtggtgtgcttaaatgccccacagcgaaccactttaagatttaccacggttttcgtggtattgatcggcacacctgtatttccatggtttgggtacacctaaaggcccacca

SEQ ID NO: 1739 - DNA, 383 bp, unidentified
  source 1..383: mol_type = unassigned DNA; note = unclassified ssRNA positive-strand viruses sequence
taacctatataaaattacaagatgttgatcgtagattacctgagttggtttagcttcgcaatgagcgtagcggatgaacatctggtggtatcgcatatggcgatgattggttttgcggaaaaaccggcgaatcgtagtcggtggtcggagtgtttccaggaacatccctgctacaagcataaccttcgagaaaattgtacccacggccacttgatcgaggctaggttcggcggtgtaatgcactgccggaactgcctaccgcagacgtcggaacaacaggtcgaacatactaaacaacacgacaaatgtcggaaagaagcttacggtatcttggttacagctgccccggaccatagtaagtgcgggtatgcgttcgcttatga

SEQ ID NO: 1740 - DNA, 384 bp, unidentified
  source 1..384: mol_type = unassigned DNA; note = unclassified Hypovirus sequence
atcactataaacttccatgtgaacgttttactgcagaagaaatacaaaatggacaacagggcccaattcacagaactattgttgctagtgatagggtgagccacgtaccatccaccagtggtggggtattattcttcaggtttttgacgcatggccgttgcactgatcaacgtttcgagttaacgcagatcgagcgggagtgacccgtaatagcaaaagtctatcaccatccatgcgttaagacgtggacgggtgtgaagcttggatgagcgatattgtgccttcatgctctcaggtccacttaattgtgggatgcaattcattttgtaatggtgtttatctcacctgatcatggtacggtcatccgaagactaatttcccctt

SEQ ID NO: 1741 - DNA, 384 bp, unidentified
  source 1..384: mol_type = unassigned DNA; note = unclassified Permutotetraviridae sequence
agtcctagtccaccctctctccgttgttatgtttatagtgtccctatacctattttataacacagcccccctgacgaaatttgcaactacccttaacaactctactctcctgaaaccggttggaaccttcatttcatcccatttgacccagacagcgggtctgctatggttggtacccatatcattcgtagcggccaaacctgcctgggcctttctggcggcactcatcactggcatcttcacaactgagtacctccaagctcccacgaaatattgggagtatgcttttttaggagcagcgatggtgctcctactaaaagcgaggaacgtacctcagttcttcatagcattggtcgtggttatactaaccattggcgttgggct

SEQ ID NO: 1742 - DNA, 384 bp, unidentified
  source 1..384: mol_type = unassigned DNA; note = unclassified RNA viruses ShiM-2016 sequence
aataactcaacatcttacaatcataacgctgtaggtaatgcggctgatagcggccccattagggtaaactacgcaacacacacaggcaccccaactatcctccacacacctcagacgccgatagaggcagagaagtgtgggcaacggttgggcagaccaatatacgtcttgtcgtatgacgacgagattttgttcaaaacttctctggagcttcacgagctctttgacaatgatctttgcgattttagtatctcaattctcggtgaagacaacgaactagttatcactcgcgtgcacacaaaattagatatatacccagagccagagaagattaccgacattcgacaacagtttgtcgcaagaccccaccaacagaccacacct

SEQ ID NO: 1743 - DNA, 385 bp, unidentified
  source 1..385: mol_type = unassigned DNA; note = unclassified Mononegavirales sequence
tccgcaaacaacaaaaccaaatcaggtcttagcctttagttgtgagccattgcggtatgacgtactggttttgccagtggacggaagtcgctgagtttttaataaaaccccgtagtctagcgtcaatgtgccatgtgcctatgtgtattgtatcaactaacgtatatgcgtgttataactaatacaaaactacagttttaagaacccagacgagtaattacagaattgaaaggcagtgatagaagagaagaaaataaaggatcgacaacgtgaaaagtacctgtggtgataaactaagcaatacaaaagattgtgaagaaaaaatagtgaaggaatcacagtgctcataaattttcaaagagaaaaagatcaataattactaaag

SEQ ID NO: 1744 - DNA, 386 bp, unidentified
  source 1..386: mol_type = unassigned DNA; note = unclassified viruses sequence
gggaaaaacggttgcaacgttttgttccattcgcaggcccagtgttgtcatgggactagttatgcggatggcccacgggtgcgcgcagagcctgtgcgcgttaaaatcgttggagtcacttcgacaccccataggggctcctttggccggttggtggcgttatacactggtgatggggctccgtttcacggagctggacctgtttcgccgttatcaggtggtggtccctcgcgttcctgcatagcgagcctgctcaagcagttgggcaaatcctcgtggttctcaaggtcccgtaaaacaaggaacccgtgcgcagccccgactagaaacacgtaaactgttctacggggggtgctacctacctagtggtttcatagaattttgtg

SEQ ID NO: 1745 - DNA, 387 bp, unidentified
  source 1..387: mol_type = unassigned DNA; note = unclassified Picornavirales sequence
caggattatatcgttgaaccattaattaaactgcggtatttcttgaacttattatcatgagaaagtcttttctatactgttttattaactattggaattaagatagttgttgactttgttatgaataaggtggtacctcagatttggaatttcattaagggaattatatcatatatgtttccagatgttaagattaaaaattatgaagaatatgctgaatctcaaagtccaattagagaaacacctggtaagaaaggtggaagaaaagcagtaagattgatacgagcacaagacggaaataatgaatttttaaatcatgctgatagtgtaatgaggcgtaatatgtttagtttccacttgattaaagtggaaacaggaaagacacag

SEQ ID NO: 1746 - DNA, 388 bp, unidentified
  source 1..388: mol_type = unassigned DNA; note = Picobirnavirus sp. hypothetical protein and capsid protein genes,1 sequence
taacgtaatccaaacccatttgcgtcatatttcttgactcctttcataagtattcgcccttttgatctgaattcgtgagataggtacattgacctaccgtgttgaatcagagaagtagtagcacacttcaatcttttgtaggaagatttaaacctaattttcgaagatgtcaatgcatctccctcctttcggtagttctagtaaatttatatttactagaactaccgaaaggagggagatgcattgacatcttcgaaaattaggtttaaatcttcctacaaaagattgaagtgtgctactacttctctgattcaacacggtaggtcaatgtacctatctcacgaattcagatcaaaagggcgaatacttaagaaaggagtcaagaaat

SEQ ID NO: 1747 - DNA, 388 bp, unidentified
  source 1..388: mol_type = unassigned DNA; note = unclassified Narnavirus sequence
gggcacacgcacccatggtgcattcggtctgctaaacagaccactggcgcaggtcggtgaggacctgcgtaaggcctttaacaaggccagggccgaggcccttaacttggctcagccaagaaccaaggggttcccccttgatcgcctgcgtaggcgattcgcagacactctaggatggagtgtcgtgttccagccgaaggctgtaaaggtcaagaccgaccttgagaacgtcccaaaatgggagccttctccagtgtggagagccgcaccaagaggtgcgatatggagatcttacaagatctcaagtctgctaacaacgatagcagtaagcggttggagagccaactgcacgcacgatctcgtgcgtcttgccataaacacatggcat

SEQ ID NO: 1748 - DNA, 388 bp, unidentified
  source 1..388: mol_type = unassigned DNA; note = unclassified Hepacivirus sequence
tacctcctccataggagacacactaccctggcccacgtccgggactgggttgcttcttcccaactttccgggaagagcggcgcgtgtgtggattacatgttcgacgccaatgaagctagaccgtgcgacaccattcttcaggtctcggtgggtctgtaggctaaggcgcaagtgtatgaagcactgtggagtgctatgtgaggggggacccctctggggagaggtcaactcctaccactgacgggggaactcgtcagcttgtcggtaaagcggagtctgtggggataaagctgcacgcgtagacgctaaggcctctgatgcgcggttggtagctccacccagatgaagtgtaacggcgagtagggcatgccctgtgactagggggggg

SEQ ID NO: 1749 - DNA, 388 bp, unidentified
  source 1..388: mol_type = unassigned DNA; note = unclassified RNA viruses ShiM-2016 sequence
atatagtatatgtgtattgtctaacaagaatattgctgctcgactatgtcgaggcttattcattggtgttggacgtgcagattttgctagttgttggtggtaccttttcaaacccctatctcagattttctcttggtttagaggacagagatgtctttaaatatgtggtcatgttctggcctactactctcatcatgttttgtgattgggtgattagttaatttgaatggttctggcaaatcgtttgtcagtctcgagatatcgaggctaaataaatatgtttggtctacgagccagttgtgttatcctttaaggaaacaatgtcatcactagggtgaagtacagtgcccttgtgttgattctatttgaactgtcccgtgcgctcagg

SEQ ID NO: 1750 - DNA, 389 bp, Equine hepacivirus
  source 1..389: mol_type = genomic DNA
acctccgtgctatgcacggtgcgttgtcagcgttttgcgcttgcatgcgctacacgcgtcgtccaacgcggagggattcttccacattaccatgtgtcactccccctatggagggttccaccccgcccacacggaaataggttaaccatacctatagtacgggtgagcgggtcctcctagggcccccccggcaggtcgagggagctgaaattcgtgaatccgtgagtacacggaaatcgcggcttgaacgtcatacgtgaccttcggagccgaaatttgggcgtgccccacgaaggaaggcgggggcggtgttgggccgccgccccctttatcccacggtctgataggatgcttgcgagggcacctgccggtctcgtagaccataggac

SEQ ID NO: 1751 - DNA, 389 bp, unidentified
  source 1..389: mol_type = unassigned DNA; note = Wenzhou picorna-like virus 14 strain WZSLuoII97619 hypothetical2 sequence
tttccaggaaatgccaagctctgggaacttctagggcgtccgaaacgcgtcctgtttatgttcttttgagcatcaaagccaaagcacagaatttgggactatgtactcggttttagtgaccggattgatagcccagctacctaaacttggaggaatcccaaatattggtagtcatgtggatgacacttggcgaataaaggcatagcaataagtcctactcttagctatctaggttccagaccttgagtcaggcctggttctgaaactaccgacttgcaacaattataaataacgaagacaagtctagtcaagaactagataatccaccagatgtggatgaaagaaccaccacagtccaagctgtaggagacactgaaactgccgaagtt

SEQ ID NO: 1752 - DNA, 389 bp, unidentified
  source 1..389: mol_type = unassigned DNA; note = unclassified RNA viruses ShiM-2016 sequence
aacggagagatagaatctcatacccggtggatggcagattcccggtcacggccctccaatatcgcatcgcctatgacggctcacatcctgaaatagtggatttgagacctaacgtcgaggttgagggattgaggaggtccgaggaggggtcatccagatgggacttgggttcattctcttcacctatctcatactattatactgcactgtgccgagcgggacaactcaacgtcgcgcattgtcttgaaggaatagtaactacaatccaaaaacagatactgcaaagggcaatcagccccgaattcaaagatgatttcatacgcaaatggtttaaacatgtacacaatttcttttttacaaaaatatccgaaggactgggcaactcccta

SEQ ID NO: 1753 - DNA, 390 bp, Myriapod hubavirus
  source 1..390: mol_type = genomic DNA
gcgcgaggatagacacccccgttcccagttttcgatcatacagacagatttctgccggtaagattccgaactgagctgtattgccaggtgactgatactactaggtagtatcctttcatttagataccctgaaaaaggtttttttgtttgtttgtttatttggtttttgtttatttgcttctattactttatccaattgtttttcctattaaattttagatttagttcaatttaaatctttgtatatcaattgtttcagtgcattttgttcaaatttgattctgtatcaatccattttcacttctaaacttcttatataaccagtatatcctatacttttgattatatattcatataatattttaaaaaaaccatccagaattgtcaatc

SEQ ID NO: 1754 - DNA, 390 bp, unidentified
  source 1..390: mol_type = unassigned DNA; note = unclassified Marnavirus sequence
gggtttagaggctgactgtatatatgtaaatagctcggtgaacgtcactagaaaatagcggatgcctgtgggaaccatgggctaaaaacacaagaacccttcttgtattggataccatattttgtacattattaattagactatgtattttatataggcttgcaagaatgtagacacgccgctcgtggtgatgctgtatttacagcttagtcgcaattttgtctgattcctctgcgtagaataatgataactgcgtagttgtaacacctcattgccaacactaacaacaacaacgacggtgccgcgtcttatcaaatcggcacaactagttctaggataaattcaaatactgtaacgtttagggatggacaagagcagtgggatgctgct

SEQ ID NO: 1755 - DNA, 390 bp, unidentified
  source 1..390: mol_type = unassigned DNA; note = unclassified RNA viruses ShiM-2016 sequence
gggggaggtgtaggcccccaattatctgacggccgggaaagaccgctggcagcccggaaagacggcacccttaaatgaaaatacaacatatacgataaaccctctatgcgcgccgatggcacccctactttcgattctgctcactgctgctgtgatcactgctatcttcggactcgcttttttgttgcacgcgtgcacttatgagcgaacctacaccaacgacgtatagacatccacagcatttcgtcttatgggtcagtagagctactttcatagtagtataccttgaagttttaaccacttttcaccccggaaggggaatacgcatccagttccgtttccccagactgtacgggccctaccaagtacccaccgctccagcagcgcctg

SEQ ID NO: 1756 - DNA, 391 bp, unidentified
  source 1..391: mol_type = unassigned DNA; note = unclassified Anulavirus sequence
cgcatagcataagtgttgagtcaatttgcctttcgataactggtttttggattcattttcgttgttagctcaacgcttgtccgatttccggtgtgtagtgccccagcgtgttggtccacgacattgctccgcacttgttcgattggtactcgaggcctgttactagttgctctgaccctagcttgggtgagtgactttaaggctagctgctaaacccattgatcttgttgagtaaagcgtgagagttaggcccccgtttgtcaaagggctagactagcgcagcttcagatacaaggattgaggtgacatcttgaggccttggccttcaagctctctttgggtggtgtgacttacctgtttcaggtctcgtttataagcaaatcttgtaaat

SEQ ID NO: 1757 - DNA, 392 bp, unidentified
  source 1..392: mol_type = unassigned DNA; note = Fish HDV-like virus, complete genome sequence
gacatttctctatttcgtcctcaatctcttcctttcttatcagcaatttcttgtattcatctccgagcttcctcctctcttgctcttctttctcctccttggggtcaggttcctctgaatccccaactcttccccgactcttagacctggatctccccccactcttctgcttctctggctctgcagcctctttccgtggaatcttggatttctccctttcgccctgcttagccctcgctagtactttctcagccatttcttggtttcttctcgagattcgggtggggggcggtctcttctggactactctccttgttttctatcaaaagaataactcgagtagagtcctttgaggcgcaccgcatcccgaggtatcgagatagagagtaaga

SEQ ID NO: 1758 - DNA, 392 bp, unidentified
  source 1..392: mol_type = unassigned DNA; note = unclassified Picobirnavirus sequence
atgaaaggaggtaaaaccattgtttagatggtacaataatttacaaaaatttcaatcattattattttcacaagcaattgaaactatcactgaaatcatgacaggtcagtggtgctttcataagcaagtgaaagaaaaggaggttaacatgacacaaaatcaattaagctatcttgggttggaagaaactaagcgtaataacatagtaactagcgctgaaatcaatagacacaatttagcagatgaaggtattcgtagtgccgcgaatgctgaggctggacgtcacaatttagttactgaacagcagggggctcaatcgttgaaggaaacacagcgatctaatttagtgaaagaagcgatttcacgcgatactctgtctgaaactgctcgac

SEQ ID NO: 1759 - DNA, 392 bp, unidentified
  source 1..392: mol_type = unassigned DNA; note = unclassified Picornavirales sequence
gtcgaaaccagatttaactctggtgtagacggcatgtccactttcatatttaatttaagttattaacctcattggttgatcaataattataacaacaacttaggttagcgctgtagcaccatcatataatttatgatcggatggtgtgaggctctagcccaaagcactccgtggggctgtcactgcgacacattcccacaagtcaaaacgatagagtacgtagccacgatgcagccgaaaggtatcagcatagcattgctcactgatgtagaattattattccggcacgtggtatgtaggattgggaaatcctaccttagacgtatactccctgataggggcgcggcaggtcgatcgtatagactttaaaacctgttgaaaactctctcaac

SEQ ID NO: 1760 - DNA, 392 bp, unidentified
  source 1..392: mol_type = unassigned DNA; note = unclassified RNA viruses ShiM-2016 sequence
tagctagactggattctagctgtgacatttgatcacttctctttttatataaacttcaggtaataaatgagaagaagctatgtcatgaaagtgggagtccctattcagggagtatgggcctaggatgccttcttaattgatgacgagtcaaataatgatccaggtcccctgaagtcgaagtgtcagtgattgagctgtcaggcactttagattagtagcttactgataacaataataatagttcatctcccggagctgggtccgaggggacaaaagattacacagaaacccagcgttcagcccatgtaaatgaaactgtacaatttcaggagggtggtccaacttacgtcgctgaaattacacatggaaatgatgttactttcgacgatgga

SEQ ID NO: 1761 - DNA, 392 bp, unidentified
  source 1..392: mol_type = unassigned DNA; note = unclassified RNA viruses ShiM-2016 sequence
cccccagtgacctctatcaaatatctgtttagttgatgtctagggctattgagagactcattctgatcactgtgctaggctgccttctcttggaaatctttgactacatacagagaaataacaaggaaagtgaagtgactgttctcgggagaggtgactgtgttatatatacagggaaaaggttttgtgaggaagggaggaagttgagctgccctggtgtctatgaggatttcttctttgtaacaggtatcctgatttcaaaaggtttttcattggctgctattgcaggttctgtagcactgctagcatttgtttacgggaaaataacccgagagttgagaaccagcgaagtgatagacagacgactggacagggaagaagttgtgtaaagt

SEQ ID NO: 1762 - DNA, 393 bp, unidentified
  source 1..393: mol_type = unassigned DNA; note = unclassified RNA viruses ShiM-2016 sequence
tcgttcttgctgagtgtttgttaaccccagcaagtttcaatcattgaacttttggtgttgttgcaccatttgttcatttcttttccttatggaaaatacaattgctcaggagcgtttgctttctgagtttatttctcttttaaatattcttagtgataaagctaattttgttcatcttgacgaaaggtttcgttgtttagtctgtgtaattcaatacggttctaaggttgatagcaaactttttagtgaatctgttaggtatattaagtatctttgtcataaacatcaaatttgcattgcagttttatccacaggagtttttgctaggtcaaatacacatcccaattgctcttccacagttggttattattgtttccgctgtgatccttcaat

SEQ ID NO: 1763 - DNA, 394 bp, unidentified
  source 1..394: mol_type = unassigned DNA; note = unclassified Narnaviridae sequence
cctgaatcggaacataaggaaaaggctttcgccttacccatttgtgacggttaaggggcgacgggcactctgtaagagtgacccgcctcgatcgcgatgcgctgttcgtgcctacttcattgcaggctctcgcaggtcaaaacgatcaatccctagtcgtcgaattaatccgtttaccaaacagttatggaaggctgtttggtgtggtcttatctcttgtggtctcggaacacgtgctggttcttgggaattgaggaggtggttggcgcactctgttgagcgcaacggctggctctgtgttgcaaaggagttgaaggacctttgcggttggctgcgagccagggctcttaagagcactggtaagtgggattccaacacacacactcatattccc

SEQ ID NO: 1764 - DNA, 394 bp, Lophuromys jeilongvirus 2
  source 1..394: mol_type = genomic DNA
tagtataacaggatctgaccattaagcactccaatcttaatgcaaattaaccttgaaccaacactatcaaagtacgattatatgcattggtggatattaattgactaaccagtctaataattattatattaatctacatagcaagttcaacaaattaattcatgcaattataatcaacacacaaattggtagaaaataaggtcatgattaatgtataggataactgatggcttactgacaaatgaagtacttacgacttcaaatattcagttagaaaaaacttagggtcaaaggcgagtcaagccattaaaacagactttaaagtgtgcattatcaccggtacgataatagaagtaggcttacaatttagctagatcttgttaatgcaattaac

SEQ ID NO: 1765 - DNA, 394 bp, unidentified
  source 1..394: mol_type = unassigned DNA; note = unclassified Riboviria sequence
ccatgtctaattacaaaatccgttcaagcggcgaagccaaaactgtgttagtgaacccaacgacatataaaagtacgttggaaataactcataagtttaagcgagataccgcgctcaacgtcgatcaggtccgtattggtgtagcttcggcttataccgataatattaagacctgcaaagacgcatgtggactcgtacgccgtgaggtagtaaatcttgaaatgtccgttcttttgggcatggaagatgaatactacactcgcagaaaacaacagttagcggatacgctagctgcgggccaaaaattgttggaagcattcgacgaggtaaaactcggtctcgtcccgtcaattgaaatcgacgcgacagtctcttaaccttataaggaataatt

SEQ ID NO: 1766 - DNA, 395 bp, unidentified
  source 1..395: mol_type = unassigned DNA; note = unclassified Picornavirales sequence
gccacaaaaccatacaatcgttggttcttgtcttaattttgatttttgagcgccagatttcatacagtcgtcagctaataactttgcagcaggtagcagacgagcaataagatcagtatttgcgcgatttaatttaatggcagaccatcatatatgtaatctttgttgaccatgatcttgtttccattaatgattttaaatattcttccgaaattaattcaaaaatttgtttgacacaactagccgattatattggttggttctacaatcatccagaccccgataatttagattacacttctcgctatattgctgaaatcttcgcttcatttatatgttgtaacttgcatttcactaatccactcgcaatttctgagtcagagttctttagtgat

SEQ ID NO: 1767 - DNA, 395 bp, unidentified
  source 1..395: mol_type = unassigned DNA; note = unclassified RNA viruses ShiM-2016 sequence
agaccactgaccttgaaagtcacaaaacttatcacggtgtagtagcatcgtaaagcaactacaatgtttatgtatagttactgtatatatgtgagtttttcatcctttaatttgtaagagtggatacataaataaatcctgcatgggcgttccccgaaatctgtttttacagatgatgttgctggacatcaaaaattgaaatcgcagtgagaaatgggaatattcttagctgttaaataaataaataccttcccggaaatcttttcaaaaccaaacaaaataaaaacgaggagggagtgaaatgctccacacccggttttcgtgcctactctaaggaagaatcacaaaagttcctaaatattctgatcgatgattatatcactagattagaagaa

SEQ ID NO: 1768 - DNA, 395 bp, unidentified
  source 1..395: mol_type = unassigned DNA; note = unclassified RNA viruses ShiM-2016 sequence
ctggatagtggccattggcgcttatagggagcgcttagtgtacagtaccctccgccacccgggcattggctacgggtggcggcgtctgcgattgccgaaggacacgatagttcgatttagccgtggctagctgtagtggttggtggtgagtccaggtgagaaagcttggtaaccaatccgaccgcggtgacagtgaaggtgaaatcaaacaggggattccgccaaccccggacgttgtagctaggcccatattagagggtccgacgtagccagattttggatttgttctgtaaacatttccagggagctgtagcggtatactgcagctggtgtgaccgaccataaggcttagatgccgttttaaataaagtcacccctcaatttttcaatccacc

SEQ ID NO: 1769 - DNA, 396 bp, unidentified
  source 1..396: mol_type = unassigned DNA; note = unclassified RNA viruses ShiM-2016 sequence
ggggaactggtcgagcagcctcgagttgcgtcggctggtacggagggagtcgtcccgacactccccctaaaggttgcggtggctgcagacgggtctgcagtcggcgcaccagtggtagtaacgcctgagcaatcaggagccacaaaagcgatccggaggccccggggcggttgcgccgttggtgatgatgttgcggaaaagccgtgtgggtgtagaaggaaagatggcacgccgtatcctttcgagtgtgagacctgttactttgaaagaagtcacagggagagaaagcaagagaccatcaagaaggtgaaggaggcggcgaaggttacgaagaagcataggtgcagcaccaggcattgcatctatcgagacggtgccaggaagagcaggcactgg

SEQ ID NO: 1770 - DNA, 397 bp, unidentified
  source 1..397: mol_type = unassigned DNA; note = unclassified Picornavirales sequence
ttcgcagcagatttattgtgtggaggattactatttatttagcgtacctatcacagtgaacctaggattagtagattacgataatatagcgtacctatcaaagaacctatttttataagatgcattttacatattcaatcatatttgcttgcattttaaattcataccttgttccagtagcattcacggttagttgagaaatactggttagtgcgttgtatctacaggcatgcacagaaatcactgtaggggagatcacaaactcgattaacaatgtgcgccgaagcataccggagcgatatctgtatgcgccccccttacgttctaagttacaacctgcccacgagagttaacgatttgtcttttgaatttacaaactacaaattaaactttaaaa

SEQ ID NO: 1771 - DNA, 397 bp, unidentified
  source 1..397: mol_type = unassigned DNA; note = unclassified RNA viruses ShiM-2016 sequence
cgggggggtctatacccccccgttatgaagaaaacatctacttacgtctctcactttttgaagtgttattttgcaagtttattgttcttttcgccttttggccaggcttatcacctgatactagaaacgattacacatacaactttccccattacgttacacgtcacaacttatatatattttgcagtcgttattcgaatgcgcttaagattatcggctgtatatatattcggaagaaaagttagtttggcagctgacaccccgttattatgtaacatagagatttatattgacattttatgtattcggggattcatgtgacaggagttgggctcttaattgagtccttcatttgttatattgccaacccttttataccttcctagcgaatagcgat

SEQ ID NO: 1772 - DNA, 398 bp, Mammalian 1 orthobornavirus
  source 1..398: mol_type = genomic DNA
accgtaccgaccaaactcttaaaaaccctcttctcgggacagaggtctctttctgccttaaatcgagttcactcccccatcacgtacgagcattgggccagattaaagcaaagaacctggcatcctgtgactattacttgctattccgccaagttgtattgccccctgaagtatatcccattggtgtcttaataagagctgcggaggccatactaacagttatagtatcagcttggaagctggatcacatgacaaagaccctatactcctctgtgagatatgcactcaccaatccccgggtccgggcccaacttgagctccacattgcctaccagcgcatagtgggtcaggtctcgtatagccgggaagcagatatagggccaaaaaggcttgggaat

SEQ ID NO: 1773 - DNA, 398 bp, unidentified
  source 1..398: mol_type = unassigned DNA; note = unclassified ssRNA viruses sequence
tacattctggtttccccaacgatttgcattctgaatttcttcgtttactttataccccccaacagcttgaaaacccggacctcaacgtccgtcgtctcccgcatgtgatccgctcacaccctaagttcgactccgacttaattcttcctcaacagattcccattacttatggatctaaggaaggtcgtacttgggttaatgatcgtcgcgatccttacctgacgccattcgctgttaaaaacaaattagcttttgaattcccccgccccaacggttccacacaactaaaatctttcggccctgaccccttcgtattcgtcggttccaacacgagatacgccacttctgacaagctagcctaccggctacgcacctggcattctcgtcctaacttggac

SEQ ID NO: 1774 - DNA, 399 bp, unidentified
  source 1..399: mol_type = unassigned DNA; note = unclassified Dicistroviridae sequence
tcttgctaaactgaaacaaattctcggatataaattagtttagtagtgctatttctcagacaggctgggctatttagtcttacctcccaggatggcctgtggcagccccacaatatccagggtaaccgagtatatgattaagagattaagtcgtcctttttcatgaatatctgacttgcgaataacgatacaaatacgaatcaacaatctcgtattaaaactgatgatgttacttctgctcaagcatctgaactttacgagattgctcctgaaatttcaaattcagcagagcagcgtgtgcagatcacagcatttgctgatgattctgcagttttagccgaacatgtccctggtgaggctattttacctaatagggacacgacccagcatacagatagc

SEQ ID NO: 1775 - DNA, 399 bp, unidentified
  source 1..399: mol_type = unassigned DNA; note = unclassified RNA viruses ShiM-2016 sequence
atgtaaacaacatgtatacaatttcttgcaagactacagttggtagtacgttacaagtatttactgacttcggagtttcaaaaagatgatatgcaaaagcgtaagtgattctcgagacgatgatgaacgaaaacaacttagtcaaaaagatctgaaacccagaaattagatttaaggcgcacattaaatagtaccaactcagaaatgagagagatgatttatatacgtgcaaaattgaaaatggaattgtagaacggatttgaacaaccgcatgttagacatgtattatggcggtggaagatacagtataattaattatcactatggattaatagaactgtatatgcctggcctccgaaaggtgattgcaggcaatccgtgagggattaaaactcatca

SEQ ID NO: 1776 - DNA, 399 bp, unidentified
  source 1..399: mol_type = unassigned DNA; note = unclassified RNA viruses ShiM-2016 sequence
gccaaacaaaacccccgattacaagaacaatcgacctatctttataaccatatcgctttatatcacacagatctaaataatttggctagatgtaatactcttaacaggactgtaataagagaagaatggatctctcagtcagcaggagaactaaggaatctacctccaattactgttagtctattaacagaaagaagggcattgattaatattgagacagaaagtccagaagctaagggatctagtttgggaactgagagcacaaaccatataattggagatgagcaattaagaacctttgcccatgatttcacgttcaaaatactatctgagaagacggatgttcctcttatcaagttttttgaagcatctggacctggtgataatttaacaccagat

SEQ ID NO: 1777 - DNA, 399 bp, unidentified
  source 1..399: mol_type = unassigned DNA; note = unclassified RNA viruses ShiM-2016 sequence
cctgagtcatcccaaggggggtatgtgtacattaaggatgtcaacaaatcctttttaaatgccctaacaactgaccgccccaactcaatacctagcttggatttggaatatgattatgtcgttcgtattcaacatgatcctagatctcacatcgacttgtctttcaaacctacagagcagtttgtgattgtcaatgtaaagaagagtggttccatttactttgaggatcacaagtattgtctttcaggccattctattaggaagtttccccatgattttactctccgtctcttgagtgttttgcctgagagacacatttatgaattctttcctgatttaaaatcttctcttaatgagcttagtcctgacattgttttttggtggcaggatgttttctac

SEQ ID NO: 1778 - DNA, 400 bp, unidentified
  source 1..400: mol_type = unassigned DNA; note = unclassified Jingchuvirales sequence
gaccccttggggacaaagatccacacaccacacactatttacctacttaactaactaccaaagcattgcctgggctttttcacaggtgtgttctcgaggttgggatttaactgggataatgtgttgactaagatgtatcctgaagaggggggataatacactatctccagtaagaaataagaggctcgacgtataccctaacaattaacatctgaacgtataccattacatcgtgacagataatcctggatgaattaacctggaaactgtatgagatatcctttgaactacccgagggagaaattaagagactcgatgtacaaaggacagttccgagggctgaattttcagaccccaaaaggtgagaaaaacatctcacaatctttaaaaactgtttgct

SEQ ID NO: 1779 - DNA, 400 bp, unidentified
  source 1..400: mol_type = unassigned DNA; note = unclassified Hepacivirus sequence
catcgtgctggccttacggccggggttcgccccacgtaggtcactatgtgaccacagcgcggaagcgcacgtcaccttaacctattggtaaggcgattcactaccctctagcagctagctgcactcggaccagattctgtatccgacactacataagactagcgtacctagggctaacgtctaacgtctcaggtacggggccagtccgccggttagctcacgcgccggctgatcatgcccttaatcctgctctgctagggttagaggtgaaaaaacattgtgcaagtgaagctatgaaaccatccgtcgtcgagtgggcttgggcccccactttaacggacgatgctacagcctgatagggcgttgccactaccttgcactcttaagtggttgtaacaca

SEQ ID NO: 1780 - DNA, 400 bp, unidentified
  source 1..400: mol_type = unassigned DNA; note = unclassified Iflaviridae sequence
gccccttaaaatttaattttaaattggaatatcttttgatactccgactgtttatttggtaaccccaactaggcagtataaatacaaattggaatatctccggatactccgactgtttgaatagtctctatttaagcagtataaaccaaacaaaagcgattaaaataaactttaagtggcagtgtttgacttggtaattttatcactcaaactaggagaaatccgaatcccagaggacgcacttaatagtctaaatgaacaatttttcaataatagaaatcgaatctagcaattttgaaagcgacacgcgaaattttgaaaacaatccatataataataatttaatagaacgttttgaatttgttggtgaaggaagatatcttatagaagaaaatcaaca

SEQ ID NO: 1781 - DNA, 400 bp, unidentified
  source 1..400: mol_type = unassigned DNA; note = unclassified Picornavirales sequence
aaacgaacacagagataaatactaataggactacatatagaagtgtaccctattactactcatctgaataataagaataagaatcataagaataagcgaagcacactaggatatatataatacatatatccacgaataagtataagataagtacaagaattcacaatatcacaacagcaattgcaaatccagaacgaaagttcatcacaattcaatacactattaatacataagatacaagaagtaattgatacactatttgaacaagtcgacaacgataagaaattacaatatctaatagataaagtcaattcactatatagattggttaaagattatacggattcacaaacagaaactataatagcatatataaataaagatatcgataataagaatc

SEQ ID NO: 1782 - DNA, 401 bp, unidentified
  source 1..401: mol_type = unassigned DNA; note = unclassified Vitivirus sequence
ttagtttcggtagcagtagcaagtatgatcagattaggtatagatcggcatttaataaattagtagtttaaataaagtggcggatagtggagttgtgctgctaaagtctttcctgcgttatcacagatacactaaggaggaattctttctgcttgcagacattaagggagaaagcttggtggattttcacattcgatcgagaggcaccttgagcgttgaggatttaaagaaggtagcgaacgacaatttctcacccgagaatttgagttcgacagtgaataacatcctcaatttcaaaaagctgacctgtgaagagaaggacgttctgctatttattggtccgaggattgtggagatagtgcctcccagatactccagcggtttacactacagcacttacc

SEQ ID NO: 1783 - DNA, 401 bp, unidentified
  source 1..401: mol_type = unassigned DNA; note = unclassified Hepacivirus sequence
cactccccgaggggaatgcgccagccctggccttgttggacagggtagcgagagggtcactccatttttctttacctctcgccactgggctggtcaatggcacagacgtgggacgctataagcctccgtggtctggttggctgtagtctggccggtctagtgggcccccttggaatgataacctggaagagggctaacgtgaactacccggacggaactccggggcttgggattgagcgcaccagtagacgcttcggcctctgatgctgggttggtagccgcctttatggtacccaagttgggcatgcccataggaatcggggaaggcgttgggttgcctcctgcctactgcctgatagggtcgtgccgtgcgtccaggttcttacggctgtataacactt

SEQ ID NO: 1784 - DNA, 401 bp, Parechovirus A
  source 1..401: mol_type = genomic DNA
agaggtcttttacgtttcgaacaaagacaatgtctgcaagatgattaaagagctttctttgcatcctaagtcgacctttgatgaacattgtccgaagattttacgcgcttgtagagaaaatttgggttttattccgtacccgaatacgtatgatgagtgtcagagagacatcttgtcatccggaatctgttgggaatgatggtcgtaatcgactacaattggagtgaatttaacgtcagcactaaaagatgccttgaatatgctgagggacactcccaggtgggctatttagccttacttatcaacttacctgagcagcagtcctgctaaaaagttaggcaaacaaaaccaactcttagggattaagtggtccctaagttttaaacacacttgctgaaact

SEQ ID NO: 1785 - DNA, 402 bp, unidentified
  source 1..402: mol_type = unassigned DNA; note = unclassified RNA viruses ShiM-2016 sequence
gtgtgcaggagctgtcactgtggagacaataaatccaccccagttttaaatctgatggcagcaaaattaatgtgtgtgtatggataccacgagtacaatatctttatatgttttgtaaacttactcgtaggcttcgcatgcagcaagggtccctaatggggaacgaaagtgagtcctccctgctcaaacggaaacatgtcgttccacatcgcttaatccagcgtgtggtctgtacataaaaggattggtaattgtaaaaccaaaattctcggcttaataaaccgacgtgaaagttgtccacccaagaagggtcacgaaagagacaacacagaagccggcgtcagctggcaagactggaatttcaaaacccagtcaggagttgaacaaaatgatgcctacatc

SEQ ID NO: 1786 - DNA, 402 bp, unidentified
  source 1..402: mol_type = unassigned DNA; note = unclassified viruses sequence
accatctacactccccgttccagggattcccagcgtgctagggtggcacgtatctgctccgtttacattatttgagcagggctggggaactgaatggcaccggtgtggcaccgctattgcgctgcgtgaccgggttggctggagtctcagtctctccatgcgggcctggacggaccacaggggaggggagagagcaactgaaagtgtatccatgagtacatggagcgctgcagcgagcgcacatctaccacgcttcggcctggctaagatggttggtagccgcctatatggtactgcagtagggtatacccgcactggaggggggatagcgttgggtcgctccctgcttactgcctgatagggtcctgccaggggcccctcccttctggctgtaaaccactt

SEQ ID NO: 1787 - DNA, 402 bp, unidentified
  source 1..402: mol_type = unassigned DNA; note = unclassified sequence
cagacgttagtaaggcagctctattcattatcatatgaaggtttggatacaagttagctatcgtataggatggaccaacgtatgttcccactccggtcacaacctcaatttcaatgcgaattaatcgcaccatgtggttcggattgtaaccctgcttatgtgtgacagatgaaatagcaaaagccaattcatccacccaagatgttgcaccaacatctaacatgccattacgtatattaacgtatggcgtgcgcgatgtatgcgtgcgactgttagttaatggccccaagcgaccttcgtgatcaatgttgcggtaaataacattgaagcttttaagtctcattggttcgtcagtgattttgtaagaattaactattctgaaatcaaaatcttccaagctac

SEQ ID NO: 1788 - DNA, 402 bp, unidentified
  source 1..402: mol_type = unassigned DNA; note = unclassified Picornavirales sequence
gacagctccacactggaggctatatgctacgggcctgttaaagagccagagctcctccccggatgtagtcacaacgttccagtctgcgagtgcaagtgttcaagagtcacaacaaaactctttgacttcataccagctattccgtcgttggtatggactcataagtcatgtgtttgtaatgaaaaggtagcactttcattgcgtcatcagattgatacaggcgatcgctatgcaaccacattagacttacgttctgtcctgaagccctggatagaacatgttagccccgtttcacctagtgttataattaggcatgctacgtcacgtaagaggctattgttggaacaagctcttgaaagtttgaaaggtgaagaattatcagttaaggacgctaaggttaga

SEQ ID NO: 1789 - DNA, 404 bp, unidentified
  source 1..404: mol_type = unassigned DNA; note = unclassified RNA viruses ShiM-2016 sequence
ctgcaaaataactgtatataatttatttgaggtgtgtaccatgagccagtcacatcttttgtacaaaacggcttactacattgtataggtgcaaggggagcacgaagtcaatatccccctctaaatacttgggtaaaagtacgatttgccaagcggtggatgccgcgaaactaccaaccgttccaaggaaggttaagatagtgcgaactgcatcttttgatgaagtgtgtacagcatacgattcaggagatcctagggagccgatctactattctgcggaatgttctcatggtgatgttttggatgttcagtccggaactgagaaatttggagttactatcaccaaaccagctaaaggtactaaagagcagaatgtatcatttaatgatcaaaatccttctttc

SEQ ID NO: 1790 - DNA, 404 bp, unidentified
  source 1..404: mol_type = unassigned DNA; note = unclassified RNA viruses ShiM-2016 sequence
tggagattgtgctatccacccaatgttaattctgggaaaattgcacatgtataacatagttacttagccctaaattagtcctacatgcacagtagggtgagaggatgttatgcagcgtagcttagttgccattacgttttgcgcgcgttgtatcgtaggttttcgagcaagcttcggtcggcttgtttgataaaatttgaccacctgtttctaatcataatattttgacgtttattgatgataacgtcggggaggtgcatgctgcaccttccattactgatcccacatttcatcgtggtgaggatcatgctgcccccttttctggttggttttctcgacccttgcgtgttgccagttattcttggtctgagggcactcaactggccgagggttttaatccctgg

SEQ ID NO: 1791 - DNA, 404 bp, unidentified
  source 1..404: mol_type = unassigned DNA; note = unclassified RNA viruses ShiM-2016 sequence
ggaagttccctccctggggcctcctccccttcctccaatgggttaacattggagggggtggtagggcggaggccgccctgcccgagtactactctagttggccccagttccgtcgggcacttgaggggctgcgggtcaccagtagtaggctactgctcgcgagcagggaggccgaggggaaactcttccagtggcgtagggaaaatggtctcgagtggtctcctgcgtggacgacatctgagggggtgtgggccgggggtgacccgggcccccactccctcggactcgacccccgcggagcccgcgccctctcggcgtgcaagcgcctcccggctaccattggccaggacagcgccgctgccgcccatgacgcgtgggtcttgaggccactcaccaaggatgag

SEQ ID NO: 1792 - DNA, 404 bp, unidentified
  source 1..404: mol_type = unassigned DNA; note = unclassified RNA viruses ShiM-2016 sequence
tttatgactaacattacagttaacagcaaaactttcaaagaagtagctgaatacccagatagaaccgagtattctaactcggcggttgcgactacgtcgccagagtcaatttctattacacaaaagtggaataagaaacctaattcaaaaagatcaactacactgacttgcagaaaagttgtcccatataagaatgagaatggtattgatgttgttgaagttattcaggcatcaattcgtttaactcacctaccaggccgtctggctaatgataaactagagactattcagaatctatttaaagatctcttagctgttgcatctaattctgatgtacaggtatccctagttgctggtgagcataatttgactctttcactttagtaaaacttaaaggatttata

SEQ ID NO: 1793 - DNA, 404 bp, unidentified
  source 1..404: mol_type = unassigned DNA; note = unclassified Riboviria sequence
ttaaccttcctaggagaaaatccttatgccacaagcaattgagctttatagcaatgcaaccgaagctgccttcgtacaccctgaagacgtcctcactcgtgcgcgtttcacacgcaaactaagtgaaaagactgtcaacgggcttaagactgcaaaccttcggtctgagattatcttaaaccaaacggtcggcctgcgcgtatgcgagcagacctgtgctggtgacgaggtactttccgcccgtgcttcaatatctggttcaatcaagaaccatgagaaggtcgacgcgttagtcgacaatttgattgcagcgttacaacagtggaaaacggataagggtagccgaggcttccctgttaccgacttcacgtttaacgattaacaattaaatcaacggagggtcc

SEQ ID NO: 1794 - DNA, 405 bp, unidentified
  source 1..405: mol_type = unassigned DNA; note = unclassified Pegivirus sequence
tggctgcaagtccttttggacttgcagtcagtattgtgtttagttgcgttaaaaataagccatcgtcgtttagacgatgttttgtttgtaattatcacctttttctcggctttaaattgccggcttttgcgaaaatttaccctttctttgctacctacaactttttgtagtacactcccttgtcattttaggagagtatctagcttgatactaagaaaaacgccgtatgtgtctgggacgcgattcggctacctttatggtattgatgacaattttatcttagtttagtaaaactaagcatttcttaatgaccttagaaatgaccaaggccttttatgtacacccagcagtactttatgtgctgggtagtgaagtagcttccacgattggtgctacagttcaacc

SEQ ID NO: 1795 - DNA, 405 bp, unidentified
  source 1..405: mol_type = unassigned DNA; note = unclassified RNA viruses ShiM-2016 sequence
tatgacaaataaagccatacttctccaggcaactggatcgaatcgcgtgtacgctcaccccgaagacattacgcgaactgttagccaaaaattacagctaaaagaacgcgtcgtcgacggtaaacgagtaccacatgtgagaacagaggtgatcctcggtaggcaagctccaatcgctgtgtgtgaaaacacctgcgctggttttgaaaacctcagtgtacgtctaagtctgagcggcagtttatctaattctgctgccctagacagtatgttggaggaattaaaatccatcattgaccgtgccaagagtgacaaagtcagcaagggcttcccgttaactgaaattactttcaatagttaaggaaggttaatgtgaacacacaatctcgcgcgcgagcgccgaaa

SEQ ID NO: 1796 - DNA, 406 bp, unidentified
  source 1..406: mol_type = unassigned DNA; note = unclassified Riboviria sequence
gttgggtgtgtttggggttgtagacgagcgatatctccaagagataagcctaattgcaccgatcagggaagacaatttcacaaattacgagttcacggaggttatctaccgaaagggggcggcctcatacttgttgaacattgggattcacaaggagacagaagaaagggctgtgccgggatacgatcaccaatccctttgcgcggcactcgggaagatctgcccatttaagggggagcgatctatccctaagggtgtatctgatgcatcagttacgatcctgaaccctcaacggattagagaactatcgcaggttcttgctgcattgcccaagataaaactcttcgatgagactggggggatcaacatctctatattgctagcactcctgcgatggattcccggt

SEQ ID NO: 1797 - DNA, 406 bp, unidentified
  source 1..406: mol_type = unassigned DNA; note = unclassified Anphevirus sequence
gtgccagggtggatcaatcagatctgaatgtatcatatgtgtagaagtcagtgaaccctccctagaaccgaattgagtgtttcacattacgtgtcaggatgtgtacagcaccaaacgcacgattagaatagttcaattgttgacgagtcatctcaacacgctactggacttgtgaatgtccctccacttgattgcacaatttttggattttaatctatttttaagactatttttactgggctaacgggtgtgtaatagacgtcttccttgttgactgtctgggttaatgtttgaatctcgcttttaacttttggtattacatatatattaaaggcccttttgcctcatatcaatatctctgaaaaaaactaacagatttaaattgatcttaattgtgaattcagct

SEQ ID NO: 1798 - DNA, 407 bp, unidentified
  source 1..407: mol_type = unassigned DNA; note = unclassified Riboviria sequence
ggagtatatcctatgcaagcacagaactttagtgtaaccgtgacagacggtgaaaagacctttgaggtcctgtcacctgccggcgcatcagcgcctgcggaattccgtttacaagacgacggagttgcgcctacgctcctcccgtacttatcaatcaaggcaggaaaaacaaatggtacggcaaagcgccgcgccagtattttgtttatcaagccgattgagaaggacgggctgcgtattgggcagaacgtttttcaaattacaggtacgattgatctaaatcaacccgcatctgtgactgaaaaggacgtcgagttgctgctcgaggtcatgaaggaggactttatgaaagaagtcctctccaagtgtatcgcccctaattaaaagggacataaccaggagaattt

SEQ ID NO: 1799 - DNA, 408 bp, unidentified
  source 1..408: mol_type = unassigned DNA; note = unclassified Riboviria sequence
ctgaaagatagcaaacagattataacaagtaggcatgattatgttaccctgctcgatgggagtggtaaacagtcttgtgatgctgtcaaccaggttgattcctcaacccaaaatacggatggtacggtcagcgcaagcaaggccaaatataaccaaccgcaaaacccgattaaccaaagggtacggaaaaaggtccgcgtgaagcggaatgatttgttggacttggatgataagttcatacccgaacaggccttaaaagccttaagggatcaagagagacgtggacaggcgcggtccacggcgtcaaaaagacctgcctacgtttgcaatctgtgtggacgggagtgcccccatgtatgtgattatgtatatatagaattagaagattggcaaagaatcccccaccaa

SEQ ID NO: 1800 - DNA, 410 bp, unidentified
  source 1..410: mol_type = unassigned DNA; note = unclassified Hypoviridae sequence
ctcgtatccctcggtgattgaaccattgaatgacttgtgaacgtatgctcctcgtctgacaaatcctccagctccagtagatggtaattcttcgacatgttgattcatattgttacgtatgaatttcactgtgtttggttttgttgttttgtttgtgcttcgaacagttcgtttttcttctactcgttctaatggtagagtagtttccctgttgtgtgctttgtgtttgcgtattgtaataccagtattcagaaccttctatatcgtgatatagaagccaaacaaaacacaaacacaaagcacacaacagggaaactactctaccattagaacgagtagaagaaaaacgaactgttcgaagcacaaacaaaacaacaaaaccaaacacagtgaaattcatacgtaacaat

SEQ ID NO: 1801 - DNA, 410 bp, unidentified
  source 1..410: mol_type = unassigned DNA; note = unclassified Riboviria sequence
ctccgcaattgagttctaaactacgagggtggtatttaattcccggattacttaacgttcccgaaggccgtagaatcttgattactttagacggaatccaaaaacgtggatttcatcctgaccagtgtgatttgtttacccgactacaagatactaacctcaaaattgctttgacagcttggtcgtttgcgaacgacggggcttcaaaatacaaatactccaacagcccaccctcggactatccccctgagggacatagagctgttcattggctagtagattctcgcacagctggcattactaaaagctggctatatatatacgattggcacaatacaactggtattataaccccaaacaactttccattcttcccggatagagacgagtttgatgtatcagctgtacgc

SEQ ID NO: 1802 - DNA, 410 bp, unidentified
  source 1..410: mol_type = unassigned DNA; note = unclassified RNA viruses ShiM-2016 sequence
ccctgtaattttatatgatttgtagtagtaaacaccagttcctccaaactataagttacactacacaaatcatataaaattacagggtgtaaagagaagaggtactggtgactacgctgcaacagtgtttcactagcttaaagtgtgatagtgtttaagtgtgtttaattgtgtagtattattgatccagtattttagatatagttactgtttgttctcgcatcttagggtttaatatttatagtatttaataacaactgtattagtagtgtaagtttgcagtgagtgtttttatcctttagcacagcctttcctgaccaaatatagagttgttgctattgttgtttcacaagttaatctgcgtgcctgcttagattagaataacttttcaatatatcagtgttacttat

SEQ ID NO: 1803 - DNA, 411 bp, unidentified
  source 1..411: mol_type = unassigned DNA; note = unclassified viruses sequence
tccacttgtaggctctccgtgtcacgactgatccatcactgtgggatgcatagtcacaccagcatggttagatcaggaatggcagactatgtggttgaactaggtcgaagtgcgtgtatggaagctgtggagactcggaggatcaagtggtcaggagtcatcctagatggattgaaactaggaggggaactacacagcttacagactatagcgggtcatgtcactgcatcaggaaaatgtgaaggatcttcatactcagaccaatttgggagctggacaggagttgtggtgcaggctgaaattaagatgttcatagacagatatgccacaacagcaaacatcagaacgggggatattacgatcagagggggcctccggtgcgaatgggagtcttagtcatgtttcgacaat

SEQ ID NO: 1804 - DNA, 411 bp, unidentified
  source 1..411: mol_type = unassigned DNA; note = unclassified Carlavirus sequence
tttgccggggatgacatgtgcgctaataggaagttgaggcttaagactgagcatgatggattccttagtaaactgaaattgaaagctaaagtggatttcacagtgcacccaactttttgtggctggaatctcactaagtatgggatatacaagaggccagagttggtatttgagaggttatgcatctcaaaagaaaatggaaattttagagaatgcctggacaactatgcaatagaacttagttatgcatataaacttggtgagaaggcagtaggcttgatggatagtgatgctgtgagttgttattaccaatgcattagaataataatcaagtggaagcatttacttaggagcagtgtggctatagactttgtcgctaatgtggcttaggtttcttgccataaattgaat

SEQ ID NO: 1805 - DNA, 411 bp, unidentified
  source 1..411: mol_type = unassigned DNA; note = Hubei picorna-like virus 77 strain WHCC115343 hypothetical protein1 sequence
ctagatcctttgaaagagttgtttggtagttatattccatacccacatcagaatcctgtctccgattttcttatcttacctagttctctcactactttcaataccaatattgatggtttagttaaagtcaatggtgagttttttgattataactggcgtggttatgtacgtatagttaccggtttttctgcaacccaaattggtttaggttatggtcttcgtatttatatagagggttctgatcctagttatcgagctggtgtaactccatgggcttcggatgaaggttttgaaaatttccgtaatccaacaagtcttaagaaacgcttttctaattggaactctactgtatggtatactaatgctttaacttctaaaacaactctttctaattctggtgctagatattgg

SEQ ID NO: 1806 - DNA, 411 bp, unidentified
  source 1..411: mol_type = unassigned DNA; note = unclassified Fusariviridae sequence
gttccataaacacaccttcgtgatgaaactggtctcacggagccgccaaaatccagtgtttgggatgtttaggttggcgaccaggggcacaaccctctgtagcttggctggaacgggtgcgtgcaacgtgagtacacgcaacatgtccgtgcaagggaacctgctagccagtggtccgttaagacagtggtgtcttgaacaggccatccatttcaacatggagaacccgagtgtaacgactgcgaagtctttaaacctacaacatgaacagtctactccccaggccttttggttattgggtggtgtgttagagccccaaagcaaccttttggaccgccggcttaggcccattgatagagctcacatcaaacgtgaagtacctcaccagtcttcacccacgatacaacactg

SEQ ID NO: 1807 - DNA, 412 bp, unidentified
  source 1..412: mol_type = unassigned DNA; note = unclassified Ilarvirus sequence
agtaaatctacccatcttcctcccaccctagcatgacgaaaatccagaaatggagattgcctggtgcgatgtaaaacacaaaattcccggcggacttcagattccttgaggtccactcggtctttgaaggtccctgggggggagttgggaggcgaccccgtaaatttactttacgcaaccgaattcaagtctttgtgagtgtcagattgtgtcgtcgttcgtgaggtgaatgctgtcgaggaccactccaattcaactcactcgtcagtcacatagtccataagacttaggaggttgtagtagtttacacccatacacaactttgttgtaagattcaattctacgacgcgttgttagttgaggtccactcctttcaatctgtcgtaaaggcgaatatcgagcttatcttaag

SEQ ID NO: 1808 - DNA, 412 bp, unidentified
  source 1..412: mol_type = unassigned DNA; note = unclassified RNA viruses ShiM-2016 sequence
cctgggttaatattaaacccagggagcctgttttgctccatttgagctcgaagataaagcttcggctttatttagagtatcatgtagaccgcggtcattcgtgatcgcctatacatgttggagcaaagccctctgatggcgaggattttaagcctgtagttcgctgcagggccatcataaacacaaccacccaaacaaaataacctacccaaaccaatcccattccttagattgatttccgttgacaattttgctattgatttgtgacgattttaccgtgtttttactggtttttccgtaagaaataaccttgaaagattacacagatgtcggatctgtggtcaaggagacgtagcatgttttacgctactatgtactgaaatctaggggcagccccccaccaaacctttat

SEQ ID NO: 1809 - DNA, 413 bp, unidentified
  source 1..413: mol_type = unassigned DNA; note = unclassified Tymoviridae sequence
ttctcgggccccactccgcccctttcctgcgttctttcctttctgcctccagcctccccgtcccgttcacaaagatccatcagcataaaccttcaaacaaaagagccaaaactctcctaagcaacctccgctttggctttgatggcatcctcaaggtcaagttggctcaaggtgaaggtttggaccccgatctcctctcttcttggagtcgccgtctcacctacgcacaacccaggcaagttgaactctgcctcatccaaggctttccaggctgtggcaaatcccatcccatccaacaattgctacgcaaccgacacgactatcgtgtagcagttccaaccactcatctacgtgaagagtggaaaaacgccctccacctttcaaaagaaacttggagagtgaacacgtgggaa

SEQ ID NO: 1810 - DNA, 413 bp, unidentified
  source 1..413: mol_type = unassigned DNA; note = unclassified RNA viruses ShiM-2016 sequence
agttgtcaccccagtcctcgagcacgacgttaaactgctccccccgttggtccatgggggttctgtatatagttaaagagacccttgtataattggataccacgtacatgtttatgttttatcgttctttctataatatgtatatgtaggctttatatttgagagtggaccctatttagggtagtgtcctcgcacaaacaagaaacaacggccctacaacttaacccggtttgtaggatgtaaataaatgggttggtcaatgtttatattttaacaattggtttctatctaagccagggacagaaactgtagatcaaaatctggttggagctgatgctctacagaagactcaccatgaatatcagggaggtgagctagtgccacagagtggcactaccgacgatgtatctttg

SEQ ID NO: 1811 - DNA, 414 bp, unidentified
  source 1..414: mol_type = unassigned DNA; note = unclassified RNA viruses ShiM-2016 sequence
gatcttctggtgtttgtacatatgcacatatatatgtttttatatttatatacttttatactttatgttttatttttatttgttagtgacaattgtgatttatattcacaattagtacttacgtctcgggacgttaaaggaccaagtgagctgcctctcactagaccctacggggaatgggcattgtgtatattatgatttacttttacaggaatttatttctccttttgtatttctgtaattgaccctgtatatactgtttcataaaagcttgactcgctagaggtgtataacactaaacctcattgagtataaacatagtaaagtgttggtcaatgtatatataataataaaactgaagaacctagtgtcgtttcttcaggctttacacgtaagacacaatctttaaagggt

SEQ ID NO: 1812 - DNA, 415 bp, unidentified
  source 1..415: mol_type = unassigned DNA; note = unclassified Ampelovirus sequence
cgtggtgaacgtgtgaaatcgctaaaggatttttaaagagacaaattaacaaataaaacgacggacgcaccgcaatccatcaaagtacaacaaaaccctaaaaaccactacaagaatttacaaaactcgtcacaacccaccctagtaagggtgtttcgagaaaacctacccgactcacaggacttcaccaaccgggcggaaacagaactaggagaatctaccactaccaggagctcgtcacctgccaaagcagtcctgagagcccaaagaatatgagctaactccaggcgacgagaaatactcgcacacgagcttcatatctttgccttgctcgagctgcaagtggtgcgcgttcacaaccacgactattcgcggtgggtaagaaacccgggagacgacttaactccctaaaccg

SEQ ID NO: 1813 - DNA, 415 bp, unidentified
  source 1..415: mol_type = unassigned DNA; note = unclassified Flaviviridae sequence
gtatgaagataaatcaaagaggtgagagtggattaccacagcaacccgcttcatacacattggactataccaaactgatcttttaggctagattgggaaatgtgaaaagaacagcattaggggtgaagggcgaaaggatgttagccatacaccgagtagcactagccctgataatatgcgagagccccaacctgagtagatgaggaaggccgtagcagtgagtacactgtagccaacaaggttcctactggtaaggatcacccactaggtatgacctgtagttgggggcatgcccaggccatccttaatgcaaccgggggttggttgcatgaatccaatagggaaatctacacagcctgatagggtatcggcgccgatggggaaaggctctataaaatggcgtggaacatagcac

SEQ ID NO: 1814 - DNA, 415 bp, unidentified
  source 1..415: mol_type = unassigned DNA; note = unclassified Picornavirales sequence
aaatacgacgcgatcgccacagctgaagcaactttatgatgtcgtccacgaggccaagaggggcagaggtaacccggacgaaaacgagtgatgtcttatctagggacttttacgatcctgaagaacagcacggacaaggtgttacggtgaggaataagatccagtatcacgtccaataacagtgtcgggaacaggggagaagtgtaaaactccggataaggcaaataaatctaattgaaaggagagctttgctagactagtaaattgtgaaagcaatccaggaaatgataacggttgaattcttatactcagcatagtatatctctgtagcagagagtacttgcgaaaacgattctttgaatcactagaccttcgcgggtcgccaactcagaaccaaaccaatttttacccaaac

SEQ ID NO: 1815 - DNA, 415 bp, unidentified
  source 1..415: mol_type = unassigned DNA; note = unclassified Riboviria sequence
atctgggaatccgcttcctaacccacccacaggatttttcctaatctggctgggaggttacagtcgctgtaatgcgtgcaccaacgtttgcgtgctgtacgtatttagagcccgatgtttttctgagtttattgccaattttcttttttcagtattttcattttattattgtattatttttattcaagtgccttgcctcctgtggttcgtgcagctatgtgtaaggttttcaatactatttgtaagtttgatcctctttggttattagcactcggaattcgcaaaacccaaatgattttatgagcaagtagaggagatttctgatgcatgtagtagtttcaggtcagccttttggcgccccatttttgggttattacagtcgcgtgtcgcttttggtaagggcttcggatgcgcg

SEQ ID NO: 1816 - DNA, 415 bp, unidentified
  source 1..415: mol_type = unassigned DNA; note = unclassified RNA viruses ShiM-2016 sequence
aagcgatcatattacagctttatgttatagccttgtgtgtgtgagagacacactcattttcctataattattttccttagtcggcccctgtgattcgggaggtctgctatgtcgtataatcacgtagatagccggtggcaatatacgtaagaccaccatgtcggcacctgtagtgggtgatttcactttttgatactgtgagagtttccagtattctgtgttatgggcacacttccattcatcctttcaatggattccaggacacgaacgcgtgcatgaagaagcacgttagtagcgatagggtttatacggccaaacagagggtgggacattcccaccagattgaattttttccggtcttggaccacaaaacaacttacgacacagatacaacatactgatatacgaatacaat

SEQ ID NO: 1817 - DNA, 415 bp, unidentified
  source 1..415: mol_type = unassigned DNA; note = unclassified RNA viruses ShiM-2016 sequence
agcctattgcgccagggatctcgcttaacagaacaaaggtgttgggcaccttccgatcctactgcatgtcagcaacctccagcttacggggagtgtttagcatccgtgctgactatgatatcgctaaaaactgcaaaccagtatatgacgatgtcagaaggatggtggcgatggcccctagggatgaagcaaccatgagcattgctcgcaatgctgccatacgatcatgccgggaacacaaagttgatcctgaatgcatcccagtcgtgttggcaaaggctttgcaggtgactaaatccgaggtcaatgcagctgtgcatctcagtcgccgcaaggagcgaaaggctacgggtcttttaaactccttctaccatgtcctccgaaaatagaacctgcaacctgtgttccattaccc

SEQ ID NO: 1818 - DNA, 415 bp, unidentified
  source 1..415: mol_type = unassigned DNA; note = unclassified Riboviria sequence
gtatgcaagcaaaggatataaccatcaccttgacctctggtgaaaagaagtttgaggtcctttctccggccggggctgagaagcccgcggagtatcgtctagctgacgattccttaacccctactgccgcgccttacttaagtgtaaaagcgggcaatgcgggtaaggtagtgggaactcgtaaagtttccatcttactcgtcgtccctgtccttaaagacggggtacgcgttgaccagtcggtcatgcggctagagtttaaagcatctggattagctacgattgcatccattaaggaggcggtcgaaatgctcactaagttagtagagcatgatagcgtccagactgctttgaagacaacgactgctcctaactagaacagtcatttaaacttaatatcacaagaggatgtttc

SEQ ID NO: 1819 - DNA, 416 bp, unidentified
  source 1..416: mol_type = unassigned DNA; note = unclassified Aparavirus sequence
ctttaaaagtcgtgcgtggcttcaccacgcacgatcagtactatcagttaaccactcttgaatatgctcaatgaccctattcaacactggtgtctcttagtacattattttagcacttaacgtgcatgagttttgcccatttctttcaaaaaaatgagtattcgaggagacgtcccgctccccgtcttatttcaaccgtagactcgacatctattggtggacatttaattccagtcgccgtaagttgcttctgccccgcgctatattttcttatacttatggttctataggtctggtttaaaacgtaaatagacggcccacaaactatagaacgcgtacccggaacgccaatcccggataagtccctggatatatagatgcaccgcaatataagcctgcagactgtctcatatact

SEQ ID NO: 1820 - DNA, 416 bp, unidentified
  source 1..416: mol_type = unassigned DNA; note = unclassified Posavirus sequence
actgttctcgcacgtgtcttttgtgtggtttgtttttgtttatcgtatcggaaccatcactctattaagcctctctattgtttggcagcttcagatggttataagaacacggtcataaatgacaaaccgatttatgaatatgaaggagaagcgatttgtgatttgcatattccatcaaaacttgcttacatttggaaaactagcatgttttctggtggtggtgttataagatcaatgacagtttcagatactagaacgtttttttatgataaccctgagtttgcagatatctggatctttttttttagaaactgagttatctgattagtgtgaacaactgtgttggtgtaaaagtccctgctcctactatttcggagtatggtgtcacctttgtttatcttgtttcccatcccaca

SEQ ID NO: 1821 - DNA, 416 bp, unidentified
  source 1..416: mol_type = unassigned DNA; note = unclassified Picornavirales sequence
gtaaggactagatactatttaaactagagtacattttctaattttgcataaactatggcggcattgaccctggcgtaaacttcgccagcaccaccaatgtcaaatgggttatgtatgattatttcttgtattaggtttatttacttctaccgaccactccttagtttccgatgctagatgtatctggagcgcggaaaaccatttatttggttagtacgagcactggttttgtttagtattcagataggtgtatgatagaaaaagtagcaaaccctcaaacgaatggccctctttttgagtaagccggaagtgggttatcttttccgtgggggcacggttaaggagcgctatgttggatgacagtctcgcggcaggtcgttctatcagcactataaataccacctgttgaccttcac

SEQ ID NO: 1822 - DNA, 416 bp, unidentified
  source 1..416: mol_type = unassigned DNA; note = unclassified RNA viruses ShiM-2016 sequence
ggtttatgcgccacgcacgatttaatactaccagttagtcacacttgagtacactctattgactctactcaattctgacgtctgttagtatcattgattaaataaggcataagtgctcatagcacattagttttgttttgtctctaattaaaagacaattcactcgaggagacgtcccgctccccgttttatttcaaccattgactcgacatcaattggtggacattctctatcctccgccgtaagtagcttctgccacgcgctatattttcaacacttgtggtttcatggaagtagtttaaaacgtacctagacggcctacatgccatgaaaagcgtatccggaacgccaagcccggacaagtccctgatatatagatgcactgcaatataagcctgtaggaggacccatatatt

SEQ ID NO: 1823 - DNA, 416 bp, unidentified
  source 1..416: mol_type = unassigned DNA; note = unclassified RNA viruses ShiM-2016 sequence
tgcaaggtttgcatcccttgcacgattcactatgagtcctctttgtggcacactagtataccctactttgaccctagcttttagctacgctcatgtacgctgtactactctgtcatttttggttagtagtgttttgagttttcctcataatttgcacctttattcggagagacgtcccgctcttcgtcttatttcaactcacggactcaacatccatgggtggacatttcttaactcccgccgtaagagctttgtgccccgcgctacatttctcatacttacaggtttgcaggttctgtttaaaacgtattagacggccagtatactgcaaatgcgtagccaggattccgaccctgggtaagtccctcagtatgtagatgcaccgccgatatagccgatagggagtacgatacatc

SEQ ID NO: 1824 - DNA, 416 bp, unidentified
  source 1..416: mol_type = unassigned DNA; note = unclassified RNA viruses ShiM-2016 sequence
gccgggagtaaatatatgtagcgtaatgatatataataattatattttcattacgttacgtatgtttgccaggtaaggtggtttaccagccatcatttccttttttcggtccattggtgatatgaccactcacccttcccattgttgttttcaacatttcagcttacatccagccgctcttgcggctctgttccagctgtctgtaagtttaacagactataatcacctatgaagctacaattagcagagttgtagtggaggagttcggttactgaaaccaaatcaagggcattgaggattctctgccgagattagatgccttatttaagttttgcgtgctttccaatttttacgtggatcaaacgcaaggtagcttgtagtcaagccgttgacctaaacaacagtactacaccatt

SEQ ID NO: 1825 - DNA, 417 bp, unidentified
  source 1..417: mol_type = unassigned DNA; note = unclassified viruses sequence
agaaaattatttggtgtgagcgattatgatgtaggctcttggattatataaaataattgacccctttgttgaaaggataaatcaacctctttcgttttgaagcgtggaatttcaattcgattgtagtagtgtcattcctatttaggatacggttggacacataaataactaatcttccgcccagctccttgaactataccatctaccactaggagttgtgtaaaattatggtggtcaaaacaacaacaacaattcttcacaatctggcggttcccagtctacctcccccgctcagattcacaatcccgataaaatggtagacaatttgtcaacagacgttcaacaggaaactaatactacgtatttcgaacaacgagcagttttcgatgagacaaccttccaggctcctctctctca

SEQ ID NO: 1826 - DNA, 417 bp, unidentified
  source 1..417: mol_type = unassigned DNA; note = unclassified RNA viruses ShiM-2016 sequence
tttgtggctttgggtgtctgatatcacatccaacatacaaaccattagatatcctgacagttacatttactgcttgaatactatttcaggaaaataattatattcaagagcgtgggtgctgtcagaagaacacctgggcgtttcccgaataatctatttagattagagatgaaaataatattttaaatataggtgttactcaaatattttccaaactctggtgaactataagtgaagtcactagttttataatcacttactaaaaagaataacaatattggcgtatctcttgcccaaagagatctgacttgtggttggcagattcaatccgaacaagtgtcttatgacacaaaaaataatgatgcacaagacactattgtctcttttcatgatgcggaaattggcagtagtgttgat

SEQ ID NO: 1827 - DNA, 418 bp, unidentified
  source 1..418: mol_type = unassigned DNA; note = unclassified Husavirus sequence
aggacaaggctttgcgggaaaccgtgaagcaggcaggtggagaggtgaagactgagctcgctcggcttcctaagccgagagagcttaagcagagtctttccactgtcgcccgagtcttgccgacgaaggtgcctttggcacctttggcgacgatggctcgccgagcgagacgccgacagctcaatgctgcgttgaagtcgattgtagcggtagtgagtaattggaatcgctcgtttgacgtcgctcctcagacgtgatttcgaccctctgcgcgggcagtaacaatagcgcctcctctggcagttctctggataagaactgttcccagtgcgtgggaaacaatagcgcgcgcgtcttggatgattccgctaagaatctcccaactaacatcatttgcgggtcccccgcttgcagggtg

SEQ ID NO: 1828 - DNA, 419 bp, unidentified
  source 1..419: mol_type = unassigned DNA; note = unclassified Torovirus sequence
gttttagtcgtagtttggttaattataatgttagtttagtgttatataatatattagttggtaaatatttagaaaaaggttataaatgggtgaatggtgttcttaaacgtagtgatgttttggttatacagtatgttcaggaggcttatgctactaatcctgtgttaatgattgtagttattgtttttgtggttgttgctttgttaagtttattgttttcatattgttgttctaggcctttacataaggttgagaaaaggttattgtaatgtttttgttagaaattatatttaaagtattagctttaattattttacaccaactgctaactttgtaccttaatggtgcaagtgcgttaccagttgtgtgtgatatatttgaacctcctttttatagttgtaggttgagagaggatagtt

SEQ ID NO: 1829 - DNA, 419 bp, unidentified
  source 1..419: mol_type = unassigned DNA; note = unclassified ssRNA viruses sequence
ttaacttactaaccgcttacgtaacgaatgagcacatctacctaacttacacggggggatattggtcaatttttatctatactatcatattacgtgatgtcctagatcgtttaattttaaatggggtggttcctgttttcctaatatacaagcctagtgaaaaggatttaatccaatttaacagtgcgaagagtatcttattatctaaatatccaactgccagattcaacgtttatgacgttgttactgatattcctgtgacgagagtagctattgatccagatgactttcaagaatctaaagattttttgacgaagggaattatcaatttatggggcgaaaagaaattatggaacgaatggtacaacttcactcagaaatttattaacgagtcaaaatcgggttgtcgaaacacgcta

SEQ ID NO: 1830 - DNA, 419 bp, unidentified
  source 1..419: mol_type = unassigned DNA; note = unclassified Riboviria sequence
ggataattcccttgattaagtatattaatactttacgtgacaaaacctcctctgagttcgttcgcattgaaccaactttcgacggtggtcagttgtctttcactgcagctgtagttaaccctatggtggcaggcgtagtcgtacctatggtacgaggcgccgtccgcattactttaccgaccgaggtggtcgtgtgtggtaatgtgtgccctcagaagattaatcaatctgtggaagtgaaattcaaccttcatcagggcgctgctgatttagcagaacttcgtgctgaagtgttacgcgcaatggatattgctattacctcgtaccaacttggtaacggtattgtcccacctaccgatgcttcttttgcttcggcctgatcttttacaagcttcctcacctcctactaaggaaaacat

SEQ ID NO: 1831 - DNA, 420 bp, unidentified
  source 1..420: mol_type = unassigned DNA; note = unclassified ssRNA viruses sequence
tgtactcgcctttgtttaaaatcaatactctttgtcaattgaattgggtgcgaacttctattataaataacactcttataaaaatgcaatcctacaatttcatgtcttctattgatagacccattatactaatccttttctctaatcttctctctttcaaagatttgcgtaacaatagtagatatcctgatgactatcctctttattgtctctcaaaagaccctttcttaacttatatatctaatattctcaggtgtcttaatattagtaaaaatgtcgatattaacgagctcatcacttttaataatcaatattcctatgctattgaaaaatttaaatatttcttaaatgtctctaattatctatacaatagagaaatctttgaaaacgaatatcatctaacttggagacaataataaa

SEQ ID NO: 1832 - DNA, 420 bp, unidentified
  source 1..420: mol_type = unassigned DNA; note = unclassified RNA viruses ShiM-2016 sequence
agacgcgagccccctctatctgtgtgccggtacggagacattttgcagccattaccggacggtgcgcggattttgagcatacccgcaaccccatgcgatcatcgtcatgtcattagtaaaatcgcatggttttccgattgggttggcttcaaacgcctttcttgttttactgggtgcctgaagaacgagctggtttcgttgcataaccgacaccttgttcgtagggtggaaccagaattcaagacagtgaagcaggttgcctccaattggttatcaaagtttcctcggttcaagaattaccatcactggactgaagaggaagtgatcagccatacaacacagagtaagcgacaaaggacgcgtgacgcttttcgcaagtaccacgaggagggtgttgcagcctcggaccgccgcattaag

SEQ ID NO: 1833 - DNA, 421 bp, unidentified
  source 1..421: mol_type = unassigned DNA; note = unclassified Ampelovirus sequence
gcggctgagcacaaggcccgacccagacatttttccgccgattacgttgctacggtggacatattgaaattgttctccggggtccatatattggagaattcactacgacctgttaatggtcgaactttattgaaagtcgttagtggcagcgtgagcgttgtgggcgtaggtggcttgccgctacgacttagtcgcccgcactgacgcgtctttgttagacgtgtctcgatttagattataccaccttagggtatcgtccagcgccctggtggtagtatattcgtgcactggggttgcaacgagtaatacttcatcaaaagccccacctgctaaaatcgagaggcgtgagtctccacgggtagcggtgccagtagcagatcggcaggctatagccgatgcccgatggaaaaagtacgaagtt

SEQ ID NO: 1834 - DNA, 421 bp, unidentified
  source 1..421: mol_type = unassigned DNA; note = unclassified Arlivirus sequence
gcagacatacaacttctatctcaattatgcttacctctatctctcttctaatactcgggttgtcgataaagccgaattacataatttatgctatcacgactagaaaaaaccttattttcagaagattgtaattacaactctactcatgagtttattcaagaatctggaattgtaacatcagatccaacattctgaatgaattggactgttctgagtacaatgagtagagaaagcttaatctcatattggattttaaataacggaacttagaaaaactctgagatgtgcaaattgaaattatatttcaagctttcgatgtcacatcagctattattattgagacacaaggaaagttgtttgttttagaaaatactctacttctagtaaaatagcaattattagaattatatttacaagagac

SEQ ID NO: 1835 - DNA, 422 bp, unidentified
  source 1..422: mol_type = unassigned DNA; note = unclassified Hepacivirus sequence
taaccggatacactccaaagccaccggacaggctacctgccgtgacccgcagccgagggtctcgtagggggaagtgcgcgcttctttgcgcacagccggcggccataacctcggtgaggcaggcggagtgataagctagtgtgaatacccatcggcggggaccacaccaaaccctgtcgcccgctgcggcggtgggtcctggcaacaggaggccgcagtgagtggttcttcaggggaacgctggtgggggcttagcactagtggaaccttgcgcgctgaagccctggggcggtcgtgaggaggggtgaggaatgctgggaaggtacccgaaaggatctgatcccaggctaattgtctagcccctcccgacctttttccttttatttttcttttctgttgttgactgattacatagatacaag

SEQ ID NO: 1836 - DNA, 422 bp, unidentified
  source 1..422: mol_type = unassigned DNA; note = unclassified Bacillarnavirus sequence
gttttcctggtatcttgtacatatacatatttacatgttttcatatttacatatttatttgttatattttattgtgacaattgtgatttgctttcacaattagtattttcgtctcgggacgttaaaggaccaagtgagctgcctctcactagaccccacggggaatgggcgctgtatatattatgatttacttttattaaaatttatttctccttttgtatttttataattgaccctgtatatacaatccataaaagcttgactcgctagaggtgtataacactaaacctcattgagtataaacttagtaaagtgttggtcaatgtttaaaaccaaatgagttaggtgtaatctcagaaacaccaacatccggtagggatacaatttctctctattattgtgatgcagatcatattaactat

SEQ ID NO: 1837 - DNA, 422 bp, unidentified
  source 1..422: mol_type = unassigned DNA; note = unclassified RNA viruses ShiM-2016 sequence
cgattggggatctcggaaggtaccttattcgccggggacatccgtccagatggtcacctcgtgaccattctggtgcgtatgtggcctggcaatttggttggagtcctcttattagtgacctttatcgtcttgctgacttggctgatgccacggaagcgaggataaaggcactaaaggagggacatcgtgagcagaagtatggtggtaaactaccaccatccataccattctcacagtggaagtctggagtgaagaagactctagtcaatggctatcgccattgggtagagtacgagattcactttaaacgcgttgagaccaactggttcactaccagatttgagcttaacgacgagtatttaccagacttagacaacccgtcagcgaatattagaagagcccttgggcttgatctttctaat

SEQ ID NO: 1838 - DNA, 423 bp, Ghanaian bat henipavirus
  source 1..423: mol_type = genomic DNA
tgatagaccgggaagacaacgacaataccacaaccaacagctcccaaaatgcggaacaaacaagccccagaaccccaaggagacagcccagacaaccaaacccggcaccccgcagatccgaacaaagccccgcattcgaccccgaagcgcaaaccaaaaaaaccaccaaatctgccacagaacagccaaccaaccccaaaggacaccaacgacgcaaaacccgcttaactataaaaaacttaggatcacaaggtacaaaagatccaacagaaagacaaccagcccgactgcacagaacccgaaaacaagccccaaaagaacaaacaaaaccccgagaggagaaacaaccaatccccacacccgaacaaccctccacacccacacatagctcgaccacttgctcccaaggagtcttttcacttc

SEQ ID NO: 1839 - DNA, 423 bp, Britarnavirus 4
  source 1..423: mol_type = genomic DNA
tttttgttataatggtaaccataacgacggtttaatcaatctgttattgatttagtccgtgtcctagtttattctagggactttttggtcagcctaccagctgaccttttcactcgtcacattcttgagtgaataaattgattcttctttgtgaagatgtacaactatgcctggtttctgtttttaggcgatttaatgtattagttctttttgatttgtagcgtgtagagcgcactaattgaggtttccgtcaattcctcattagcttctcctttcggagaataacgaatcacattgaactcatgcaaatcacgtatgagaactcagtattgtatatgtgtgtaggccggtaccgtatggataaatccgaaaacctgatcacatatgttttattgcttgcagaaaactatatgactcacctag

SEQ ID NO: 1840 - DNA, 423 bp, unidentified
  source 1..423: mol_type = unassigned DNA; note = unclassified Picornavirales sequence
tttttagaaacaagctgcgaaaagatttcttttaaaacaaaatttcttatattatattttaagaaactattttggttcatatttatagacagttaagtcgctactgtaagctacttcttaattgttagtttaaattgctaaagtattttctacctcaagcttttaaaaacccaatcaattttttcgtgatttttaaaattttgaaaataatatcatcaaaaattttctgcagtataaacttgatcgctcgctttttaaagatcctgtttatatttgcgcttaacatcttcaaaattatctttgttagatcgttcacgatcttatctcatttggtacttttgactctgttgatattaggcattttgaaaccaaagcaatacgcgctttttgtattggtacttcacgcatattcgttaacacaaa

SEQ ID NO: 1841 - DNA, 423 bp, unidentified
  source 1..423: mol_type = unassigned DNA; note = unclassified RNA viruses ShiM-2016 sequence
gtttcggaatttcctttaataaaaccgccccgttgacccgatggggtttatgtatacagttgaacagggttgtgtgtatatggataccgtgcaaatatttgtttttcatattttgtattatttgtataggctttgcatgcatagatgtcgtcctcgtgcgatacccgtatttacgggaggttgatcacccatcaagatatgacgtacaatgtggattgagtgtgcccattgtattgtatattgtagcttactaaaacaattaaaagaaataaaaacaggggtttccaggattaccctacgaaaaatagaaatcttggtcaagattacaaaaacattaaatgcttgaatgatttgccacatgctttagccaaacaagaccctgatggttggttgggcataaattattgtgcatcttgtaatctt

SEQ ID NO: 1842 - DNA, 423 bp, unidentified
  source 1..423: mol_type = unassigned DNA; note = unclassified RNA viruses ShiM-2016 sequence
cctaggttaaaacctagggtagatgtagagagcaatggaacattaattaaatcttaacagagatgttccatcttttaaaatctactgaaaagtattttgccgtaaccacacgtaacgtggcgtacttatacgacaaataagagagtagcacacttagtgttagaaatttttatttaaccatgcgttagatgtgactttctatgcacctctgcagacaagaagaggcggtattccaccgatagcaggaaggtttgtttgtgtttctttagcagaatgaaacacagcgctcttgcgcgctttgatttcgtcatgagagcaagatgacgctggaacagacagctattttcttaagtgtttggacataaacacacgttgtgctacgttagtaaacgagccctctcgagagttgtaagtttaacaaat

SEQ ID NO: 1843 - DNA, 424 bp, unidentified
  source 1..424: mol_type = unassigned DNA; note = Picornavirales sp. isolate wpk049shi02 genomic sequence.1 sequence
ttgattcacaatacgggatgtagttacatgcttcatttttacatcataatggggggcttggtttttaataatagttcgaacagcgttacgcgcttgtcgattttcgtaaatggcaggggcttgatttaaaatttttgttacaggagctacacttttgacttttgtatcataaaggggaccttgagtttgattagggttatattctggtaacaccggtatatctctacacccatgttgagatataccggtgttaccagaatataaccctaatcaaactcaaggtcccctttatgatacaaaagtcaaaagtgtagctcctgtaacaaaaattttaaatcaagcccctgccatttacgaaaatcgacaagcgcgtaacgctgttcgaactattattaaaaaccaagccccccattatgatgtaaaa

SEQ ID NO: 1844 - DNA, 424 bp, unidentified
  source 1..424: mol_type = unassigned DNA; note = unclassified Negevirus sequence
ctccactgtctccgttccaactgttgcagactcgtgatcgcatcttgcgtgaaggtagcgcctgattttcaggaaaactcaacagttgtcggagtttccattacacaggtttcttcctcgttcttcctgtgttgttctttgaacgagaatcggttatttcttgcccttataacccgggttttattatttttgcctaaatttctattcctataatttctttactctcactatcgcacaatttaaaaatttgaacaaagaaattcatttgaatcaacgtctttctgatagtgaaaaaacatttcactaattcaagacgataaattatttcctacattgttttatacattgccaggagatcgattggatttttctgctgtaagatttgtgaatgaataagttaaatatgctttagtcaattatcatc

SEQ ID NO: 1845 - DNA, 425 bp, unidentified
  source 1..425: mol_type = unassigned DNA; note = unclassified viruses sequence
gtaaggtcagtcactttggagacgttaaatccaacccagtttcaatactgatggttagcaaaattgatatatgtatatggataccgtgtttgttttaatctttatatgttttgtagaaaattcataggctttgcatatattaacggtccctaccggggagttttgttcgagttcaccgtgctcacttgtaaatatgtcgtaccatatgagtcaatccactctatggtttgtaaataaataaatggattggtaatatctttaattataaattatgccgggatgtacaagccaacataagttttggtcccggggaagcaaacgtacacaataaatctgtgtcggagacacagtcagcagtgactgaaaattctttattgaaaatagagaaatttaagccacaatctggtccggaaggcactactgtt

SEQ ID NO: 1846 - DNA, 425 bp, unidentified
  source 1..425: mol_type = unassigned DNA; note = unclassified Deltavirus sequence
gctccccgcctccagcccaatccctgtcgttgcgggccgccagtccaacggaggaattgtcaggtccaccctggatggagcttctcttggttggaaacaggcctacccggatcgtctgacggagcccctcatacagcgggttcccgagatatcctgtgccctattgcttaccgtatgtaccaagatgttcacctgttgttcccctgctttcccaagtcttgggttgtgtttcacctgacgacctcctcttcctcccctgcccgcaacgttcccgacccctcttctgtcccgatcttcgcaaagttggacttacctgctgcggtccaacggggcgggaccaccaacttattttatctcttaagagaaaattgttgatttgggtcccagcccttcgttgaggagcagcagaaccaacacagcgaagg

SEQ ID NO: 1847 - DNA, 425 bp, unidentified
  source 1..425: mol_type = unassigned DNA; note = unclassified RNA viruses ShiM-2016 sequence
ctttgcataaagagatttaagtgaattgaaaagttctattaaatttgtttaatgtcaagggcagttgagagacttattttgattacagtcatcgcaacactttttgtagttatcactgattttattgttgaaaatagcaaagaaggtgaagttactattttaggtagaggagattgtataatctactctggtaagaggtactgtgaggagggtagaaaactgtcctgtcctggtgtctatgaagatttctttttcgtttcagggttacttctgtcaaagggtttcacttttgcttcaattgcaggtgccatagccttactagtctttgtatacgggaaaataacaagagaattgagaagtagtgaaatagttgattcaagatttgatttagagcaagcgagagaaaagaggcttctttgtaatct

SEQ ID NO: 1848 - DNA, 425 bp, unidentified
  source 1..425: mol_type = unassigned DNA; note = unclassified Riboviria sequence
attggagaaataatatggcacaagccaaagacttcacgtttaatgacggaacttccgatctgaccttcgaggtcttatcacctgcaggaccaaatagtccagcagaatttcgtcttgttgatgacagcaaggcaccaatgaccctcccatacctcagcattaaagcacgaggtgtgaacggagcattggcccggaaggcatcaatcatgtatatcgaacccatcgtgaataacgaaggggtccgtacaagtcaaaacgtatggacgctcgagtcacggattgatttgagtcaaacaaccgctactacccaaaagggtgttgctcgtttgatcaaactgctacaggaggacttcatcactgaggcccttacaaaagctgtagctcctaattaaacaaaccctaatcttacatacgaggtttattaa

SEQ ID NO: 1849 - DNA, 426 bp, unidentified
  source 1..426: mol_type = unassigned DNA; note = unclassified Hypovirus sequence
gggtgtgaaaacttacacctgctctatatactttcgtattatagaggcgcaagttcgcttcgctaagtcgggttcaaatcccacgcaattttacctgttacaggtttattgcagcttaggtacacttagacttaggagtgtacatccttcaatgtagagttccgagctggaactctcataaggctcgtagtgagcacccgggattggtcgtctcgggagtagaaaagaagactactttaggttagactatcttcctttctgactttaacggctgatgcgctaactcccacaccgcaggtgtggataggttggttatttactcagagtaaaagttggataaattgtttagtttttttaaaaatgaggtactggccatagaaccagaaactgcggctaccccgcacatatcaacaaagatatgccatc

SEQ ID NO: 1850 - DNA, 426 bp, unidentified
  source 1..426: mol_type = unassigned DNA; note = unclassified Picornavirales sequence
tctgcaagcacgggaagccccgtcttggggacgttaaaacccagttttgtcaactttaaagacacgagagggtactcacgttaggcaaatactctttgttcggcaggttaccaggatttggattttataagcccgagtttgccatttccttggcaccgaacgattataaaacatcggaggagttagagtggcgttgagttatgccattctttagagctatttgctcactctatacattgacttactacatatacatatacacaattacataataaagaaatagatatagatatagagggatcttatacatcccaaaacacactagaatttttgctagtgtgcacttgttgtggaggttttgttcctcaagccgatttagcagaaggagaaatctcatccgctcaggacaacttcgcacaacagacc

SEQ ID NO: 1851 - DNA, 426 bp, unidentified
  source 1..426: mol_type = unassigned DNA; note = unclassified Picornavirales sequence
ttattggattatggagatatatgatggcctggcatggaatccaggaattcttacatattggaattgtatcccacgtgaacggggatgtggcaagtcccccagtaatgctgggctctacccaatgtgtgaggaccgtgacttcaagactagttatggtcgtgtgacaagggaaagagtttcttacccgcctgtgtattaggtgtgtacgctgggaaaccataagcgatcgaaggtaaagtggtgctgaaatattgcaagctcaatgccttctatcgtgagtcggtgccgctgcatttgatacacgcccctcttttggggtaaatggctgacacgggcatccgcacttgggaatgtgcggctggaactagactgggtgatagcctgccggctggcgctgttgtcatggtatagccagttgattgccac

SEQ ID NO: 1852 - DNA, 427 bp, unidentified
  source 1..427: mol_type = unassigned DNA; note = unclassified Alphavirus sequence
ccagcactttagatttacagccacggcgtgtaaatctccagtgtttcgagttgcgcaaagcgttttctggataaatgagcattttcgaatacccactgactgtcacatcagtcattgacgtaattttcgcaacgttcaaaaccttcgcctcttcttcacccagccttggtctcttcctgaagaccatttgcaactttccaatctgggtagcttttgcaatcggtttgatctgccttacgattgacaggatcagcaagcacaagtacattcggtatttgaatacgagacatcacatcgtagagtcaattgccgagagaggtggagtcgtgccagttcagcccaagttgagaacgcacttctcacctagacttggcgatcgggacatcacgtctgccacacccaccagtgcatcacgcaggtggaacta

SEQ ID NO: 1853 - DNA, 427 bp, unidentified
  source 1..427: mol_type = unassigned DNA; note = unclassified Picornavirales sequence
aagagacaggaggttcgtcgtattgtcgattttgcgtatttatatgcatatccgcactgccgcttatcgtggtttcttttaaatgacatttggaaagacaaatgaacacttgtgtttgacgtttgtgtactcactatatactagtatagtgagaatgaataaatggctcgattattatgtgaataagtgaatgaaacttcaagacttagcaactcgattgtgtttagctaagtgtgcttgaaagtaacttatttatcatatgtatcgcttgaatttattttgattgcctatggtgtctaacccacaccagcctcttcatgaccctctgtgcacgcagggattaacgtgcatgcaaagtagcgctgtttgagaacagttttaaatccacaatatgtggtctttgcattagattttactcgtgggaata

SEQ ID NO: 1854 - DNA, 428 bp, unidentified
  source 1..428: mol_type = unassigned DNA; note = unclassified Ilarvirus sequence
tcagtcgatggaaagttaatatcactcaccaagtaaatcgctctttgttagcgtgttgagttgagtactcgatttcatttcgacttcgatctggtattatccgattgttgtgtttggtggtcccaaggcagggttggcccgtttgggaattgtaaatccaagcaacaaggagagcagagagaatcgtgataagttcgatctatctcagttgtaaatccgatagagaattaggagcaaaatcaacggtatcaaagcgatacttactcttttgaggacagttgattccagggttgctccgaatttctcgacgcggtggctgatacgatttgagtatcacgaggcttaggatcttcggttggacggaagagtaagggttggccctgctttcgaaagaacgactgattcgaatctgtccagagacgagaaga

SEQ ID NO: 1855 - DNA, 428 bp, unidentified
  source 1..428: mol_type = unassigned DNA; note = unclassified Iflaviridae sequence
tgacattgacaccaggtaaagagaacgagggaatccgaccctatccgttctctttacctggtgtcaatgtcaacaggctccagtggggtgtctggtaatcacccccgacaagtacagtcgttaaaatgcagaccccagtaaggtatctggtacttacctccgacccggattaatatttctgtggagtcgttaaataattagcaagaaataagccgaccactggttactccctcataggtttcagagttaaagtgggctcctaaatatgtgagtgtaccgcatttttagtgagtacatcagtacaccggtctatgtgttacaacttatgaagttatattatcgagtgacagagttaacgtgagaagctcttactgctaatcttgcatttactgcctgtaaaggtaacagtgagattaggggctgagtag

SEQ ID NO: 1856 - DNA, 428 bp, unidentified
  source 1..428: mol_type = unassigned DNA; note = unclassified Negevirus sequence
gcaaagttgtcaaccagcatcctcaccagatgtaattgccgactgctaagattgaacccgaattctaaacgaatttatcaatcgctcacccttgtccggtgagtccaaccagctgcctaacccgcagaaacatttcacgcgaattaatttgacgtgaatccaattgtcccagttatctggtacaaatctccgtttaaaatttttattttaaaccttttcgtcactttcacccagtgacacttcctgcagatccttctgattctgcaaaaattgtccgctcactccggatttctttgatttgttcacatcaaatctcccccaccttcattttgaagtcctgtctcattaatagtgagactcccccttgaattgttttcttcaattctcccctttttcgttgttaagttctgtcctaatccgacattacg

SEQ ID NO: 1857 - DNA, 429 bp, unidentified
  source 1..429: mol_type = unassigned DNA; note = unclassified viruses sequence
taccccctttcagtgtttgttaaacagactcttgatttgtaacccttgttgttgaaagaactagctattcaaaactagtgccatcatttgactaacccgacttctgtcggtggaaccctgtctttgacggctcttatctgcgcattgagcccagtttgctatgtcatcaccaccaagaaccatttcacgattcgtctgcgttaacttctccgcatttccgcctgattgcccattagtttgttcgactttctcgtttgcgagacttgaacgccgcacttttatgctctgctcagcatattaatccatcgtattaaacacaaacgatcgcagatttacccctgcgttaccaatagcgtactagtgatgtcgcactagcctaaccctgatcgagaccacactcgtaaccatggattccagccaagccttaaa

SEQ ID NO: 1858 - DNA, 429 bp, unidentified
  source 1..429: mol_type = unassigned DNA; note = unclassified viruses sequence
ctacactaaggtagttttcccactaactctaggagtaggaatagcattgatagcattcaccctaacaaggcccactctccccacggtcggggattcacaacacagcctacctcacggtggctggtaccgtgacggaacgaaaacagtggcctacaactccccccactactatagtagtagtttcatccctttcttagctgtgcttggtttaacactcttaatatatgtttctagtctatgttctggtcggggtgctactaggagttgccctcattgctgtggtcaacactaacaatcctcagtgtactatagtattcaccggtcattccactactatccaggggtgtgagcggttaactaatttgcatgacatcatagcagcggttaataaccgcttaagttttagctctagttgtgaaaactaactcc

SEQ ID NO: 1859 - DNA, 429 bp, Hermit mivirus
  source 1..429: mol_type = genomic DNA
ggcatcctataacaccgggtgaggactgttcagtattgttctcctatgcatgcttagttttagggtcacaggccgataagttctctgtctggaccatctttcttagtagtttgtaagtgcctgtttcatatatagatgtactattaagggtttagtttttaagtatatttttctcataatcatttagcatcataagattgtttttctcagatgaatgacagatacttctgttccactactcaaacttcccctctttctttcagagggaaggaagacggggagttggactcccagttatccctattagtccttatctcaaacctgcaattccatcagatccaatatttttgctcctaatgttgtaattggctagtttaaaagaacacccccactgagtaaacattataacacaattacacagttccaacc

SEQ ID NO: 1860 - DNA, 429 bp, unidentified
  source 1..429: mol_type = unassigned DNA; note = unclassified RNA viruses ShiM-2016 sequence
agaacttgtccacatatttgatgcttcgggataagtgagcctccatgttgtcgaggtgaagactactactcagtctttaaaagagaggagagcgtccagagtgtgtgtcttgagcagaccacactttagtatttgcttacagaaaatcatattaaagtggatggcaatgccactgaaaaagataattgcatagagattgaaggtatttcaatcactcctaacttagagttgacgtctggggtcaccggttttgatagtgaagccacattgtgcgctgaagtgccttctttaaataagggaactttgcgggcagatggcgacatcaatcagttgaagcattatttagcgaggccatttttatggcgtactgggacttttcttgtttcccctgggccacaagagattgcaccacttaacaatcacgcagat

SEQ ID NO: 1861 - DNA, 429 bp, unidentified
  source 1..429: mol_type = unassigned DNA; note = unclassified RNA viruses ShiM-2016 sequence
tttgtcaaaagcctgaccgtcaagtcgttaaactgtccggatgcggaattatctgtagtcgaaactctaaggaggaaccaaaaatattctgtatatattgattacgatgtgttatatgtgttgacaactacatatatattatagcgcttgtatactgctggttgccgtagtggcaaggagtttttactcctggagaaggaccactccaaagaagtgttgtgataggcaagtgctctgaggcgagcacttgacccgtatacatagtgccttactaatttttataatttttataatactgaagttgacagtataaacaacttatacatattatatacacctcaatcgggtacggttggggtaacagatagtgtagcccctaatgtgaggagtgaaactatcacaaattttgaagtgcagaatgcaggagaa

SEQ ID NO: 1862 - DNA, 429 bp, unidentified
  source 1..429: mol_type = unassigned DNA; note = unclassified ssRNA viruses sequence
gggcggaaggccgcctcctcgccggttatctgcctccggccaagtgactagcgcttctgctctagctctcaataaccctctcttctctacaactggataaagcaaataacatcatggacgcctccaacccagtcaaatctgcccagcgctatactctctctgagctccgtgattctcgacttgcatacaaaagacaggacctgaaagcgctgcaagctatggcggcttccgcggagaggcaactgttctcttcaggaggcccaagcaaagaagcttttcacagtcttactatggacctaaacgaagacctctcttcagtgcgcgcggcctctggcttatgacgtgaggagtgagatcgacttcctcgacaaactcccgcccgttccggtagataataccaaactcggggacaggcagatacaccccgcc

SEQ ID NO: 1863 - DNA, 429 bp, unidentified
  source 1..429: mol_type = unassigned DNA; note = unclassified RNA viruses ShiM-2016 sequence
aacacatccaacatgtcttctttaattaaatcaaagatatgggatgtgttaatatttccggggccccaacttgtcagcagttgttcatcttgggatttacgtgggcgctcaaccactatggaacttccatatgtggttttaatgggttacccgccatattttaaacgccaacgcgagcgtgctcgcctttggtctttgatatgtagagtgattaaataacactctggttggttataaacatatatcatggtattaattttaaacgtcagttaacaacgggtgtcttgcgtgcaaaaacacttcttgctgaatggttattattaatatggtcatatatgcttataaatggtgattaggtaaattaataccgggtgatctgcgtgcagaatcacctcatattgagatacctgttagtcatgttatcattag

SEQ ID NO: 1864 - DNA, 430 bp, Ollusvirus scaldisense
  source 1..430: mol_type = genomic DNA
gctctcaatattacacttatttactttatttctttatctatgaatttgtccttcaattatatatatccctcatctaagctgaaagacattattactttaaaaaataacatattttgtccttctgtatagttaagtctgttctcttactccatccatcatggcacgtagacaaccacatagatcaggtttgtccgagattaattacatatatgatcactgtaatgaagcacctataaaatggttaattgatggtgtaaaattgtgtgtgaatataaagaatcattggttcttccagggggcaaacctcgcatttgcatggtatagagataatgttcatatctacttattaccattatatgattaccatatggtaaaattgatttacaatgttatgattagaggttaccctgattacatctagtgtccattg

SEQ ID NO: 1865 - DNA, 430 bp, unidentified
  source 1..430: mol_type = unassigned DNA; note = unclassified Picornavirales sequence
atttagcaacgtcagagatgacattaaatatctaaagccgcctgttagggtttctaacagcttatccgtggaagtgccacggaacataaattaagaccccgaaggtcgagcgttggtgtgatcttgcctcatcattttatttctaagcagagattatagaggtagtgctgccagcgtaattccctgcctatttaggatactaatcacacagggattaggcagcccctaaatcaaagagagatgcttagactcaggtgcaataaaagtgtaagccctgttttataaatcacttgccaataataataataataatggtccgggcgcaccaataagcgtccaacacacagaaataccttctgacatacacacaagtggttctgccacagaagcggtgccagaagacccgacagttagaggaggagagcataat

SEQ ID NO: 1866 - DNA, 430 bp, unidentified
  source 1..430: mol_type = unassigned DNA; note = unclassified Picornavirales sequence
tccgatctcggcgctaggctcactctctgagtgccctagtggtcgttcccttttcaacaagaataaaacttgtaaaaattgaaaaactttgagtaaagtataaataccctcataactgagtaaaagtctgttatatatgtttgtttgtttgtaggcatctccgtgccttctacactactatatttgcccctgtgcgtacgcgcttgtgccgtgaggcctcacgtacgttcagatgcttatcctgagggatgtagcacaaggtgacacttatactagtacctttttccctgcccacgactggacctgggcggtgtaggtgtgtctctctcaatgtttcactccgaaccgttctataacaaggttgtactttccaacctgatatcagtgtgctataaattttctatcattgtggttagtccactacccaaac

SEQ ID NO: 1867 - DNA, 430 bp, unidentified
  source 1..430: mol_type = unassigned DNA; note = unclassified RNA viruses ShiM-2016 sequence
cagcgctttatttctaaatacccttatggtagatgacatacctcctgtgtacacttaatgagtgtacatacgagtgaggattttactgtctggttgttatgaaaggatgagttgtttcccagtccctttttcaaataagattccctttgacttttataagtcactgcaatcgtagtctggaatcgaatactacgtcgagaacaagagtttaccaaacgttaacgtgcgttcatgtgagcgttttcgtttagggcttgtttttggttaaaccgagtgtttaaatatcacgagatatatacccggaggttttcactgatccggtgtattaattttaggtgaagctaatactaatacttatgttattaagggtgtcaaagcccaaaccctggcgatttctaaccatgctaagcaggaggaagctcaagcttac

SEQ ID NO: 1868 - DNA, 430 bp, unidentified
  source 1..430: mol_type = unassigned DNA; note = unclassified RNA viruses ShiM-2016 sequence
ggaaggctctttgagccctcctatggaatcttggtatgatgtaattggaaggtaaagccctcctcttggattatatataaacatttttctacgttaaattagatactacgttttaaacgttagtagtatcacccttaaacatttatagtcacgcaatgttaaaactcatgacttgtacccttaattgatccggtactgacaacttaatacgattgtcatttatagcagttgaacggcactgctagtattagttcttttgtaatgaatttcttactcctcaagaaattacatttaattgcaataacgattgcagagactacttaattgtagcccacggtgtgagcatagacgctaagctcacggtaacggttagggaagcccaaaagagacgccaacccacaagtgctcttgaaccctgtattatacaatc

SEQ ID NO: 1869 - DNA, 431 bp, unidentified
  source 1..431: mol_type = unassigned DNA; note = unclassified viruses sequence
cataaaactatacaaccgtaaagtcttgtccgcttctcttcagggagaagcaaaaacttggataccgttatataccgtattctaacttggccaacgtgcactactttggtcgtaataccggtttcagttaatctgaagctataataattgggttgtttaaaacatcccgtaaaacttacgagtttaaatactcgtttaattttctgctctttccttgagtagaataaaaattttcacacttcaccgtgtgattaacttgttttccagttaactgtgaaaaccgtcttttcgtttcctgtcaatcagggagctaattctttgagattaattatctcttttctgttctctcgtaatcgagagaactctgtctttggtcctcgcaagagaaccactaccgtctatagacttctttgtcttctcttgatcttcag

SEQ ID NO: 1870 - DNA, 431 bp, unidentified
  source 1..431: mol_type = unassigned DNA; note = unclassified Picornavirales sequence
gcaattaaacgagaatattgattgttaaaaaattcaaaagtgtcactgatgcctgcgatataactgagtcaggcatcagtgacacttttgaatttttaaacaatcaatattctcgtttaattgcagagcctcaaataggtatctccattaatcatacaattgatgggagcctagatgacgctattaataaatctctatcccttttttcagaattatctaaagctctatccgataaatatcaaacaaccgttaatgattatcaacgtaaaattatcgcctcaataacgtcaatttataatttatatcgtttcacaactcacaaattatctcttcaagatttttgtgttaatctctgtggagttattggtgccgctggtcttgcctccgacatcataactcaactaataataactgttaggtctcttttctta

SEQ ID NO: 1871 - DNA, 433 bp, unidentified
  source 1..433: mol_type = unassigned DNA; note = unclassified Picobirnavirus sequence
ctcttgtatagtttacaagtattctacgaagggaggtgtagcatgttgctataccaatcgcaattttatcaagcgattaacaaaaacatcctgacgttactgactagctacatgctggcatgcacagtaggtacagtcattgtaacggatctgtggaaaggaggtaatttatatcacagatattcaggttaagtactggacattgaacgaaagtaaacgtcacaatgttagtactgagacacaagcagccaatgaattggctgaaactaggcgacacaatgtgtcgactgaaactttgggacgtgacaccctaaatgaagataaacgtcacaatgtcacaactgaaacggagagtagacgccataatgtacaaactgaacgtgaggcgaagcgtcataatgttgctggtgaagtcgaaaccaaacgacataat

SEQ ID NO: 1872 - DNA, 433 bp, unidentified
  source 1..433: mol_type = unassigned DNA; note = unclassified Narnavirus sequence
gaagagtcaagcacacagaatatcaaacaccgatatccaagcggagaaccttagggtccccgtaggtaccgggtttggattacgtgagacggggaagtctggtaaaaagagtatcgcagatctctttttgcccattatctatgataatgatgactatacccttccgggtcgattcgactcattacttaacttaaagtttcgtaataagcgattgcggttttcaagaaaccgagatattaagtatctcccggactcgtacgcctcgttcgttagaggtaggttagcaaccgaattgggacttagtcccctaaaatctaagattttagtcggtagatctattaccactatattaagaatagaggagttagtaagggctatcattgataaccttctattgtcatttaaaggatttttcttagaaaaaggccggaaa

SEQ ID NO: 1873 - DNA, 434 bp, unidentified
  source 1..434: mol_type = unassigned DNA; note = Anopheles darlingi virus isolate MAC, complete genome.2 sequence
ttgttcagcagagttattctcttcaatttcattgtttttgtctactgtattgcatgattttattaaccaggatgactattatatacatatcatcttggtctttgccacttattttatatttgctatattaatctgtgcgttagcacttaaattaaacaatcccaggcgtgggcaactgtgaggtttctttgagcatgtacgcagatatttgagtaagatagatttcaggtctttccaccaccttggcggaatgtactcctttatgctatattatcatacacttataattttactctgtgcattggcatttgacccaaattggttagggagtgggcaactatgaggcttcctcgagcatatacgcaggtacttacacaggacaggtgtaaaaattccccatgacatttttttcaaaaaacccgctagtcagaaag

SEQ ID NO: 1874 - DNA, 434 bp, unidentified
  source 1..434: mol_type = unassigned DNA; note = unclassified Riboviria sequence
tgattgaagaaccgacccatgaaggtaagctattcataaatcctgccaatgtggtccaagtttcatcagtatcaccctgaggggtgtctgcttctgcttggtccgtgataccacatcggcttgcaatggctgccaccgtcgtgtcaaccgtctgtgctgtctgtcctactgactggattgcgtccatcgtaactgtataagggttacgagggaggtaatcctgccagcctgcttctgctattgggagggtgtccaaatccgtatccgaatcgtcatcgtgtggggtgtctgcgctgggtccttgtcgaatataaatccatactgctttatcgtcaatcgtcctgtacttttccatatccttcatcatctgtattcgtgggggtcctcgaaaataattgtagtttgcgtcgtctccaagggcttggtatagtgtc

SEQ ID NO: 1875 - DNA, 435 bp, unidentified
  source 1..435: mol_type = unassigned DNA; note = unclassified Capillovirus sequence
aggagggttatttggggagtgtgattttggaaatgatagtatcttcaaagattacattaatagagtaaaaaacaaagttgaaattgatttattgaatgagagaattttgaggataaacactgagatgaatcagtttgacccaaggatatacatgatgaataagatagggtttgtcactagcacatcaatgtttgaagcaggccacattgcatcaaatgaatccaaccagtcaaaaggtcttcctccacaaacaagccggccatacgatgaggtgaaaccatacatgccattgagtttgaggaattcttatgagtcaaggacaaaaggcaacaggcttctatctatcctgagaaatcaaaaacgtttatgtgatttaggatcaggctctaccttaggtttaagagttttggagggcttgaaaatgttcaaggagga

SEQ ID NO: 1876 - DNA, 435 bp, Hantaan orthohantavirus
  source 1..435: mol_type = genomic DNA
ttagtgaatgtataacccttattatgtgatcattatatactactgaatcattatcaatcatatttgcactattattatcaggggaatcatcatatcagggtatgggtacatttatgggtgggaatcattattcaaagggtgggtcagttaatccgttgtgggtgggtttaggttcaggctgccttaagtagcctttttttgtatatatggatgtagatttcatttggtccttgaactaatcttgctttctttcctctttttctggcttcctctgcttactaataacaacattctacctcaacacaaaactacctcaacctaactacctcattagctgtcgctccttgattgtctttttagggagcatcctatagtagtagacaccgcaaaagaaagcagtcaatcagcaacatggggatatggaagtggctagta

SEQ ID NO: 1877 - DNA, 436 bp, unidentified
  source 1..436: mol_type = unassigned DNA; note = unclassified viruses sequence
tccgggaaggctatcagcgcgaggtggggtgggagcgtctccactggcggttcggtaacatttggtctccatctacgaagatggctagtcgcttacgtggacacttcggtgcccgcgtcccgagcgctgctaatgcagcccttggagagcactggctgttggagcagtatggtcatggactagatgcgtcccttgctgtctgcgtagcggtgaaactctggcttacgccaaccattaaggatgaggctatcgcacagtttcatccttttctggttggccggtaagttcgtttccaggtgtgtcccgtccttttgcaattccagcgggcgcaccattaaggaaattgcggggggttcataccggccctcaagtccgtgcgagtacgtctatctactcccaggtagtcggtggcttgtatagagttcatgataacaca

SEQ ID NO: 1878 - DNA, 437 bp, unidentified
  source 1..437: mol_type = unassigned DNA; note = Cryphonectria hypovirus 2
tttcagtagttccgcgctaaaagcgactcctttggaatcggtgatttgccgattacatggaggctccctggagggattgcctatctgaaagataagatggctgctgcacagccgtgggcgaaacgtttgcgtttacaacgcgtaggagaggtcctaacaaacaacctctaacgtggtccaggtggtgacactctccattccgtcaaggacgaagctcgtccgtgaaacgagtgactcgcaccctgaatgagaagagagaataacggatgcttctggtagttgtggagtagtgaccctagaaactaatccccagaagacctctcgctcatggatgccggaccaggtccacacctagtttaggtgttttgatggtaaaagaaacaccgcagactctgtcttgacatgaccggttgaccccgtacgaggtccgacttata

SEQ ID NO: 1879 - DNA, 438 bp, unidentified
  source 1..438: mol_type = unassigned DNA; note = unclassified Sopolycivirus sequence
tgagatacccgaagaagtgagttatacgactttgcacacaaatatatataagttcataactagttgttttgcaagaagaactctacggatgccagtgagttatttaacatcaagcacgccttgcaggatgtgcatattaaatcttacgcgagttacatgctctttgatatctttgagtggccggttagaaattgtctcctgtagtgcccaattgataaaggtactattttagtccctggcaagcagattcaataacgacccaccgtcctatactctttgactcataacatggttaatcagcgagagttaatatgtgcgtgaccttacgcagaaatgcacagggtaatgacctccaagtagaactagtatgtgtttgtatccctggaattgatttgaaataatgatggatgattaaggcgaagatttattcaatgaaat

SEQ ID NO: 1880 - DNA, 438 bp, unidentified
  source 1..438: mol_type = unassigned DNA; note = unclassified RNA viruses ShiM-2016 sequence
gctggctgccttagtcttgggcagacattaaatgcatccgctgtgtcttgggcagacgaaaaatgcatccaatattgtcctgggaagacaataaaagcatccctctgggcgtaacctaccacgtctatcggaaccaaaagggggcactctgtattgggttaccacgcattcccaatatgtcagtcattgggggatgacgaaggcttgcagagtgaggcattttcctcgtaaaatacccctatttaggggagtgttcgccgcacgtaagactgacgcacgctgtactggttgagtcacctttacgagcgttaatgaagacttactacaacaaatacaaaaagatttaatgttacaattaatgaggaaaatttggagtcacaacaccaaaatgttaggtttagtgatcagactccacaatgggactacaccgtagatagt

SEQ ID NO: 1881 - DNA, 438 bp, unidentified
  source 1..438: mol_type = unassigned DNA; note = unclassified RNA viruses ShiM-2016 sequence
ccccaaaaccccccccttaaactcaacactgtagtggattcattttccgttgcaaaacaaaacattactacccgcatttatgtaggctctgtgttttctatgcgaccgttacattaatctctactctgacccactagtttataaaaccgaagacctgaatgaaacgattttccttcttttcaacctctaacgaacctctgacggcttgagaaacctgaagttagtaattatgtttaaaagaaaggaaagtcaaacgcgatgactcttacatccctattccataccgttgctccacaatgtgagcgatgcgaggtcgggactgcagtattaggggaacgagctacatggagagttaattatctctcccctcctacgggagtctcatgtgagctgtagaaagcggttggcacctctcgttacctcgcctgtacatgatcc

SEQ ID NO: 1882 - DNA, 438 bp, unidentified
  source 1..438: mol_type = unassigned DNA; note = unclassified RNA viruses ShiM-2016 sequence
caagtatcccatggcttttaacgattggcaggctattgactttgtattttttgacttagaaaacgaagttgtggaaatatatagaggacacggccttgccaaccctgagagctttgtgacatatacgatcgatgatatcaatttgtatcaccttcatcatcgttttatttgtgacatcattgttagcgcgtatcttgagcagtatcaagtcattgtacatccgcttgtcaacaacgctgcactgcaaagtgctcttggcgggtaaacgcttaaacaaaaaacgctttattcgcgggaaagcagttgacagacctgtacagctaataaggcgcaaacgattgaacacaatcccaaaaaaacaacaaataattgacgcaaaaaactacggaaatcaccacatctctttgcaacattacggtgactccaaagacatacaaa

SEQ ID NO: 1883 - DNA, 438 bp, unidentified
  source 1..438: mol_type = unassigned DNA; note = unclassified ssRNA viruses sequence
tttcgggaaagtaggatgtatctttcaaaggaaagataagctaaatgtgcggtcgcacaaggttagatggaaggaaatgtccattggcataaactcagattgattgactttcaaatagaggaatgattcgcgtcgcgtggcgcctagtttacactgggcgcatcggccttgcatataagcaaggagcgctacgtcgtagcacgcattgaaaagtccccttaagcaagggagcctttgctctatcgattgcagatagagacggtgaacaatataccgaaccgcaacagagaaagcggtagtcaaagcttacaagtcgcaatggaaaccgtgatcgtacggatcacgtgaaccgaagttgcgcaatctgacaacttacgtgacaggattaaacgtccagaaggcccatggtccccggcatcgggaatccacagaaccaac

SEQ ID NO: 1884 - DNA, 439 bp, Odonate anphevirus
  source 1..439: mol_type = genomic DNA
aaattttatagaactatacaaaatatttgggttaagctggagactttctgcttgtttatggaataacatgtcacaattaattttacataaacaagccagaaggccattaaagattaatcgaaaagcattaatggcttataaaaagacccctcaaaacttagatctgacagaatctgcttaagaaaaacccgtaagagtcaggatgccaaaacctacaataacatttacttgtcctaattgcggtcatatcattagatatgaaaggagtgatctaccagccgtccctttgaaaccaggaggaagtgcttcaaaataacaggtcattaattaactttaactatgagactgtattggagataatccacatcattgattatttttaagttgttaaaattttgttttctggtagctaagattaatctcacgatgcagtacaaca

SEQ ID NO: 1885 - DNA, 439 bp, unidentified
  source 1..439: mol_type = unassigned DNA; note = unclassified Ebolavirus sequence
atgagcatgtaataatgggatgatttaatcgacaaatagctaacattaaatagtcaaggaacgcaaacaggaagaatttttgatgtctaaggtgtgaattattatcacaataaaagtgattcttagttttgaatttaaagctagcttattattactagccgtttttcaaagttcaatttgagtcttaatgcaaataagcgttaagccacagttatagccataatggtaactcaatatcttagccagcgatttatctaaattaaattacattatgcttttataacttacctactagcctgcccaacatttacacgatcgttttataattaagaaaaaactaatgatgaagattaaaaccttcatcatccttacgtcaattgaattctctagcactagaagcttattgtcttcaatgtaaaagaaaagctggcctaacaag

SEQ ID NO: 1886 - DNA, 439 bp, unidentified
  source 1..439: mol_type = unassigned DNA; note = unclassified RNA viruses ShiM-2016 sequence
gttgcatgggggaataccccatgcaacgtttgttttagcctgtggcgacacagggaggcgtttggacagcttgctgcccagcgccttgacttatcgctcttttcttttctttttctattacactttccgcaatagttctttatttcctgcaacgaaagccgttctaaaagaagtgattagttgtacatccacttttacctttctttatttacttctctctcttgaggagttcttttcagaaaaagacatggtgtgagtaggagtgagtctgatggccgagcgtggttcacgcataactggtcagattcactctggagaagcccttgtcttggctctatattcgtttgtgtaagcccgtttaggtatgtgaaacagtttagtaatacagtattcgtagtttttgaggggaaaccttcttcttcttttacttaggctgaaa

SEQ ID NO: 1887 - DNA, 439 bp, unidentified
  source 1..439: mol_type = unassigned DNA; note = unclassified RNA viruses ShiM-2016 sequence
atcagctcacgttatttttccataacgcttgtgtgtaagtatcgttacgttccctaacgtaggttgggtaaggtgacgcttctcgtcataccatcgttattttaacaactttaagcgagcaaagaaaatttttaatttcttattagtatttattttcagtctcatatagctatatatatgtgagggttttgccacttgccctttaaaggttaaaacaaaacactattataactagctaacgactagcctacctctgagtgttgttagagcaattgtaaaactctaacatcaacaggttcaagggcgaagtgccacagatgttataaggtgtgtggtcaattgcaccttgatgtgcggggagtgacgtcctacatacaattagtcacatacatgatggccaaaggggatgcttcggctgaactgagtagcaacacaaaat

SEQ ID NO: 1888 - DNA, 439 bp, unidentified
  source 1..439: mol_type = unassigned DNA; note = unclassified Riboviria sequence
taatcacccgaggggtcttacccatgcaaaatgtaacactaacaatagcggacaaatcttatgcacgttttcaggaaacgccagataaaacaacttacgttgcttctggccattctgtcggcgatgtcgatttgctgctactcggccgtaccgtcccaaccacaaccagtggtaatgccaaagttcgcgccaacctcgttaatgactttacgtcaggaaccggggatgataagaccgttattggacgagcgtatgctaatgttgaaacatcggtgcctgctatggcatcagatgaagacaaagcacagctgctatctgatttacgggcctacgtggcatcagaatcttttgccgaattgtataataaacaatcgatctagtatggaattacccgtactagtttaaatagattgtaaactttaacaacaaggttaagatt

SEQ ID NO: 1889 - DNA, 439 bp, unidentified
  source 1..439: mol_type = unassigned DNA; note = unclassified RNA viruses ShiM-2016 sequence
atatccaggtggaagagcctacacgtgtagagccagtgcaacaggtatacattccagaagctccatatcaaactgaacagaaccatttaaacttgaggacggcctctgccattgcggaggccagacagttgaggcagggcgctcctgttccgccaccaaggagtgtggcgggaccagtatctttgagtttgcagaggcagacggttcgtacgggtggccaacaatcgattcctgcagtgccaagcgtagtttcgcacggcatttgcgaatcgcagcagggtcgagagttgatatcccgtggagccaggcgcaaacgctcgaagaagcagaaaccagcgttgtcgcaagacttagttgtctaaagcattatccgcaatatgcagataatgctgaagacaacctcaattggttgtttttggcggcggttttggatgttgac

SEQ ID NO: 1890 - DNA, 440 bp, unidentified
  source 1..440: mol_type = unassigned DNA; note = unclassified viruses sequence
attcagacctcccacccgacgacagccccacacccgactcgcgtttttttcaaaaatataaaaaccaaaaaaataaactacctttacatccaccccctgtttccaagcaccagcccgggtcgacagccgacctaaacctttacggccataagccatgggctccctactcctaccctgacccgttacacacaccttacctctctctgctaaaatacgcagcggagacaaatttacatgctcagaaccatgtcctcgccttgttactgaccatcacaaagcacaacttctctgactttcaacgactcatcgaccgaactcgcaacaaccaccttctccaactgcggaggagacaagacgctgcgttcccggatatctcttttccaccgggaccaaggaacttcccccgcttcggcaaaaaagacgagctcaacctcgacctc

SEQ ID NO: 1891 - DNA, 440 bp, unidentified
  source 1..440: mol_type = unassigned DNA; note = unclassified viruses sequence
attctgtcctcccacccgacaacaaccacacaaacgactcacgtttcttcttaaaatataaaaaccaaaaaaatgaaccgactctacaaccacccctgtttcacaagaaccagcccgggtcgtcagccgacctaaacctttacggccataagccatgggctccatattcgtatcccgatcccctgcacaccccttacctttccctcttgaagtacgccgccgaagtgaaccttcacgctcaagaccacgttctggccctacttctgaccatcacaaagcacaacttttctgactaccaacgcctcattgaccgtactcgtgacaaccacttgctgcaacttcgacagcggcaggaaagcgccttccctgatatctccttccctcctggacctcgcaactttccccgtttcgggaagaagactgagctcaacctcgatctc

SEQ ID NO: 1892 - DNA, 440 bp, Pillworm peropuvirus
  source 1..440: mol_type = genomic DNA
tccatctcaagtcatcagaagaggaaagtgcaggaagctctaatctaaataggtaagttgagtgatctttatatataataattttaggtaattgtattggtttttaataataaatattctctttttaggacccacgtctgaaggaattggatgcatcaagtgtcaaacaattgtcagatgttagaaatcacaaagttgaaactgtgcaatatatccccaaaggggtacaattaagtgttttgtctgaattgtattttctaggagatagcttactataaattgatcaatcaaaaaattattttgtattattgatgttagaattagctttagtgattttgagtgtgattcacaatcaaggtaatcatacacttctttaaaggactttgttataattatttattctctattgttttaagaaaaactaacaagtcaaaatcaca

SEQ ID NO: 1893 - DNA, 440 bp, unidentified
  source 1..440: mol_type = unassigned DNA; note = unclassified vectors sequence
tttttctcgagattgcttcatggaaaagctcagcctcaaatcaatgaaaccaggatttaattatatggattacttgaatctaagattacttgacaaatgataatataatacactggagctttaaacatagccaatgtgattctaactcctttaaactcacagttaatcataaacaaggtttgacatcaatctagttatctctttgagaatgataaacttgatgaagattaagaaaaaggtaatctttcgattatctttaatcttcatccttgattctacaatcatgacagttgtctttagtgacaagggaaagaagcctttttattaagttgtaataatcagatctgcgaaccggtagagtttagttgcaacctaacacacataaagcattggtcaaaaagtcaatagaaatttaaacagtgagtggagacaacttttaa

SEQ ID NO: 1894 - DNA, 441 bp, unidentified
  source 1..441: mol_type = unassigned DNA; note = unclassified Metaavulavirus sequence
tgctgtataagcatcttatgatgacatataaaactgttgcagaaacatccaagttaatacacaaataagttatgtttcaaagggggtaatacactatcacgagacctaaattattaagtacacactaagtaccactgggtcagacagattgagtcttctaaaatgattgtcgcaaataatctctatgacactactgcacttaactattagatctgaccaatactatgataaccagtttcttgattattgatattctgattcgcagttcaatttatgtgggttaggcttatcatatattaattccgccaaagtagggggaaaggtttctcaatcagtagtgacagttccaggtctcttcacaattactgttcttataagatattaagaaaaaactaacaattcagcagggattaaacaagagacaattgggggagaattacc

SEQ ID NO: 1895 - DNA, 441 bp, unidentified
  source 1..441: mol_type = unassigned DNA; note = unclassified Sopolycivirus sequence
ttaacgaattcgccctttgctacggcgggttgacggcatagttatttaatcaccagtgaatggggtgtgtaccttcacaaaattcttaaacggtttacgattctgatatacgacacaacaattttaactgatctcttatgacgacaatggaaacatttacagaatatactagcttgccatcaacaaggaattctccagacaaagttttgcggttttctattgttcttggatgcatttttatactgaccttgcttgttattatgactacgattgagattaaagaatatacagaacgaagacatcttgaaagaattttgatagagatagaaactcggcgaaattatgtagaagagtctcttttgaaatcaaaatctttcaccccgattgattctgttgatttttcacaaacatcaacagttcactctcactatattgatttta

SEQ ID NO: 1896 - DNA, 441 bp, unidentified
  source 1..441: mol_type = unassigned DNA; note = Picornavirales sp. isolate ltt163pic3 genomic sequence.1 sequence
atatcgtcccggcgactagccatccaggaactgtaagtaccaaggcactcgaggttcccttcatccgatagggcataaaccctgtgatcaactttcttaccactagtcggtccagattttccgattggcttttcggggcagatactagcttcatcctcagattgggcgtcgtaataaccatccgaaacaccatcatcagaataatcctctgctggggtagaatttaggttctcgacttcttcattcatctcagcaaaggattattctgatgatggtgtttcggatggttattacgacgcccaatctgaggatgaagctagtatttgccccgaaaagccaatcggaaaatctggaccgactagtggtaagaaagttgatcacagggtttatgccctatcggatgaagggaacctcgagtgccttggtacttacagttcctgg

SEQ ID NO: 1897 - DNA, 441 bp, unidentified
  source 1..441: mol_type = unassigned DNA; note = unclassified RNA viruses ShiM-2016 sequence
cctggatgatactggggtgtaggtaagaggcctacacattgaacaacatattgttctaattacgtaaggtatacggtgtagtcagctctaataagaacaactggctatattcatgcacatatcagtgaaaattattattattctatatatataataaaattcaagtgcaagtacagctttaaagcacgccctaccaaggaccgactgtaagttttgctgaattaataaacttaatgtagatattttgtcgtttgtagaaataaactaccactactgactgtttagtggtaccattcattgggttgagtggaaaagacattctcagttgataataataagaacaataaaaacaaaaagcccttaaataaaagaaggcaattgaaacgagatagacgtgtggtggtctaaaaatagccatataaacgttaacgtgtggtggtg

SEQ ID NO: 1898 - DNA, 442 bp, Hubei chipolycivirus
  source 1..442: mol_type = genomic DNA
tctttacgaaaatttcagagatattctgggagtccgcgtgaagcttttcctgattaacatcaatatcgtggatgacaaaatacaaaaattccttgactgcgttgataggatatttttgccgtcgccgccccacgcaggaaatgggtttgtaatcgctccctcgtaaatccgaagggttgaggtagagtggtggcgcccatgtagccttacgagcagatcgatgcgtctcctttgtctaaattgacggaatttgagcgtattgaacaattcatgtaaccaaaaactttttctttatacaaattttacttatcatgtttctgaagtcacagtagcttacaagactttagttagttgttcaggatgaactttaaaccatatgggataagtggttgaaactttcccgagagtggtccaggatggactaaaaaccaataaaaatttt

SEQ ID NO: 1899 - DNA, 442 bp, unidentified
  source 1..442: mol_type = unassigned DNA; note = unclassified RNA viruses ShiM-2016 sequence
gctgcaagtcccttttgggacttgcagtcagtattattgtttaattgcgttattgagcgtttggtcgtttagaccaacctttagtaatgtttttatgacatctttttctcggcttataaattgccggcttttgcgaaaatttacaactttttcatgccaccaacacttttacgtggtacactcccttttctgttttaggaggctaatctagcttgattagtgagaaaaacaacgtatgtatcttggatatgatccgtttactctatgagtattgacagaaactttttatcttagtttagtaaaactaagcatttctttaaaacaccttagaaatgaccacaggtccttagcatcgactattttatatagttaattttgggagttatagcccaaacactgtaaaatgaactatcagtgaaaagttagtcaaccataccccacc

SEQ ID NO: 1900 - DNA, 444 bp, unidentified
  source 1..444: mol_type = unassigned DNA; note = unclassified Qinviridae sequence
agacaacccaactcaagacataagagacaccaacgaacttcaataaatctcttaaaggttgtctcacaagcaggcccaatgataagttaatttaaaaccttttgtctgcttgtgaacctgatatcatcaagaatcgagcgtctaacctgaattttgaatattttgtccctgctgttctcgttggaaaaaggtttgttgtctctatatgcttcttctctttgatttccttattgtaattaaatttaaatctgcgttatatccagattcagatgacaagtttctaattttaccgatagatattctgcataacttatcagctgaacgctcaacctttccaaacctgaattgaacattggtataatccttaagaggtatgtacatctcttaactgttcaaaatatcacatttgatggtgactaacacatatctttcatttaaacagag

SEQ ID NO: 1901 - DNA, 444 bp, unidentified
  source 1..444: mol_type = unassigned DNA; note = Soybean leaf-associated ssRNA virus 1 isolate SaSSRV1-1, partial1 sequence
gaaaagaaaaggaattgcactcaaagttagttcttcaaaggaagattgcaaagaaagctctagtgatggcaaagatgtagagaattttatcttgaacagagtgtgctgggaaaatttacccgatatttgcacctactaaagcaaaattcgggcgtgtagactctaacccgttcgcgggggtgagcatcctgcctccccgggggccagcatcttcctgtcatgggaagagcggtggcgagcctgcttttagaccggggtcgaaggcttcgtaacgtggcgccacttggtacacgctttgggaaatgatgccacggcttgtcattccttctgattgtcggctgggaagcttgaaatatcttcgggcctgggaaagcccttaaatttcccccttgactggggagatccgtctaacagggggtggtggccaacaccgttcatgaaact

SEQ ID NO: 1902 - DNA, 445 bp, unidentified
  source 1..445: mol_type = unassigned DNA; note = unclassified Picobirnavirus sequence
acaaataaatataggaggaagtgtctatgaaaaactgctttcttaccattgtgatggcgataaaacattggattctcagcgtactgttacgtaggtacgcttgtagaaagaaacaaaataggcgaagcttcaaatcgctcacgaagcaacagaaatatataatttataaagactttagggaatcgccctctaaagcaaaaggagaacagtatgaagaaagagatcattgccactaatgttattgaagcgatggaattagttgacgaagatatgcgtcaggtcatgcagagttggtgtcgtcaagatgtgatgtttagacatacaacagctgataaacttgtatctaaaggtgagagatggatcgctacactcactattgacgctaaacgtcctaacattcaattccagtttctaactatctactatatttggaaggtgtctaaag

SEQ ID NO: 1903 - DNA, 445 bp, unidentified
  source 1..445: mol_type = unassigned DNA; note = unclassified Benyvirus sequence
aaattcaaaatttaccattacatattggtatttatttaccctcagttggtgatatatgtgaggacgctagcctgttgggtttcctgaccgaccaaatccaagcgagcttaatccaagtacctcgtctcaaattgagtgtcaagtgaataagcatagtgaccccatcgtttcagggtagttgacggctattaatagacatattacagacgcttctctttatttatcaccaacatgggatgtaatgtttatgcgtgagcctatggccgcattgtaaaattagtggttttgaatttctattcttcggaatatacaaggtttaaaagaccagcatttgggttaaaaatttttaaaccttactatctttaactagtaactcgaattcgatttatattcagattttgtatatcaagttgttgtgttttctgatcatcattaagtggccgtc

SEQ ID NO: 1904 - DNA, 445 bp, unidentified
  source 1..445: mol_type = unassigned DNA; note = unclassified Hepeviridae sequence
ttctagtcatcatcaccgtcacgatcatagcaagcagcatttactatggccaccggcgtgcatcacgacgtttgcggtttccgcgagataaatgggcagacgcgatgcctgagctgcatggcgaagccaggcaacaatccatccccttacgggaagcatcaaccggggtgtgagtgggtggctgccatctgcatactcaccggccaaccgaccttccccgtgtgcaagctacactgtagaaaccgctacctttcaaatcaatccgtctgcacgcataccacacacacaccatccactctgtgccccatctgcagcatgaagaacagaactttaccaacagtcagcaagtgctattcagcccatcaggccttcctgggcccactccacgccaaacacaccagagtttgcttgatctgcaagcagcattcggtatgtttagtgtgtg

SEQ ID NO: 1905 - DNA, 445 bp, unidentified
  source 1..445: mol_type = unassigned DNA; note = unclassified Bunyavirales sequence
actacagctgcagcacgctgtgcctatatcgtatgatacaatacactcttgaagttaacaaaccagaagacgaagacatagttttaactgtagaggacttatcttataggttatccatttcaagtgagggtcatcccttagagacacaaatatcatattgtaattgtagttgtaattattattatagttattctagtgtgggttactgtagattatcatattttagtagagttattaatatcaatagtagtcttacaatacattattcagggagttatttagaagtgttagcatttgtaaatacaataccacaaagcccattcaagcaggagatttctcacaaagtgatattagatattcacaggtctgtaaggcatcttggtgcactttataataacaacaacacacttagattcatctgcaacaaccctttaccgtcaccacc

SEQ ID NO: 1906 - DNA, 445 bp, synthetic construct; identical to SEQ ID NO: 488
  source 1..445: mol_type = other DNA

SEQ ID NO: 1907 - DNA, 445 bp, unidentified
  source 1..445: mol_type = unassigned DNA; note = unclassified Picornavirales sequence
ctcgaaatgtgagattggcggcaagagtacgaaaatgatgtttccagtgattttggattgaatcaaactggaagagctattggcaaaggagttctgtaacagcgacatcatcgccagaccgggcactagaaaggcggtatagcgaaccccggggtaaacttgaacgtgctcttccagtacatgggagaaatctccagagtcaatgtgcatgactaccgtaaaaagtacataaacctcgtgccaactgaaattttcaacttcccggactatgacctcgttgttcttcgactaccccctggatctacaggtggattgaccccacaccgttctattgaaaaatgctgcgtaagcgaagtagatgaacacggcaaaccacatccgcccaccatctgggtcaacagaaaactccggtacattaattatgacgtaaacaacaaacactgcc

SEQ ID NO: 1908 - DNA, 446 bp, unidentified
  source 1..446: mol_type = unassigned DNA; note = Sugarcane mild mosaic virus isolate PSR07106, complete genome.1 sequence
tctttatctttaccggcacttccagcaaagaagtcattcctgactttctctgttgttccactatcattacgccagcgcccgcgctcccattcctgtaaccccaggctgttgtctagggttcgctcctccaccatcgccacaccagcgccctcgctctccttcctgtaaccccaaacttttgtttagggttcgtttgttctcaaacactctcacgctcaacccgttcgttttcccgtctctgtagaaactctgctctggtgtgtttgacctcagtcacgcactgtttacgcttcttctttttccaaaaacacaaaaagatttgttgtttcgtttctgtagaccagtagtagacttgctcccttttaccccttcccttcttacctttaatcctcaaaggttcttttatctcaatatcgtacatacctttcgccttctagttttccagt

SEQ ID NO: 1909 - DNA, 446 bp, unidentified
  source 1..446: mol_type = unassigned DNA; note = unclassified RNA viruses ShiM-2016 sequence
cctttcgtcttttggtggtggccggcacggtcgcggccgctgccgcgtcaggcggctcgggacagacatatctcgagttcttttttggtcaagtcgggagcgccgtcgcgtacttttacgcctgcgcctcgactggccccttgtcggccatcgccaacaccatttcgaccggtggctggtttaccgccgccgcgggccttttgtgctcgcttttcgtggaactagcgatagcgctcggctggctcactgccaacgcgctgttgctcgccctgggagcggcacattggctcgccgccgccgtgcctttttcctttttctacctctcctgcaacccggtggccgcggtcgcggccgtcgggttggccgtcgccaccgcgtatgtcttgcgccactcgcaccgcgagttttacgcgcggtacgtgggccctttcgtcggagacgccgac

SEQ ID NO: 1910 - DNA, 446 bp, unidentified
  source 1..446: mol_type = unassigned DNA; note = unclassified RNA viruses ShiM-2016 sequence
acgatctatcacccaattttctcacggaatttggctggcccgatttgcacgggattcgtgactctctttgctatcacgcaaagaaagttcatacgacccgtgcatcgacggttaagccaacggaggatgaattcaataaggtttgtttttatttggagcaagcatatgcgcctattcgctcggccaaattggttgagctgaatcgacccacgctgcgacgaataatcttaacacaactggattggacttcgacccccgggcatccatatcggtgttacggtaccaccaacagggaattgtttaaattcgacggacttgatgttgacgacgcgcgttttgaagtgatatattcggcagttgaagcacgatggcaggaactcctgactcggccttcggcagaccccattaatctcttcatcaagcgtgaacctcacaaaaccaagaaa

SEQ ID NO: 1911 - DNA, 447 bp, Odonate arlivirus
  source 1..447: mol_type = genomic DNA
taaagtaaagacagatagcaattgctgggtacaaagaatttatgcagagaatactcatcaaataataggaaagaacgagaaaagcactcaagcaggatacagcacatgttatgtactatttaattgaagatgctgtttcactttaaatcatgcaacattctggaataaggtattgatgcacatataatattcttataatgtgttctgttagacaaaactgtattataatattcgatgacacctgatactttgtgatttcctgtaatctacctatgatatgatggtagagtgaagcatttcatagttgatatacaatcaattgtaaagcaatctattaataaaaagacaagtctccaaaggatcttaaattacatcttatcagaataaggaattcctagtgattcatcaatccttgaatgcccagtcagagataaggcaactataaac

SEQ ID NO: 1912 - DNA, 447 bp, unidentified
  source 1..447: mol_type = unassigned DNA; note = unclassified Picornavirales sequence
gggatttatacgagttgcgaccatggggcaaacccccgaaaccctatttagggtggcagttggtcgagcctatccgcgtcctaggagaatattgtgagttgaaatattttccgaagacaatgactcgctgaaataaaaacaaaacaaaatttagtcacatttgttcaagatgaatatggtcagagtgccggttcaggagctatccttgctgacccaaccattattcatacagatgaaggtgattataaagattttttctctcgaccagtcaaaattgcatcatatgattggacagagggtaattctgttactggacaaattagcccgtggactttgtattttcagagtgttcccatagcagcgaaattgcgaggtttttctcgtttgcgtgctaatttgcatatacgtattttactcaatggcagtccatttcggtatggggatatc

SEQ ID NO: 1913 - DNA, 448 bp, unidentified
  source 1..448: mol_type = unassigned DNA; note = unclassified Flaviviridae sequence
ggagtcgtgccatgtgcaccagcctgtaaaatggccttctttgaagatgttcctaggttaatgaacgtctaaccgcccactctttggttgagacaaaccttctgtgtttgttctgagtaggtaaggttgtgggggtgtgtccccccttgcgaagggaaaaaaggctaatcccttgcaggcggataatggtaagccttgtgtgagcacctgaacttccatgactcgtttgctttaaggggagaggccggatttccttgagctagttaaagttttacccctcaagggatgaagactagtcgcggtagtaaccttcatcagctttaacttttcccatcgaaaaaaccgtggggaaccccaagctagcccaaaggtgcttggggaggttgccagtgaccgccagaggataacctgggcacactggtatcaaatctaattattaattctcact

SEQ ID NO: 1914 - DNA, 448 bp, unidentified
  source 1..448: mol_type = unassigned DNA; note = unclassified Iflaviridae sequence
acacatacttgtctagcacctgcattccaaggagtattagcgaaaacctttttcttaaaaccaattcttaattttaagtacaaccctcgcagaacttacaaatcgtgctcacgccttttgttatgtttagttaatttgtagttgaagaatttggacgaataatataacgtgcttattattcacgagaccctctaacgtttttaacgcattgatctcgtaaaatctgaagactgatcttacattgacattaaattaaacaaaagaaacgcaccacgacagtagtgtggccttactgttaaaacaactaggcctaacgagtatttctaactgtgacgttcgatgaatcattccgaactatgtactaactgatctaaatcgttgttctacaaggaccgtttcaccgcctcaatagatcctaactatagaggaaaagaaacaacaaacaaac

SEQ ID NO: 1915 - DNA, 448 bp, unidentified
  source 1..448: mol_type = unassigned DNA; note = unclassified Picornavirales sequence
aaaacccacgtttctaagtttactcgccggccaagaatggctactggaggcacgttggaagctacttatttctagcataacaagttcagtgtcgaggttctgccctatgtttgcagatttaaggtgctgggtacgcttttaggtctgaggaccaagaattacctttactactgtacaatatcaacatgttcgctccgcgttcgggagcccaccctactgtaatttcgaaaaacagtatatagggcctagcaacatcaccacgatttgcgctggtgtgagctggggtctatgttacccaggtgggaatttcattccttatttcaaggtaaggatgatcttaggggttgagataccccacgctacttgagggcatggcctatccatgacttgcgctaaaaattacgttgcgtatagtaatcacgttcccatttctctcaaaccatgaaaa

SEQ ID NO: 1916 - DNA, 448 bp, unidentified
  source 1..448: mol_type = unassigned DNA; note = unclassified RNA viruses ShiM-2016 sequence
aataccggcgtcacgagtaaggaacgtgtggacagggcggcctgtggactcgtaactatttagttttaccacctaggaccgagtttaaattgtccagggaagtggcgtcactcacgccttgttgagtcgcaaggcgtgtgtgaaatgactcgccgaaactacagaccatattaagagagtagctactgagactagcagagatgagactgaggtttgtgaggttattgaaggtctcacaataaataatgacgcccaacccactggagtgaccagcttcttgcaagaggcatgttcatcagtggaagttttgggtaaacatcacaaaccgcctcaagttttgaattatcaagaagatgttcagaacttgactgattattttaaaagaccccggttgatatccagaggggctttggctttgtcttccattgcttctcaagggcagtgggat

SEQ ID NO: 1917 - DNA, 450 bp, unidentified
  source 1..450: mol_type = unassigned DNA; note = unclassified RNA viruses ShiM-2016 sequence
tgcccatacggcatccttgttgatagtttcacctttcgaggtgacgtcgaccgaaattcctgtttatctaggttgtaatctagtctattagtgtaattgtacatatttatttatacactatgtaaatatttgtaatatattccccagcggatttgtaatatagttagttttgttagttttccttgagaatttctttttctcaaattttagcaatcgaaccctattggatggcattttggaattgaacgacgcgaatgttcacttcttcgtagtctgaccccatttccatttttccattagttcgctggttttgcgttacgccttttgtaccttaaaaagatatgtgctgcgcactttggtctggactagacctaataaaacttgttccccgttgtgcttatgtgagtaacgcacgagtacgtaactcaaagactcacatatattttaatt

SEQ ID NO: 1918 - DNA, 451 bp, unidentified
  source 1..451: mol_type = unassigned DNA; note = unclassified Picornavirales sequence
ccttagggttatttttattgtaactagttggaacaatttacaacaactaagctactttacctccggtctcatgtagacatttggggtgactgtcatgcggtggaacacttcctgtccgtttgtacatggtatttggtttcactgatggctttgtcgctaccatctaaatgcttgagttctttttggatgataacaatattcttgtttcttggttggattatgtttgcctggcagaaaggtgttaaccatgcactaagtatgacatgcaattcccagccaagggcgaactgtacattgttgagtgcacgttagatgttagctagggaactagcttaaccaggatatatccgacattgatacgttggtagtgggggttgctaccatttatgcacacagcctgatagggtcttgaccagagataatgtgcagtataattggtctgtccgtataa

SEQ ID NO: 1919 - DNA, 451 bp, unidentified
  source 1..451: mol_type = unassigned DNA; note = unclassified RNA viruses ShiM-2016 sequence
gtctggtgcggtaccgactcagcagcgcctggaactcaggcgcacagggctttgtagctgcagatgtcttctttttcctgtaactacaagcaatgtggacgaggggccacaacagcaatccaatcccccacaaggtagcgcaccggccgtgaataagccggtagagtatggatttactccacccgaaatctccaaggatcagaacgtaaaattcttggatgccgaggtaggcacgggtgatacacgtggtaccccttccgatcctctccgtgattctactttgatcggagatgccggattgggtgatttcttcaagcgacctataaagatagcgagttttgactgggccacttctgtcaaactcaatgaacgtttcaatccgtggcggttcttttgggaagatcgtagggtgattaatcgtattgccaattacaaactcctgaaggccacc

SEQ ID NO: 1920 - DNA, 452 bp, unidentified
  source 1..452: mol_type = unassigned DNA; note = unclassified Totivirus sequence
aaaacgaagaaactacctctcacaagttgggagagaagctgtatagaaactcaccctcggtaaacattcttacggactttgaacaagagctagtttcgtacaactactcacaaaagagtgaacgcactgtcacgcatgcctggggttctaacttggttccctcaagcatacgcgtgtgtggtgggcgcgtgtatgcctcaccatttgaagatgctactcatgtctacctcagaccgtacgcaggaagggcatgggaaggcgaagacgtctggctgcatatactcggctgcagcacgcttgccactgtgataacgattgccgggcgtaagcactcctattacaagctagatcagtactgccggtattcagatccttcgattattgctgtagtatcacgacacttgacggggctgtttgagtcactaaacttcaaccagcctaatgatgatact

SEQ ID NO: 1921 - DNA, 452 bp, unidentified
  source 1..452: mol_type = unassigned DNA; note = unclassified Picornavirales sequence
tatctcacgtcgctcgtacgcaaacgttttacaccagattcgcttggtctacaacggctacagcaggttcagtgttgtttagcgcgcccatcaccccaaacttctatcgttatactatatccgccgctcagtacgcccctacaactttagcgtataccgcagctgcttttaggcaatggagaggtggaattaatttcaattttaaatttgttaaaactaaatttcattctggtagagtaagaattatttatgtgcctggagattattcagcgggcacaacgcttcctgacagctttgatatagacgctaattattcaactgtggtcgatcttcgatcagatacagatgtggaatttaatgtaccgtatgttgctattcaacaatggttgttagtcgataatgctttccctggcacatcgcgtacgaatttgtttagtactggcaccatttat

SEQ ID NO: 1922 - DNA, 452 bp, unidentified
  source 1..452: mol_type = unassigned DNA; note = unclassified RNA viruses ShiM-2016 sequence
tgggagtgtatgagcccttacaaaccttgtgaggatgatacgcgatcgcagtcccgacttgtctccagacgaggttagacaggaagcagtgttgcgggtccgacgggcccggacagctcctgagctagtctggggcctattcgacgctgtgaacaacgcctgggaaggcacccctggacagttcgcgagtacgtgctgggatctctccgcgcttctgcgccacatggccatcggcgccaacgggcgagtgcagacagtccggagatcagaccggtgcttagcaagagccgtccttgaaaacgcatttgggaggagcattaggcgcaacctaagccttcaccgctcctaccgccatcttcccaggaatccaaccctgcgcgaggctttcctcgctgagagattggtggcattggaacgccgaatagttcactacacggtgacctggtcggacg

SEQ ID NO: 1923 - DNA, 453 bp, unidentified
  source 1..453: mol_type = unassigned DNA; note = unclassified Hypovirus sequence
aaagatgttttcattaatcagtgaacgaaagttaggggatggtactcttagggttgatctataaagatcctaactaggaggaaacatggccctgtctcgtgatgatttctttgttcaatcactaaagcttctcttcaccaaaaaggagagagctttgagagcttagctgtttcagctatttgaaccccgaaggattcatgtcatagacatttgacttctatttgaagtcgttcattcgttcatccgaagatgtaaaactactgcgcatgtgcgtgatggtcctgaattttcagagtagaacggcagggatgattgttctgtggagtagtgccctagaagaacaaatcctcattcccactcttgaaagtggcccatggcaacccgtgatgcccggatcgtcttctggacgtaaaaggttagaggctacgagagactgtagagaccttggtcaaa

SEQ ID NO: 1924 - DNA, 453 bp, unidentified
  source 1..453: mol_type = unassigned DNA; note = unclassified RNA viruses ShiM-2016 sequence
ctgcagggtattcaccctgcagtcttgttggaatatttgatagtatgctacttatgataattagctcgttcgggtattctaacccgtcgacttaattacatagctagtatggtattgtatgtattttgacattttaatctaccttttttgttattttattatggttaaattaaaatatcgccttttcgtcttccaaaagacacaaaactattggttctgacttcgcatgatcaggtaattaacacttcgtgtaatgcaatctccagtactttacagctgattcaaactggattaacaacttttggaatcgccgctaatacacgttacgtatatgacgtgccctttgatggtacgcaaggtgtctgtcctttttacagaacgcggtttaatgggctattatatgccggccatgcaccgaagcactatttgtgcaagcaaaacaggtacgctcct

SEQ ID NO: 1925 - DNA, 454 bp, unidentified
  source 1..454: mol_type = unassigned DNA; note = unclassified Fusariviridae sequence
gttagaagccgtctagctctcgacgttaaattgagcagacatttcgtttaagaagggggctagagaggtagcctggtgtaattcctcaccccttaaaaagttggttcgcagccatccatattcttaaacggtccagaaagtgtaaactggaacctgtgaaaattaaactaaggtggtgacttagataacctgttgtgagtggacgctcaccctcaagtgaagaaagctggatttgtacaggaaggcacttagtaagggtgtgggtgttagatgacgagtgaactgagggacccaaaaggttgcataccagctcggcatctgcccacacttctgaaacagtgagcaccccaacaaggaaggttctccaagcttgattgacagatgtgtccactgaccgggcgaaagtgccctgacggtcgtgaaagcacggcaaaacccactaacatcactcatc

SEQ ID NO: 1926 - DNA, 455 bp, unidentified
  source 1..455: mol_type = unassigned DNA; note = unclassified Totiviridae sequence
gccccttcttcgtaggcagtaaacctaatactgcctctaagttctctgtgtccggacgcgcggctgtaaaccgcgacgctgacctcgatatcctgctggcgggatgtcgtgcaacaaaaaattcaaaaatatggacggaagcggtcctgaggagacgtcacgaaacggctggtccgtcggccgcgagtgcagctgggctgtgcaatcaacaactgctggtggatagtaccccgaacccccctattagtgatgctggacccaccggtgctggcccaagagctaagctttctgcgcgagcttctcgtttgcgcgtctgcgaccccacggttggcgccaccgggaccggcggaacgaacggtgtgcacggttccctctgtccacctgttaccgcgggcgttccttgtacggaacggcctgtattcaaagccacccctgccatatcgcaggctccgtcc

SEQ ID NO: 1927 - DNA, 455 bp, unidentified
  source 1..455: mol_type = unassigned DNA; note = unclassified Picornavirales sequence
ctacccgcatttatgtaggctctaagagttaccttatgattggacacagtttatgagtgatttggactctttccgaatttgatatattttaaaattcttacaatttagagagaatacgaacgcgatggaccttgagaaaatcttagctagtaattgaatctttattgcgtaagaatgagatgaacggaaccttaccaatcccaacccaaatatggaggagctattgcctctttcctgagggcggaaatcagtattaaccgacgtaaacccaaacccaaacccaaaccgaaaccgctaacctgaactctgcactactctacttggaacgcaaaggaaaaatttcactagaccaatgctgttcacgacattgtgaacgcccatattttgtttatcgatttggaagacaagctgtcatcaaaacacttgatgagtgcattcttacggtcgacactccc

SEQ ID NO: 1928 - DNA, 455 bp, unidentified
  source 1..455: mol_type = unassigned DNA; note = unclassified RNA viruses ShiM-2016 sequence
acgggctctgcactgcgcctggttttaaatctcctttctgtattttgggagtaccaggtatcagtgtaacggcgggagcccgattacgtaaggatagtagtaatattaggtatttaacacaaaccagcctaggactaccattccaagcccctgaagcaagcctacacaatgcgctcgttgcgatagaacgccgggttttcacagtaggaaagggctccgagataatcctcccaccacaagcacaacatggtatttttgaggaactcggctacttcagagatgaggtagtacgtcattcggggtattgtaggaaattcagcgaggtcgagctcgccaattcgtaccattctggcaaaagatcccagtactacaaagcaattgcttcattaaagactcgtccatacgaagaaaaggatagctttgtcacagcatttatcaaaaaagaaaagcactgg

SEQ ID NO: 1929 - DNA, 456 bp, Ollusvirus coleopteri
  source 1..456: mol_type = genomic DNA
cctacttctttatgggctattttaaaacttgagttggactaatatattttcataatgtctaatgatagggttgagtctctccatcagatcagaaacaaatctttgccaagccaaaaatacaagactccagataaaaaaccagacttagatgttgacaagcgtttggcaatcattgagtcgaagttagattctgccttggctctaatcagacaattagtccaacttaaaaatgctgaagcttcaaataataatactgttaaatcttctgcacctcctatgtatccccatcttcctcacaccacccagcctagctatgttactgcattccaattgcccaagccttattaggttagcataaaaagtttaataaaaatggctgtaaattagctattttaaaagtaatatcgcttttaccctctttattaccaaaccagctatttttcagctatctcaatc

SEQ ID NO: 1930 - DNA, 456 bp, unidentified
  source 1..456: mol_type = unassigned DNA; note = unclassified Sopolycivirus sequence
cagcctctgaagcttttgaagctgaagaaggtattgaaagcggagttaaagttggtgagtcatttggaggaccattaggaatcggtgcaatcattcttcaatcattaggtgatgtaacaacaaacgcactaactgctggaatgaaagagactcaagctagcgattatacacagaatgcaacgcaacaaggaattggagcacagttgcaagctggtttaattgaaaagaatgaaactgccactattgatcaagtatctgctgtttctaaaggatttgatcttttgggacctgctggtgctggaattggttatgcaattggacaagcggcttttcaacctggagatccttatttgaatacagtcaactcctttaatggaatgacgaaccctcaagacactggaattgtacagtcactgaatactgatagtgcaagcggtgcaacacaacaagtagaaa

SEQ ID NO: 1931 - DNA, 456 bp, unidentified
  source 1..456: mol_type = unassigned DNA; note = unclassified Picornavirales sequence
actatatgtaagggagaaagccgtggctgattcgctagaactttgttcaataggactgttcttttacgttttgtaacgtagtggaggttaggtccgcaaatgaaagctgcctttggaaatatagtaatgtaaacctttatagaagtataaagtggaggtctttatcgaactcttgttcattctcctcccattctcacatgttagtgggaaataatttaaaatggatttttctgtttgaagtttgagaaactaataatagaagtagcaactaccaccgaggtggaaaaacgtcattgagttgtgcgaaagttgtatttcgatgatttagaggtctatcaaatgaatggcagattttgaagtttcaaattactttgtgtttggaactctgttattaacataaagcgtcgaattggagacgttaaatcgaactttttcttattatttaaaccaatcaat

SEQ ID NO: 1932 - DNA, 457 bp, unidentified
  source 1..457: mol_type = unassigned DNA; note = unclassified Partitiviridae sequence
taattatacataagttctccttgttttaaataaattatatttaaaactaaatatattagttggtgttcatgtgagactcaaagaagcattaaagaagtttgacttcgtcaaacgtcttaaaatacctgagaagctatatcctacgatagtagctaatttagctgccgtacttaagggctcagacaataagtacattacacctttgggtaaaacacacgatcctatcgaattaatcgtagcttgggatgaagtattccaagctaatgcacataaactaaacgctcctttactagacattgaagcagagcaacggcgcaagtttggacctcgttcaagggctaagccatgggttgaaagaaaaccaggtttattagcctcatttcatagtcagattgataattttacgccacctttcttcaaattcgaagatggtgaacataatttatgtcctctttct

SEQ ID NO: 1933 - DNA, 457 bp, unidentified
  source 1..457: mol_type = unassigned DNA; note = unclassified Picornavirales sequence
tccaaaacttatggtttggatttaggcaagttttacttgtgctttcttgatcttgtttttggcattactaggttaatagtgtattgatttagtttttatatttcaggtagttaggcgagatgctctactagcagtcctaccgtttacaagtatagaaatgatagttggttacttttagcttttagtacttagatggatgaaagatgtgtagcatattttagtatgatttatgatacacttaagttattgaaaagtaaatcttgggttccaccagtttctttgattaaataccatcggcaaaattcttagctcattaatctttcttcctgaagttcagttttaactgagcgtaacagagattgtatttaatgcaacattagtaagattttggcctgtatttgttagagaactacagcgaataaaattcctaagtgttttctttaatgacatcaggaag

SEQ ID NO: 1934 - DNA, 457 bp, unidentified
  source 1..457: mol_type = unassigned DNA; note = unclassified RNA viruses ShiM-2016 sequence
aaaggatggaagattgaaaaactggaactgtatttagtgaaagagaacaactgaaaaggttgcagttttaaaccaaaatgatctcagttatgagagaaattcggtattaaatctatcacccattttcctgattgaccctagttggtgtcaactgtaatttgttttgtttatttgttgttttatgtgttaatgttactaagtttttgtgaatatgatgggaaagcaaccgctctaactccaggagatgtacctgcccgagggtaagggaacctttgtaacggttttagatgttagtaagtactatagttcacgaagattgagtatactgcgctggagtggggatggcagcgcttaattaattatcttcccccggatggcagtccgttagccactatgtggtagccgatgctttggcaaggcatcgacataccctagtacgcaatgccagtatgagtgt

SEQ ID NO: 1935 - DNA, 458 bp, unidentified
  source 1..458: mol_type = unassigned DNA; note = unclassified Picobirnavirus sequence
tctttacatctatattatctttaattctttattctattccaaacaaatgttctaattcgttctctagtaaagaaatggacaagtacgtccttggagaacactaattggaacaaattacaaagaagtcttgaagcaattagtcctaggagattagtgtaggacggaaactttacttcaagcaaataacatccagaaaggagggtgatttgacacagaatcagatcaactaccaaagaacgctagaagataggcgttcacatcttgcgaacgagaaagagacgaaccgagctaacactgctcgggaaacagaagaacatcggtccaacgtagcgcgcgaatatgagaccaatcgatctaacgtcgcaagagagacagagactcatagagcaaatttggttcaagaaaatttgacgtctcgtagagaccaggaaacgcgtagatctaatctagcgcgggaa

SEQ ID NO: 1936 - DNA, 458 bp, unidentified
  source 1..458: mol_type = unassigned DNA; note = unclassified RNA viruses ShiM-2016 sequence
cttccggttgccgacgcttccctcagttataaagattatcttaacgaaaaaatttttctcgctcctcctcaacctcctataagaaatcaaacctcggtctctccggccttaagtactactactgccgttagtgtcccgactacaacacccgagatcgttactacatctcgtccgataccatctactactagaaagtcgagaccagtccctccatcttccattcctccatacatcgattgcggatgtctcgaaccacatcagtgcggtcctcctttaggcctccctcagaatgaccctcgtatgtctcgtgattaccctagggtttattcacctaactgcaattggtctgatggaaaacctcaggacacctatataagacctcctgacactcgcaatcgtcatcaaaatcaacgatcccgcaatatttaatttgaatataatttatcaattctataaaa

SEQ ID NO: 1937 - DNA, 458 bp, unidentified
  source 1..458: mol_type = unassigned DNA; note = unclassified RNA viruses ShiM-2016 sequence
gtgtcatctgcgtgggcagaagatcttgtccacccaagtgcgaccgcaaggtcgcgcctggccgatccagggagccaaagcacgaagccctcccgtgcgggcccgggggcagagaaataacatctctctgtcagccgggactcgtattcggagagcaagcgctgaacgctcccgctagcgggaacaagggacaccgaagggagacgacccccaggcacgcccttattcgcctcaagtccgcggaacatcttgcggactctcacggcgatctggcggggggcaacccggaactcgtcgcggggctggcgctcaggtcccaggagcattctgagctcccgggccatacgagtcgtcagttgctcgacacagtccactgtgccgagctcagagcctttgccctcgaaggggactttccccctcttgcaggcaacggcgctgaccgcgagcttgtgccgggt

SEQ ID NO: 1938 - DNA, 459 bp, unidentified
  source 1..459: mol_type = unassigned DNA; note = unclassified Totiviridae sequence
caaactcacaatttgggggactctgccacaccgtggatgacggcctagattgcgccgttattgacgtcgtgtatggcgttgttgtcgtcccatgcccggccggcccccccctccactcttcggtggtgtgcggtgccgcccggcgtggccggttcatccccatatacgcttcgtcaatgacgagcgccatcgtggccggctcacatcctgggcagggggtccgtcgccgctcgactcttgttgacaaagcggcaaaccgcagcgcagcggttgtgacgtcattttgcgcgcagaaccttggggtgcgcacccataggccataccatccgaacagggtggctccctggctgaaaagtggttctttggtacacggagtagggagggctacggcctccgttgatcccgtgtgtcaacgaattatctgctcgcaatcttcaccttgtttaccccccccaagcc

SEQ ID NO: 1939 - DNA, 460 bp, Chinturpovirus 1
  source 1..460: mol_type = genomic DNA
gtggaaaccccgcggatatctctgaggcggcagcctgtgtacaggtactgccgacccttctatagcgactccaaactcgacccgcccctagcctgacaacgtcaggaaggcaagccttgaaaagcctccgtaaccgtccaacggaggtggtcgtgctttgcagcgctcgttcttagtcagcgacccaaactcagttgaccatcgtttcagactcgagagggcgtgccctcatctgactcgacttctgagatctagctgacggtctgtgaccttcatcaacggaccattattttctacttagttgctcaccaggctaaacgcgagtgttctcgcgcactaagtatacttaaaatcctatttgctctgacgttatagagcttaggttcagtgttttatacactgatctccatcaatctccacgacatctcagtgttgtctcctgtgatcctaactactggta

SEQ ID NO: 1940 - DNA, 461 bp, unidentified
  source 1..461: mol_type = unassigned DNA; note = unclassified Marburgvirus sequence
aatgatgctcaaataaaacagaagtccatctgtataaggagtatggcttaaatgggtatttgtcagattcttaagagattagtttgtattgatttaaataatgctttaaccttacattgctgctttaaatggttgattaagctgattagcttgtaatatataatctcttctgggccatcagatctgtaatgggtttactagattatatacaagacacagtaatattttataaacaattcttgctcagttttgctttgatttaataacatacatcattgtgcctttcattgctaggtcaacccaactgataatgatattccttctgaaatagtaagaaaaactaatgaagaacattaattactgggtaaaagtgattaagttctttaaatttgatcaaagtaatattttgtcagtgaatatattctcatatcacttgattaaaaacaggaaattatcctaac

SEQ ID NO: 1941 - DNA, 461 bp, unidentified
  source 1..461: mol_type = unassigned DNA; note = unclassified Dicistroviridae sequence
gcaaggtttatctcttcggagtttttacttgtatcggagacagttctggaccattcctgcggaattcgctaatgatcgtgaataacaccaacggaaaagtttgtatctctactgtagaaatctccaaccccaaaccccaacccccaattttaaactcatggacgaaggagtataactttcccaaactcatagtattgagtataactatactagtcagtaaaagactttaatccgacacacgtagtgtcgttaaatgaattctatttgtatcaaatagtcttatctccccgtaaccaacacgaaaatattgaacgtttcgtactaagttacatggatgtgatcttgctagattatactgacgacaaattctagtaatgctatccaactacaagagccctatttagggatggcctcttcgcagcagccctgcaaactgccactcgtcaacctgcttcgactct

SEQ ID NO: 1942 - DNA, 461 bp, unidentified
  source 1..461: mol_type = unassigned DNA; note = unclassified Picornavirales sequence
catcatggaattttggagctatcaccgataggcttaaaaattgggtgaaaagtatgagtaaagactgcattcagttttttattgattctccattcgtggctggactcctttctattattgctggaattgctcaattccttggattgtatatggttatgcctactacaagaactggaattgctgcccttgttgataagtttcagaactcaacaagaaccatgcattatgcgaggaatgggttcaaaggagtaatggattcggtaaaggactgttttgcatgttgtaaggacatgttgggcatttcaaataatgcggaacttgaaaagtttaaagaacaggtcacccaatcattggagctttgtcgtgatatgttaataacagcacagtcaaaaccaggaacatttgtaaatgattcacagagatatgtcggatgcagaaaaagagtataggagacgtcatct

SEQ ID NO: 1943 - DNA, 461 bp, unidentified
  source 1..461: mol_type = unassigned DNA; note = unclassified RNA viruses ShiM-2016 sequence
cgtgtatattgtatagtatatgcgtaaaatttatttgcccgacttacgacggatttcgtttgacgagcaggagcgttgacttctgcacaaagtatgatacaaaagttagagtattcacgccttactattatagtgacgcttcatttatttttattttcatattatttcgttaaactttttcgttaaaagttaatttatatagtatagagagctggacttacattgtcttcgcttttatgcgtgcttagttagagctggattgctcacgacgtatgtgtttaagttgagattgtgtgtgaaattttcagtagctttatatagggggatatcaaacctccaacccaattagaatttgcgcttttaattggcacttgaaagtagtgatgtaagcaaataaccttgtgtgggatggctcccacacattgtatggcccgtcggcattgccgtcaatcgtaacacct

SEQ ID NO: 1944 - DNA, 461 bp, unidentified
  source 1..461: mol_type = unassigned DNA; note = unclassified RNA viruses ShiM-2016 sequence
aatccttgcggctacaagccgcgagatggctggaccgcgcccagcatgctaaaatcccctcgactgaggagcgggagcgcgtgattgctaagaccgtgagggcgttctcaaacgcacaaacaaatggccccacggcaaccagagatggacggctgacctggagaaactttctccaggatttcaaaagtgcagtgttctccctggagtttgacgccggcatcggcgtcccgtacatcgcgtacggtaagcctacccacagggggtggattgaagatccacgacttctcccagtgttagctcgcctggttttcgaccgattacagaagttgtcggaaattaggtttgaagatctttccgctgaggagctagtccaggctggactctgtgatcccattcgactatttgtcaagggggaaccacacaaacaagccaaactcgatgaggggcgctaccgcctcatc

SEQ ID NO: 1945 - DNA, 462 bp, unidentified
  source 1..462: mol_type = unassigned DNA; note = unclassified RNA viruses ShiM-2016 sequence
ggtgaatccccccctcttcctctaacgtctattagcaggtagatgtgtcttctcttattttgaagatgaacatactgtggattctcgagtgtattgtggctacacaatatagctcaaagagctttttagcgagtgtgtattcgctagattgcacactcaaactattaagttctggatttggtgactatttcagaacatttctttgttcgtatgtattatatgtaatatattctgaatttaaggttgcactttggtggttcgtcctacgcaggaatcaccatgcaaattcaaaagttttgtcattccctatacttcgggcaaaacttcaacaatattttattgttaattatagggcggtctagtatcaatcgttatatgacctaaatatgtagtatgcacgccactacgtatttagtattttaagtgcagcacctagctcaaggttatgagcccttatataaa

SEQ ID NO: 1946 - DNA, 462 bp, unidentified
  source 1..462: mol_type = unassigned DNA; note = unclassified RNA viruses ShiM-2016 sequence
tgggaaatgaagatggtgtgtatttatttatttatttattaagttaatgtttaatattccaagttctatatttgtttaactgtgtgcgtttccttagatattgatctactctcttttaactttatctcagttgttcttgacaacttcattaagttgatccgagtcctgtcatatagtcaatcgtatgggaagtaccaatacccttcttaatcccaacgagtgagatgacaataacagcatttggcgttccatgctgttttagcaggaatgtcttattgactcgggaatatttacttggtaattgatgtgataaactggtcaagtgcctgcgataatgacacacgtatacaatcaaaatgaggcctaaatacggcttttaattggtgctatgcttcgaagcaatgatacaatgatataacattacatcaaattagatcctgaaaaaaactaacagacctaaag

SEQ ID NO: 1947 - DNA, 463 bp, unidentified
  source 1..463: mol_type = unassigned DNA; note = unclassified RNA viruses ShiM-2016 sequence
ttcatattgcataccgaccgtcatgtctttaaactgtccggaggcgctgcggtagtgtcgtcgttactagaatgaaaccaaagccgaactcaacattgattacagatgttatgtatggtctagcacataccatgcaagcagactgctttgttgagacaagaatgacgcgaacatgcgagtaggtatttacttacagtggtttatagccccacaaacaaaggtgtgaataggcagacacaatgatgcatgtgtctgacccgtatcaacaaatcgcattagtaattttacaaattttattacagagccaacgatctctataaaccgtacactatacaaaccccagtccggtgcactgggtactattcaagaagaaggtgttgcaaatcttacggcacaaatcactaactttgaggagcaagatgctggttggaccacatctattggcgcaggttgggattctacg

SEQ ID NO: 1948 - DNA, 464 bp, unidentified
  source 1..464: mol_type = unassigned DNA; note = unclassified Higrevirus sequence
cataaaattcaaacaattctactgaggtgatcccttggtagtcttattttgtccggcgacgaggggtttggccgttatcaccctagacgctgtagtcatcaggtactggcacctgtactggagaggggctgcacgttgccatgctcggtgtggacgcgagatagtgctatcgcatccgagagctggtgtcctggggactgcctggggcgtagctacactattatatatatatgttggatcgatctgaggcaaaagtccactgcttttcattatatacgtttggactaccggttagcgggtggtacgattagggacgcctgataacctttcgtatctgtcagtgtgataatagtgctttagggtaagtggtgccgacttgtcggttttggtcgtggtcatttggcctggatgtgtttaggtaaggttgtgtattggttgttgcatcttgtctttgggacctcgaa

SEQ ID NO: 1949 - DNA, 464 bp, unidentified
  source 1..464: mol_type = unassigned DNA; note = unclassified Picornavirales sequence
gggggaccatcgacttatactcgatgctttccccctctccttttcaacgtcctgggcacgatacgcccaaccctactaatcaagcttgctagatttgctggtaagacccgtttggtaacgtaattacccgtaacgaatctaagaggtttggctggacttagtacctattaagatatgccttccggttatgtctcgagctctgctgtggaacaacacttggtaacaagtgccccagcagttagtgatctatccggttgaaacagtcttattgtgggaacagtttaagtattccgattacattcggcgtgaccttacgcagtgcacggacggatagtaccctcctttaggatcgaatccgttctttaggcccctcttggcatcctagcgagtcacctctccgtgacaagatagtgctgtattggcaaatattttcactttttaccaaaaactttcatgatgacaaa

SEQ ID NO: 1950 - DNA, 464 bp, unidentified
  source 1..464: mol_type = unassigned DNA; note = unclassified RNA viruses ShiM-2016 sequence
gtgccttaaacctattcacccagttttgagtctgggctctacggaaaagcaaaacttcatgtgtatatatggataccaattctcgcacaaattttgtgtacttttatgtgttagaattaggctttgtacataaagacaatctgcctgcggattacccctatttaggggagagtttcgtctactcaatgtaaactacaccactcctagcactaagcaatgcctggagattgtaaataccgcttactaataatgtaaataataataataataatatatatacatcgggtattacgtacccaacaatttttgaaattttgtcagacctcaggaaatacaaaattaatccaaaccgttttgataaactatggcataaacatagatgggaattagggaaaactgtttcatcatttgatggagtggagattcctcctaaaagagtgaaccaacgcctagttaaccaggtt

SEQ ID NO: 1951 - DNA, 465 bp, unidentified
  source 1..465: mol_type = unassigned DNA; note = unclassified RNA viruses ShiM-2016 sequence
gtgttagttcactagggttttatattaccgtagtccatgccgcgttagtgctgggcgttttgtgccatgaaacggtacttagtttgcgtttgttttgagagtgtgagctgagtgaaaatatttattctttgatgatatatacgtacgaagtactatttaagtatgtgtatagcttcgggttggcaatatacccgttacttattgattggccgatatttttaagcggttggagtaaattgcatcgcatcatgtaaacaagaaaatgttcctgtttttgtggtatttcaccgtaagactcagtgttgagcagggtcatatcatatttacagtgtttgaattattgtagatggtggcatgcatttgtagccaattgtcggttcgttattgaacccccaagcttgcgatggtagtagcaagttgagccgggataggccggtggttacactatcaaacaactcagcagtg

SEQ ID NO: 1952 - DNA, 466 bp, unidentified
  source 1..466: mol_type = unassigned DNA; note = unclassified Gammaflexiviridae sequence
cccccccttcgtaaaaatttgcggcaattacctccaagctcgaccacacgaacgagctttcacgttcgtgacttatactgattccctccgaggtcacatcaaatctcaacttaaaactttcggtgacgtggagggacatcacatcaagacgtgggaactggctctgctccaaccatgcaacccaatcgtcatctttgacgacgttggtctagctcctcctttgttggacttattccttatcacccaccccaacgttaaacactttttctttaccggagaccccgcccaaccccaatacaacgcctacaagcgcttccctaatgccccctttgtacccgataaccttaccattctcgctcaatcagcttgtcgttacttccgagaaactcgccgggtcccaatcgctactgcttccgctcttgggctaaacacctcatccaccgctgagggtggccttggactctcc

SEQ ID NO: 1953 - DNA, 466 bp, unidentified
  source 1..466: mol_type = unassigned DNA; note = Hainan oriental leaf-toed gecko picornavirus strain LPXYC2131221 sequence
gccacacgggggtttaattactcccgtgtggttcgctttggacagggtttttgctatgccctggggaatttcttcccgaaatagccttctgcagttcagagtagtagctggactgtgggagttcttttctttctttttcttactttatgtttgtttgtttaaggtttgatataatggttttatgtaatgtagtagccagtacgctggtgagcctacgtcaagattttattagagggccgtcctgtcctcgaatgttattgatgggtatgtcaggtgggttaaaccatttggcgggcagtcactggctaaagggcgtactagtgattctacttgtgcatgacatgatggttctgtaagtcgcagagtggagtacggacctggatgatgctgctgaccagtggggccttatcccctgccgtttttacgcaattggcggtatgggtggtagttgcagtagctcagtatt

SEQ ID NO: 1954 - DNA, 466 bp, unidentified
  source 1..466: mol_type = unassigned DNA; note = unclassified Picornavirales sequence
ggggtgtcgctgtgtgacaaaacaaccacttttttctgacttaaagctacgaaagcagcatcgaacaaagtcttagacaaagtgccaagtgctccatgtagctttaagtcagaaaaaagtggttgttttgtcacacagcgacaccccgcatgataccagtcagttcggaattcaattcttccaggatagtgtgcaggtgcatccaaaaagcgccgtgcgccatttaccagcggaaatttcacctgtgtgcaaagtttatggagtagtgggtaatcaatccacggcctattctacagtggtgacgtcacccatttctgatgcggtcgagagacactgtggtattgaacagcgttggggtcctccgaaatttcgcagtaattacccatggcaagcgagtttacagttttcatcccaacctactttaggcttacctgccgaagatttaatttatgcggtagattcctac

SEQ ID NO: 1955 - DNA, 467 bp, unidentified
  source 1..467: mol_type = unassigned DNA; note = unclassified Picornavirales sequence
cgcggttaaacccgcgcaaccttctttcagccgcgtctgagtagcgcggttagtcctgatacacagtttcctgttgggtactgtgtcttcgggtgaatgctcttgtgtgaatgttttaggctgtttaagggaagcgtttccccgtgcgctgtgagggtttctcacgctctttcggggtgcagtctcttctgttgttcattaagatgtatggatgcactgttgtgaaggatttgtgaactggggatcgacaccccgtgaggggtgccccagtgtccataggagtttgctggagaggtgtgttgctgtagtgactatccgtgacctggcattctaaggtgttgaccccaacctgtgagggtctggatcgcagtgttgaagtgctttggagggttcaatggggtttctgtagtggatattatgtgcttgacgactactggtacgagtgtattgggggtctacatgtgtga

SEQ ID NO: 1956 - DNA, 467 bp, unidentified
  source 1..467: mol_type = unassigned DNA; note = unclassified Picornavirales sequence
gatgagccaaattacattacgttgtgttgctgttacggctaatggcgcaaaattcgcaaacctcgctaatccagcggagtctgttacttttaaaaccactaaccaacagcgttcacgcaatggtgtacaagccgttgtcggtcgctcttcaatcgtttggattgcaccgcacgtcgtaaaacaatgcgatgatgcttgcgctccgtcgggtgatttcaccgacttgctacgtctcgaattttctaatgcgaattcaggggaacagttgattacccgccttaatgatttggcggactggttaactgcacacccggaattccttcgaggctttggtccacagcaatcttctgacgttgttcttggaacagtatgaatattcaggtaatgttattaggtagccttgcgattatcgcaactaccatcataacggtaacaggaatcgtttcttactacatccactaacttgc

SEQ ID NO: 1957 - DNA, 467 bp, unidentified
  source 1..467: mol_type = unassigned DNA; note = unclassified RNA viruses ShiM-2016 sequence
gttttgccagaatgccaactgatcggaagagaaaatggcaaagtacccctttgggtggcacctcaggtgcaatggctggtcaccggcctttgtgcatacgtgccaacagggttgtgggggcggatgcgggttgtctctggcctgtcatcactgatcccactccaaccgatgggtccaattcttttgggcactactccttcctctggctttgtctggccgcgcccttctgggtgcaaacggagtttggtttgaatcgggttcctgtgtgtcgtacacacccactgagtcagacggcaccgcgccgtactgatatatcttgagggccgataggggttggcctgtcctccaggatggcttcctctgagtcattattggtgaggcaagtagtttctgctgtgcgtgcttcagtgctgcctgcatatacccatctcattcaattctgatgttgaggataatgcctaatctgg

SEQ ID NO: 1958 - DNA, 468 bp, unidentified
  source 1..468: mol_type = unassigned DNA; note = unclassified Narnavirus sequence
gatgtcttgtatcaccggacggtagaactaccttccagtgcttgtggtgctagcgtgactgaaatcacggtcaccaagtatctcgagcgcaagtcgattgggaacgaacctcccctctctgtcaagcttctccgcccaccacgtctccaccgaagtgagaggcgtgtgtttggaaaactggcggacagaaggaggggggagtttcaacttcccaggtttcatggtctttggtttgcacggacgatattttcctcccgttgcccagtagcctttgtgcgctcctgtggagacgtacttgcctactgcgcgattggagacaaacgtaagtccaggtggtggagcttcactaacgagggcaggacccccgatgcgaagtcgcacctccacctccttacgcatgccttcgaaccgccgcgggtcggcgggcgcgaagaaaatatcgatacgtgcacagtactttgttgggtc

SEQ ID NO: 1959 - DNA, 469 bp, unidentified
  source 1..469: mol_type = unassigned DNA; note = unclassified Hypovirus sequence
ttttggggatggtgctcttaggtttgatctttgtagatcctaactaggaggaaacattgccctgtttcgtgatgatttctatgttcaatcactgaagcttctcttcaccaaaaaggagagagcttcgagagcttagctgtttcagctatttgaaccccgaaggattcatgtctaagacatttggtttctattcagaaactattcattctttcatccgaagatgtaaaactacttcgtagtaacgagacggtcctgaaccctgacatgtggaacggcgacgacaggcattctgtggagtagtgtcctagaagaatgatcccctgttgttacctgtcagactggccccggcacaccgtgatgcccggtgaactggtccgtgagacccagatcggaatactccaggctcttttgcacgatatgcttgtcatttttcgtggattaccctggtgctcgttcccaatccgaaagt

SEQ ID NO: 1960 - DNA, 469 bp, unidentified
  source 1..469: mol_type = unassigned DNA; note = unclassified vectors sequence
cggacacacaaaaagaaagaagaatttttaggatcttttgtgtgcgaataactatgaggaagattaataattttcctctcattgaaatttatatcggaatttaaattgaaattgttactgtaatcacacctggtttgtttcagagccacatcacaaagatagagaacaacctaggtctccgaagggagcaagggcatcagtgtgctcagttgaaaatcccttgtcaacacctaggtcttatcacatcacaagttccacctcagactctgcagggtgatccaacaaccttaatagaaacattattgttaaaggacagcattagttcacagtcaaacaagcaagattgagaattaaccttggttttgaacttgaacacttaggggattgaagattcaacaaccctaaagcttggggtaaaacattggaaatagttaaaagacaaattgctcggaatcacaaaattccgagt

SEQ ID NO: 1961 - DNA, 469 bp, unidentified
  source 1..469: mol_type = unassigned DNA; note = unclassified Picornavirales sequence
gttttattcttctgtgttgtgagacgtgaatacgagcaacgggtgctatgtaggagtacatagcataccaccgtaagtagatagcgaaatgacaatttcttataacatagtgacaatttgatgtatcacacagtatttagaacacactaatattgtggtttactgttctctcagtagtccgtgtatgtgttaagtataaggtggagataagaaacaatagcattccgttgaatgacaaaggcatgtggccactattgtgttcttacttatatatgatttaatggattaatggataacttgagtgttgtactttggtattacgctcaattggtctcggaagactcgtttttgagctccacgtgagaacgtgactggtcagccgccagcacgatatcgccattaaaaatggtagagagctctattggttacagacaaaatttctgaggtttctgctccgttgatagcagat

SEQ ID NO: 1962 - DNA, 469 bp, unidentified
  source 1..469: mol_type = unassigned DNA; note = unclassified RNA viruses ShiM-2016 sequence
gttcctctcctctctacctgacccggaccacgaggcggctaagctgttgttgggccgaggagtaaagagcttggacgtgaaggatcaaagtattgatctttcatgtctaaacgtgtataaagagtcatgcccaatcagtactctacaatacgaaaaggctcaaatacatccagaggccacgaaccaaaaagacggaaaagtaaccgtacgacgtaactttggtagagtaggcgcacaggacgctttgttgtcctctgcagcgctagtaaaatacccattagaaacgttggaagaactgcgcgacgcaaccgtatatacgtcaggaactccctctggtttttcaaatcgaatcaaggagcttacaacacggacgtgcaagtcggaaggaaaacccgcctggatagccaaaaacttatctaagttgctaccaacaacagaacttcctgattggcatgatgttgaggggttg

SEQ ID NO: 1963 - DNA, 470 bp, unidentified
  source 1..470: mol_type = unassigned DNA; note = unclassified RNA viruses ShiM-2016 sequence
atacttttagacgttatctaattattctgacatttcaggatagcttacgtacagaacaattagataacgtctaaaagtattggctattaacgccctattatatacacaaatttaataacggaactgaaattgaaacaacccgtatagcaagagagatttttaaaaatttagatttcaagcacttaggtgcattctttttgctatatagaccataccgataaaacacacccaaccccggggatttccccttttttgcaaagtatttatagctaaactaaagcagaggttcagatatctacttgaatctttgtagcagtggttatatttgcttattttttgccttcgggccattctaaactaagttttatcgaagttcctaacttggaggtgtcacttaggaagaatcaacaactaaaaaaggtcacatacacacattggaagattcaaagcttaatatctacttagccaag

SEQ ID NO: 1964 - DNA, 471 bp, unidentified
  source 1..471: mol_type = unassigned DNA; note = unclassified RNA viruses ShiM-2016 sequence
gtggggagctaccactccccaccgcttgtttacctgctagtacattttatgacggtctaaccgccattctttgtatccctcttactgatcatttgagggctctattgtacccaacagacaagaccgagtagcaagattaaacttttatttctataactatatttcccattacttagtattaaggatttttgggtatttatgtagaaatgcctagtcacgacatgacttaaaataaatagttaggactcgacatcctatactatgtcaccccttttcggtcccgccgtaagaggcttaggcccctgatggggattctgtgtaattgcgaattacagatgggtttaaaacgtagattggagaacactctccatgtagacggccccattagtttttcgtgcctgaatgtgagtcggcgccaccacagacccctgatactgccgtgacaagccctgcagggattcctcatataac

SEQ ID NO: 1965 - DNA, 471 bp, unidentified
  source 1..471: mol_type = unassigned DNA; note = unclassified RNA viruses ShiM-2016 sequence
cttatggcatcgtgctgaaatcacggtaaacttactccgttttgggaagaacgttaagctttttgatcttggaccgatgttaaaggtatcccgtcccggaaagacgttaaacttgctaagtcagttgtcctctgattagtgcccacgggcaataggacttgtatataaaagtgattatagcacagagttgattatttttcgttttgttccactctgtagtaccctatgtatataaataataaaacctacgtgtagtataccgtatgacttgaaagtatttgcacgttaaacgtagtataagtcaagaaatgtatatataatgatactgatgatggacagttaaaaccatcacttttacatattttcttttccgattcggctgaaactggtgaccaacctgttactgccaacgcggaaacagaacaagttttaacccagattggaggagatgccccacaagaaaatgagggc

SEQ ID NO: 1966 - DNA, 471 bp, unidentified
  source 1..471: mol_type = unassigned DNA; note = unclassified RNA viruses ShiM-2016 sequence
gactggacttgctggggaaatacctagtgcaacccagcattttaccatcgctagccactactcaggactatccagagaggcactagacgcgtggttgttgagtttgacccacgcagtaatttaagactcgctaaaattttagaatccatagtagaagagaaagtttgtgcagagattgaaggtctttccgtgaatgcacccgatgaaacaacgggtgttactagttttgcttcggaagccggggtgtgtgccgatatccctatagaccctgttgtctcattcgccaaaggcgatgagtcttaccaggatctaaaggaatattttaggcgcccccggcttattttcaccggcacttgtgctaacactgtttccgttttggtaaactccaacgttagtcagatttcactttttcaggattggtttccgaatggtatagaacgactatcaggagttcaaggggttcgcttcgat

SEQ ID NO: 1967 - DNA, 472 bp, unidentified
  source 1..472: mol_type = unassigned DNA; note = unclassified viruses sequence
tcatgaactcattaattcacttaatcacaaaacttgttgaacaattagaacttcgtggttgggtttgaggtgtttaaacatggatcatgtagtaccttatctacaaatcccagttgttggtctaatccttttaaagtaatggcccggaaacaatgtagggagtagtgaggatctgtgagtaagacgtgctctggcaagccgcgggtctccaattctggactttcggaccccagaaaaggaagtcgatggcccccatcacagtgagcagtaatacatgtgaagtggacaagttccattgaaaatcattcactcattggtttgtggcaagttgtgtggcaacgaggatcaagttgtttggcaacggcaagctgtgcggcagcgtggggaatggcaagctgtgtggcagcgtggggtaaggcaagctatgcggtagcgtgcaagggcgcgaaagctctgaggagcgattctgaac

SEQ ID NO: 1968 - DNA, 472 bp, unidentified
  source 1..472: mol_type = unassigned DNA; note = Hepacivirus C strain SL7 polyprotein (POLY) gene, complete cds.1 sequence
gctagtgatctcgcgggggcacgcccaaatttctgggtattgagcgggttgttccaagaaaggacccggtcaccccagcgattccggtgtactcaccggttccgcagaccactatggctctcccgggaggggggggtcctggaggctgcacgacactccaccatgaatcactcccctgtgaggaacttctgtcttcacgcggaaagcgtctagccatggcgttagtacgagtgtcgtgcagcctccaggaccccccctcccgggagagccatagtggtctgcggaaccggtgagtacaccggaatcgctggggtgaccgggtcctttcttggaacaacccgctcaatacccagaaatttgggcgtgcccccgcgagatcactagccgagtagtgttgggtcgcgaaaggccttgtggtactgcctgatagggtgcttgcgagtgccccgggaggtctcgtagaccgtgcatc

SEQ ID NO: 1969 - DNA, 473 bp, unidentified
  source 1..473: mol_type = unassigned DNA; note = unclassified Picobirnavirus sequence
atcaattaattctttaatttcattcaatttccaaactaaagttctgatctagttctcaaagtaaagaaatggacaagtacgtccttggagaacatcgattggaacaaattacaaacaagtctcaatatgcacgtctgaggagatcgatgtaggacggaaaagcatagtttgagcaaataacatccagaaaggaggtagatttgacacagaatcaaatcaactaccaaagaacgctggaagataggcgttcacatcttgcatccgagaaagaaactaatcgtgcaaatctagcgcgcgaaagagaggaaaaccgctctaatctggctcgggaatatgagactaacaggtctaatgttgcaagagaagttgaggcacaccgctctaacgtatcacaagagcatcttattgcagctagagatcaagagacgcgaaggtcgaatttagctagagagattgaaaccaatcgctcaaac

SEQ ID NO: 1970 - DNA, 473 bp, unidentified
  source 1..473: mol_type = unassigned DNA; note = unclassified Iflavirus sequence
ttttaaatatcgggtacagggttttaaccctgtacccggtattcagaccttagcttttgagctattgtaagaaggtagcctagcttttaagcaatggcggtattagatcttgcttttgagctctatctagtacgtgtttacaattaattcgattagttaagattttaattagttttagtaaccagtgcttcaatcttctattgtggcactggcttggatctcccttacacatgtgattacatgatagacttattagtagtagatacatctaaattctacaacgacctagtaagtattagttatgtgaaatagaatgtggaggattttaaattgtgaataggcctttatattcggagtaggtagtattgcgtatactattaatcccacaatacgtggtctccgtcttagtatttttaatttgcgccccaatggaaatggctcttcggacttgagtacagaggggcaacccataa

SEQ ID NO: 1971 - DNA, 473 bp, unidentified
  source 1..473: mol_type = unassigned DNA; note = unclassified Picornavirales sequence
ggggacagttaacatagctaatgctagttgacatgtccctaaacccttttcaacgtctgacccacgatacgggtcacctctttatgtttgttttgttttacgtttgtttgtttgtttggtggaacgtaaccacccgtaactataactagaatgtaggctacttaaattaggtttgttttacggatagttctcgtagacctcgagctacgtctcgtgcataaacatgggtaaccatggcacttggcggttagtggtttttacttggctttcacgaactcaaattgaaataagtcagtgacatttgaccttgtaggcgtgaggcgatgtgcaccgcgatatcaggtaaccttctttaggtctgagatgttgtcccagccacaatctttgcgagctggtcgagggctttcccgaggtactgcacttaacccaaaactttctaaatcaaactcaaactattgcagacaaaattaata

SEQ ID NO: 1972 - DNA, 474 bp, unidentified
  source 1..474: mol_type = unassigned DNA; note = unclassified viruses sequence
gaatttcattttataggaacattttcacctcatagcaacactcccattgttatgttgtacccctcccctttcataattgccttcctagtttatcttgtgcagtttttatcccagaagattgcattgacctgctgtgtaacaggtgttgcatggtaatgactactaggtgtccatattcacggctcgagggccacagggtgaaaatccctacattctagtgtgaagcgaaagataagctggaaattgagagaaagctattcaaggatagtgtcgtgcagctcttaggagtaaaggtgagtaacgtaatatgccttatgagctctcgacttctcaacacatttctttgcccaggtagtggatcacaacgtgaatggtcccataattaggggtattgtaggtaaaggtgcttcgacatatgtataaatgatcgaatagcgataaccggccgtgactacagggaccccctttacaaaa

SEQ ID NO: 1973 - DNA, 474 bp, Bavaria virus
  source 1..474: mol_type = genomic DNA
gtgggaaccctttcctcaaactccggacacggactactctccgtgtttccctcatcaaagagggcctcagctggcgcaagtcggctggggccccaagaatcacctgggtggatctctatggcgactggggtcgctttgactgtgatcccaccccactctttgctcgtgaagggtgcatcctcactgaacaccctcgggcagagatgcaagggtggaagtcgctcctgccccctggcaacatgcaggtgcccgatcccaagctcagctctgacttcctctcctgggtggtgcaacactccaaggttgatgaacaaacctggagggacctcaaggcaacctggtctctcgaggatctccggcgcatctccacagactacctcatgctcccggaacctgagaagaacactgatgcctatgatggctggctaatggtcggcgagatgttgaccttagccggtctcattggctgggagg

SEQ ID NO: 1974 - DNA, 474 bp, unidentified
  source 1..474: mol_type = unassigned DNA; note = unclassified Riboviria sequence
tcttgctcgatgtatacaaaattatgatgtaaataaaacgttgagtattgctattgtagaaagccgtgtagatttttatctttatatcctaggaccacggaaagcagccctttattgtccaaggaaacatcattgctgtacattggttaagtagccgtgtgcttaagaaacttacttactgaacaaaattttaatgctaatcctgatgttttatccgttacgacccctgattcaaatgatactataacccttcgcgatgatggcacaagagtttccgaacgctttaccgcttgtgaaggggatttgccttcttccctgtacgattgtatcggtgaaaagagtgaccactctatctccgatttcttgagcagatatgtgattatacaacaagggacgtggtccagcacgtcggtgcgcggagacgttttgtctaatcttgttttccccaagaatttgtttaatactggccaatat

SEQ ID NO: 1975 - DNA, 474 bp, unidentified
  source 1..474: mol_type = unassigned DNA; note = unclassified Fusariviridae sequence
agagcagccgtttggctgcctggtaccacatcataggggatcgccctagtggtgccccagttttctcccttagaccagcctatcttacggctggttgtccttattaaggatgggtttggttttcttccaaatttatagtcgcctggtgcgacttcatcttttgccccctgggccagctgatgagctggggccgaaactgctggcagtcctggcgttggaatttgtattccgactcccccctgtattgagaacacaggtggtaaattgaatctcacggtgccattgagttggtaaccagaaagcttccgtatctcgtctgagaggaaacaccggttgaaacagcttcggcgcgtttgcttgtgcgtacaacttggagggttagttgcgtttttggtgctcagtcccgtcaaatcttattcctttaaactgtttgaacgtagcaaagaccttgcagtcagtagtaacgacactgac

SEQ ID NO: 1976 - DNA, 475 bp, unidentified
  source 1..475: mol_type = unassigned DNA; note = unclassified Endornaviridae sequence
gtcgtcaacaccaacacctaccaactcacaccaaccaaccaaactacataccaccattgattacaaatctttgtccgagaacagcccctcggacaaagattaccaaaacaacccccataaattgggggccaagggctgcgactcgctagaagtcgtaaattcatctagcacaataactgaatggattcattccaagcggaacgacaaatccattcaaagatacaaatcacgcggatttacgacatgggatgctgttcacagtacgccgttcggaatatccgttgagaaagaaactgagttagctgagaaatttctcaatgaattagcaacacgcagctcagaattgaaacaatgttacaacgaacaagtggtgtgggaagaagatgaaaaacctgaaccagaaggtccggaatttgaagacctgcagccgctgaccgttggagccgccacacactgctggttgaacataccattc

SEQ ID NO: 1977 - DNA, 475 bp, unidentified
  source 1..475: mol_type = unassigned DNA; note = unclassified Riboviria sequence
aagataataaacgattaattataaataatagtacgaataaacgtaaaatgagtcatttaatatatagcgatttcattaaactaagagatgaacttcaacaatacttcacggaggcaatttcgttaccggccattcattacttcaaaccaaatcaaccagtcaccttatcagttaacatcataccatctggggaagttaatgacgaccttattagcgaactcagggccaagattcaacaacgtatcgccaagaaatccggtattaaaccgacgcttggggagacgtacccgttatatttatccatcaacagggagacgattttaaaaattcaagtgcatatgaaatatgcttataaggattttgaagcgattattgacgagatagattttgaactagtagaggcaattaaaacattgaaagacaccaaaattgatactttaactaagaaaagcgttatcgataaacttttaagaaa

SEQ ID NO: 1978 - DNA, 476 bp, unidentified
  source 1..476: mol_type = unassigned DNA; note = unclassified Dicistroviridae sequence
acatcgtgtaataaggcactagatgccccaaagcacaaaattgggtaacccgaactgaagcttgtctcaacaccaatcaatcgcagaaattggcagtggacggcccatggcgcccgaggttggactcttattgttccggctatgttataacctctgttcgcaagttatagcgtagtgctatccttggagaaatcctaaccagtgcctttggaaagcacaccaaaacaaaccttgacctggacatgtcattaaactgtccaaaacccaaagtcccttcaggacaacaatccatcgccagaatgacgaaaactcacggtcgagttcgaaccacgagtcgagtactcaaacttagatggatttctttgcgtaacgagcttcgaaactcgcgtgtaaagttgctacgatagtgcgaccctcttaggagaaggcagagcttaaccctaagttgtatcttgctcgcgttacgacaccaatct

SEQ ID NO: 1979 - DNA, 477 bp, unidentified
  source 1..477: mol_type = unassigned DNA; note = unclassified Tombusviridae sequence
attttccctaccaggacataggaaggtgttactgagtcctggccggcctgtgatggccaacggctgaaaggccgtgcctgtagtcgagtagggaggtttgcggtagcagcatcctggacaaagttaggtgtacacccaccttgccaatggatgtcaggacaacgcattgctccccccggcccgtctgcgcagaaccatggtcaatggcgcttatggcctgcaatggtaaccaggttgaattccctggctgtgcttaggagtgtgacgggtgtccgcgtcgtgatttatagggcgggcttaattgggataccgagggtaggcgccatagtctgggtaaccaggctcggttctgctaacggctgcaggtgtgcgcggcgagccaggggacactcctaggccccctcgccagctctgcccgagcttaagggcattataccttgtctggggtttaacagggggtggtggccttcaccattc

SEQ ID NO: 1980 - DNA, 477 bp, unidentified
  source 1..477: mol_type = unassigned DNA; note = unclassified RNA viruses ShiM-2016 sequence
atttcacccaggattcgcacatcctaaccatactcgtcgcattgttcgcgcacaacacctagggggaggtttagaccccacgcactcactctgttggagagtataatccagcaccacacactacatgtgccatataggaagacgtttgcgctgtacgcagtgttgcgcaactgagctagtgctcccacctccatgattacgggcgattgattgaatgcgcccttacaattagttagaacgcttggaggtgagagtgggaggggtatttaccccagggagcagagccgagtgcccgcttaagacggtgagagccgttcagaaagtttggctctgtgggcgatcgcgtatgcaggattaaggtatccgcatatgttaaactagcacctttcaaataataataataataaacaaaacaaaaatagagcaccattcacaaacaacaaacgcaatgtgcggcgccaacgggcgcccgttgcg

SEQ ID NO: 1981 - DNA, 478 bp, unidentified
  source 1..478: mol_type = unassigned DNA; note = unclassified ssRNA positive-strand viruses sequence
gcaaaaaggcccctgggggggggttaatgagtactggaaaaagaagcgcgagataccacttcgctgattatgctgattctggtattaaggattagtagagtatcggaagtgccgaagggaataatgctggtccgttgtaaacaggatacttatgaaacctcttaacagaaactttgagcaaacaacaaataaacgaacaaaaagagttatatattgaacttgaaaaatcaatatcttttatttagattgatttatattagtctttataatcgtagggaataattctcatctaatgatatcgatgtaaaatgtatcattctagctattcaattatattaattgagcttagcatctgattaaattactattgtaaaataatatttaatccccatctttgcaagatggaaactcttaataagtcaggagtataatggatttaaaccctcacaccgaatcatgagtataaacagattcaaat

SEQ ID NO: 1982 - DNA, 478 bp, unidentified
  source 1..478: mol_type = unassigned DNA; note = unclassified Riboviria sequence
ggggttaagaccccagcatattttcaccccacagcccttggggttagcctacaccttcatcaagatgatggtttaggtttgggcatggaatttgacttcgaccttgcatgtctgaccacgaatgtcatttcttcgttctggctgtagacgagactcggtattttgtattaaggactggcagggcccaagtattggcctaggagctctacatggctaccaggatattcaggccgataggatgtcccagcatctgtgtaggactgtttattacgccaatgtacctctgactctaagcactagagggagggggctgctacaggaaaaggacggcattgcctatccgattcacgtcatgagatttctctgacctctggcctgtagtggctactccgggatgggaaacccggactggcctctcactgcctgatagggtgtcggcggacacagtgcttagttttatagtccgttgtaatgggac

SEQ ID NO: 1983 - DNA, 479 bp, unidentified
  source 1..479: mol_type = unassigned DNA; note = unclassified RNA viruses ShiM-2016 sequence
gcaaggtttatagccttgcagtctctgtttgaatagttgatagttatatgtctatgtgtttagtgttgtacgttcaattatttgaacgtgccgctctcgatacatatgtcattataggtattgattgttcaatttaaactcgtttttcgtacttttgtcgtaaaaaagttcactttttcagtctactatcaagactttaaaaggatagttggagttttcgcacgtctccgtaatttacacttcgtgtagtgcaatctccggtactttggtaatcagccggattataaatttttggatttactgagctaacagtctcctcatactgtacgtcgtgcccatagatggtacgcaaattgtaggtattcctactcatggggtttaatggtagtactgatctggtaccccggctattatagcctaaacaactcagtttttgccaggacgctgttatttataacagtagtcctggcgtatatatt

SEQ ID NO: 1984 - DNA, 480 bp, unidentified
  source 1..480: mol_type = unassigned DNA; note = unclassified Partitiviridae sequence
ttgctcgcattggtgctcgcaccaagttaatggttgattggatgatcggttcttgggaaaactacttacgaccgaagacgtggatggacgcactcgaacaagaacagcaggagaagtgggcagctgcgaagcgcaggtacgaccgaatgattgaccatgagaatcagaggttggcaaaggcgcgggctgaatacgatgccattgttaacgatgtttctctgaagcaggccacggctcgagaagaacttcgagacgttctgagaggatttgggttgcaagatgcaccattactttcagtcccgtctgaagatcatggccatgaaaggctcagagaggaactcagctttctggggataaattttcgtcccccagatagccagttccactaatcgtgttcaaggaacaatacgcactctcgctagacgagcacgccggttaagaatgaaagaagcagcgacacagagacatcctatagagaaa

SEQ ID NO: 1985 - DNA, 480 bp, unidentified
  source 1..480: mol_type = unassigned DNA; note = unclassified vectors sequence
ctaaggtagaatacttcatattgagctaactcatatatgctgactcaatagttatcttgacatctctgctttcataatcagatatataagcacaataaataaatactcatatttcttgataatttgtttaaccacagataaatcctcactgtaagccagcttccaagttgacacccttacaaaaaccaggactcagaatccctcaaacaagagattccaagacaacatcatagaattgctttattatatgaataagcattttatcaccagaaatcctatatactaaatggttaattgtaactgaacccgcaggtcacatgtgttaggtttcacagattctatatattactaactctatactcgtaattaacattagataagtagattaagaaaaaagcctgaggaagattaagaaaaactgcttattgggtctttccgtgttttagatgaagcagttgaaattcttcctcttgatattaa

SEQ ID NO: 1986 - DNA, 481 bp, unidentified
  source 1..481: mol_type = unassigned DNA; note = unclassified Botourmiaviridae sequence
gggggtacacaggttttggcctggttcccggggattgtgctccacctgcgctttctccgagatttagtgctccttcggctggagagtggcaccgtaacgcgcagtggcgacgggccgtggttgctgggcatcacccagtgtaaaagggatgtaggggcattgcccgtaatccggtgaggaaggtaccggtcccaaaggggggaggtaaaacgctaatcaggcgtgttctgcgactgtgcctcgcgcgcggcagttcagacccggggactaactgtcccgggcgcaaaccccggcgggttgggtggacatggttgtcacctttcccttagatctttgcagtcgtaaaagaccgggccaagggggccctgaagtctataaaggtgggcgtcaatgcccaagcttcttgtcaacacacaagcgcgaattgaaacccctccctgggtcggagtaaaaggacccgcctttaaaagtgaatgataaa

SEQ ID NO: 1987 - DNA, 481 bp, unidentified
  source 1..481: mol_type = unassigned DNA; note = unclassified RNA viruses ShiM-2016 sequence
ggggacaacccagtctttactgatcacggtagacgttaaataaagagatcccggtgttgtccaatgctggaggtgttaagccaaaatcaaaatggactgctaagtaagatatacgcacagcgattaggttctgcattacctattcaatgtggtcaggctgcttagtggacttgtacatacccctttttaggggagggtttggtcacccaacaaaatagcactgttatgttgtcgattgatgtgccgcacataatatttattaaattacattactaatctttatactatttgtgagccagaatcagctcaaaatgattcacacatatcgtgcgatcctcgcacaattcatactgtcgcgtctttcgatgaagatgatgaagtcttgcaacttcgtgctcgggtcagggagctacgacaaaaacttgaccgaaagtaccgccatgttaagcagctcactaaacgaattgagcagctagaaggt

SEQ ID NO: 1988 - DNA, 482 bp, unidentified
  source 1..482: mol_type = unassigned DNA; note = unclassified Riboviria sequence
tttattaatactttcagaggaaactcttatgacacagaagaatctggtccttatcgagtctaatggctcgacccaactttatgggcaccctgaaaccctcgcgaagaccgtaaaggttaagcgctcattgtctactaaggcaacgagtacgggcgtaaaggtaacgaataaccgtgttgaagtcgttatcaacgcggatgtccctgtcaccgtctgtggcgactcgtgcgccggcggctccgaggttctgtctgtacgtttgtcaacaagtggtacaccgaaaaatagtgcagagcttgatgcaatgcttgatacgttaaaaagtatcattgacaaagctaaggcttcgcgcttaacttccggctacccaatgacccaagacttagtctgggttgatgtagacgaagcgtaacagacaaccgttaataggagagcaaccagtgaaaacatggaagctagaacgccgagcacgtgatgtgcta

SEQ ID NO: 1989 - DNA, 483 bp, unidentified
  source 1..483: mol_type = unassigned DNA; note = Sclerotinia sclerotiorum deltaflexivirus 1 isolate AX19 polyprotein1 sequence
ttttgtatttatggtgtttgttggttgctttgctttgtttttaactcacattcttttgcactttatctctctaatcttgtttctgctccgccacactctcggcttaaattgagtggtctcgctgtaccataccagcgatatttatctatctgaaacgacttcaggtcgcaaacttgtcatcacagctaatgccatccgaggctggtccacctgtaatgggtgcatatggtgtacttggtcgtgtaagctacgataacccaagtgctgatcgtcccgatcgaggaacgggtgcaaaataggtgttcacttcatctccaccccaatctcgaggtaaccagatcttctcccaaactggtgcgttacgcatgattgccgaatcctctgcgtacgtgtctgggtttgacccccaggctctgtacagactgtacgggcgaagggcactacattccctagtgtcttaaagaaacagtcggcccccgagta

SEQ ID NO: 1990 - DNA, 483 bp, Heterosigma akashiwo RNA virus
  source 1..483: mol_type = genomic DNA
tgatagaaagttctgcagtattctgcagaactttttaataccctttgtagagggatatctactttaattgctggtgtgcgccagctcgcttttcgatgtgattcataattaactatacacttgagcttaaaaccaattgttatgcgtaggtagcgttctttagcgtctactgtagtgtaattaatttgtttgctctagtggtgtctttgccttcaaagtactacagagtaagttcatttgcatagttgtgttgtgatcatgttgactagcttgtttgcgtgctccattaataacatcagtcccagctggcggggcaataagtaccagcctggttgttgcaagccgtgccgaaagaagcggtatcacgacccgtgtccctccatgtagtcgttaaaaacaagtgaggtaaggagttgtccatcttcgagaaaaattaataaaatggacttttgggtctttggcccccccccgcgttaggcacct

SEQ ID NO: 1991 - DNA, 483 bp, unidentified
  source 1..483: mol_type = unassigned DNA; note = unclassified ssRNA positive-strand viruses sequence
ttgttgatgctgtagcccagtggtctccgcgggtgtggttaattgcggcataaagactttcttgcagcaggttttgttgttggttgttgagtatggcgcgtgctaggggagttggttgagagttgttctttgcttgtgttccttagtgtgtgccttgtgttgtgtacacggtcaggcgagtagcctttgctgtgtgtacagcttgtttgtgcctttcgcccaacgtggtggcgggaggtatttgtgtttaatcgtcgttgagcagtaggctctcacggcgaaacgtagcatattgtgtgttatatttgtcgtgttcggcgaggaggttttctcggcttgagcacgatatactgtgttgattaaatttaagtgtagttccttgcgctctgttgggtaagctatccctacagagcgcgagatcatattgattgaagcaaaacgtgtatagtgtatattgtaacttgttagttgtaaaaggacaaa

SEQ ID NO: 1992 - DNA, 483 bp, unidentified
  source 1..483: mol_type = unassigned DNA; note = unclassified ssRNA viruses sequence
tgggggtagccatccctagtgtaatttcttacggggatgcatccttgccctttcaggaaagtaggatgtatctttcaaaggaaagataagctaaatgtgcatggcacaaggttagatggaaggaaatgtccatcggcataagctcagattgatttactgtcaaatagagaaatgattcgcgtcgcttggggcccagtttacactgggcgcatcggccccatatatcatggggtgcgctacgccgtagcaagcattgagaagtccccttaagcaagggagcctttgccttatcgactgtagataaggacggtgatcaatataccgagtcacgacaaagaaagtgacacgtcaacgcttaaaagtcgcgatggatatcaccactatactagtggtgtgaaccgaaatcgcgcaaatcgacaattcatatttcgataggattaattgtccaatcggcgttccgattcacgtgagaatccgttaatc

SEQ ID NO: 1993 - DNA, 484 bp, unidentified
  source 1..484: mol_type = unassigned DNA; note = unclassified RNA viruses ShiM-2016 sequence
cctagccgggctttacccggtttggtcgtcttttgcttatgtggtatattctccattttcgaatggacgatatatcgcataggttttctattctcttaaaaactaactatatctgttatatatttgtattgtttataaggtggtgggtttagagttttaattgtaagtaggatactctacttccccacttttgttttgtactatgtttaaggtagcacctaatgtgctattcttagtccaccgaagttttagtgaaagcaactgctttagattattttgccctgggtcttacccacttgcatttacgccgtgaggtattgtgcttgatgttggacagggatctaaataagtgacctattttgttcttggtctttgctaacgttgttagtagctattaattaggtggtactgcgcgtaagctagaacttacgacaagtgacctgggtatgtcatttaaactactcattcaaaatttacaatacat

SEQ ID NO: 1994 - DNA, 485 bp, unidentified
  source 1..485: mol_type = unassigned DNA; note = unclassified RNA viruses ShiM-2016 sequence
tacaaaaatccttaaaagtcagagaacttttaaaacccccggttagcacaaactagccacaaatagtctgagtactaccaaacgcacgtattgtccgagcacaattacgtaaaccaacgctacaatcgcacgtattgtctgagtacaattacgcaaaccaacgctacgaacaataaagcccataattttggatttatttccacaatttacgctatttagacttatcgctgccctccactatagtggttgtatcatctctctcggacaactgaatacttccaaggtatagcgtcgcagtcagagcacagcgcctaaatcttggtataaacgaacgtacgcctacagaagcaacctatgagttacacttatactgctctcagctcgagcattaccgaacgagaaaacatcaacgatatcgacgacacaactgttgacccttcagcctcgttcctagtgcccgtcagcgaacaagtgtataggccaac

SEQ ID NO: 1995 - DNA, 485 bp, unidentified
  source 1..485: mol_type = unassigned DNA; note = unclassified RNA viruses ShiM-2016 sequence
gcgctgcgcctgattagtccggaatgacgtaaaactaccaaactaccccttgcttgaggctaacaaagcgcgtgtcccaagggacctaaccgggggtgcgtcctataggacgataaacaggacgcccagattccagggctatccggttttcggcggtgcacccagcatcgccggcgacagtgcgtctagcgctgtcgtctggtccgcaatgacgttaaactaccacgccggcgcaccacgcgccgtcttcctgtccgcaacgacgttaaactatttagggggggttggtacggcgagctgggtcccgtccccgccaccgcccccctgcagccctcggggcgttgcagcagcatgaccgcggtcagctgccacgctcccgggggcgattgagtcagcctccaccgccccgcggggcggggtgttaagctggttcggtgtttctgcggccttactgctcgatctccaacactattcggtccgtgagg

SEQ ID NO: 1996 - DNA, 486 bp, unidentified
  source 1..486: mol_type = unassigned DNA; note = unclassified viruses sequence
cttattcattctgcatcatggcgtttataaataataatggtaatgctaaccagcgtggaatacccgcacaacagcaacaaagacctcaacagaggcgtccccgtcagagggattacgatcggatgttgtcctacaatcaagacagagctggtccgtcttgggcacaacaatcccaaccggtttttgagtatgagcgtgcaatggaacgcctcaaccggcaacagcaaccccgtccagtacagaagagcacgggcagtagacagcagaagaagcctgccgacagaggcccagagccgaaaccgacaacagtcgagcaggggcagcgagatgatccgatgtacgaaggtccatgtacatcaacaaccgccagtaccacattgtttggccacaatctggactacagcggatacattgccctagtccgtgagttctacatcaataccacggcactaaatccgcgtcttacacgcggagttacccttctgc

SEQ ID NO: 1997 - DNA, 486 bp, unidentified
  source 1..486: mol_type = unassigned DNA; note = Picobirnavirus sp. hypothetical protein and capsid protein genes,1 sequence
aataatataggaggaagtgcgaatgaaaaagacatgcatttctaaggtgaaacgatttctcatctatctattggcgtacttgttgagcacgctttgtagagaagcaatgtgtattcacattgtgaagaatcgtcagtgttattccgtgactgtaactaacggaaaattaaataaggaggtcaagtgatatgaccaaagtacagagcgctggagagcgcaagagctatgtgatgactatcggagagtatattggtaaggctcaagggtggctcaacacgctgcagatgatgcacgcatacaacatgaatattgatgcgaaatcatcgaatatcaaaaccggtactgaacaaggtcgaccttatgttgtggctacttatagttacactatgattaagggtcctacttctgttaaccgggtggtaacttggatctgggatgatgatcatcctgatggtgagttagcttactcatgcggaggtgattaat

SEQ ID NO: 1998 - DNA, 486 bp, unidentified
  source 1..486: mol_type = unassigned DNA; note = unclassified Reoviridae sequence
agtttttgcttccgaagtcatatcacacttaggcggggttaggtctgaaggaagatatagcgaataaaatatatagtgtaaattaatttaatagaatattagcattcaaatttcaatggagcagacggagtggtggaacagttactaaatgatagtagaggaacggcatggtcacagtagagtttagtgaggaggataccagtaatataaacaaacaagtctgagtaatatagttaaccagccgaaattaagacgacgtgaggagattctactgagacaagagctggagggtggaccacgtttgaagaatcatagaaagatgatttggagattaggtcgaaattgatataagtgaattaaacaatacgcttagagagccaaagatattagtagtaccatgttaccatataataagactagctactaaagagggcgggtttagtgtgatcgattctttcctaaagctatcatgtctaaattttctga

SEQ ID NO: 1999 - DNA, 487 bp, unidentified
  source 1..487: mol_type = unassigned DNA; note = unclassified Sopolycivirus sequence
acgctgctaaatctttagctagtggtgcaggcaccgctgctaatgtagttaaaggcgttgaagcaacagcttcagcaaccccttggggtgcaattgctttagtcaactcaatgttgggtgatgcaactgctgctggaattgatgctggaaatcgttctacaattaacaaagacttccaagcaaactcgatgcaacctggatcagcttcacaatatcaagctggattaataaaggacacacaacaaattcatgcgaataatgagttagctggcgcacgaattggaggtgtttttggaccattaggagcttattttggctcacttttggctaatgcacttcaagataatgcacccagagatctctatgattcactcaagactggctattcattcgatggaaaattcaatccccaagatacaggatcagttaattcaggtacaacagcaaatttatctggagaaactaatatgcaagataatttaataac

SEQ ID NO: 2000 - DNA, 488 bp, unidentified
  source 1..488: mol_type = unassigned DNA; note = unclassified Hepacivirus sequence
gaaaggaaacgtatgacaagtttgggctggaggtcccttacccgtaccaatccccgcatgctctggattttgaggcttcgagcctgccacagagcctctgcccgtgggtggcgccgccatttatgtcttctaaatctcacggcctttctttctgttaagtgtgtctggctaagaaccatttcgacccccggggcggcaagcttttcgccctgaccctgggccactcgggacacacgttctctgctgcgcgatggccgtcgcatgcgtgcgaaccatcagaattgcaagtgtgtgggaacggtttgactgtaaccagtactcttgggacaaccagcggtaacgctggcccttgggcaggcttcggcagctggtgtgaaccaatcctaggtacctgccttgcatgatcgtaaatagctgtatgtaagatcgcgccgcaggcaggagttggcggactccttaaacaccgtcaaccccaaaaaactatatat

SEQ ID NO: 2001 - DNA, 488 bp, unidentified
  source 1..488: mol_type = unassigned DNA; note = unclassified Iflaviridae sequence
agctggattttaacgatgagaagcttttaaattgttcatggtgatacccccctccccagtgtgattgtccatatttgtttgattgatttacgatgacgaaaattgagtaccctgtaatgattaattctttgttttatgaatataatatgacctcttatgctgactagtgtgagtgccgctagttggtggagtatgatgttatacaattgtatattaaatttagctctgagtaaaatggttgaaccccatgttgaaatgacgctatctgatatacgaatgtatgagccagaatgttgacaacacctaataatgcacaattgcaacaacttcggttggagcctcaaactgcgattggtcatgtaatttactagctttcaaactatcgacctagacaagtcttagggagtttgaaagaataggaaaccaattcgtgaatgtttgtgtacccgtgtcggagcggattattaggacggcggacgctttaaaag

SEQ ID NO: 2002 - DNA, 488 bp, unidentified
  source 1..488: mol_type = unassigned DNA; note = unclassified RNA viruses ShiM-2016 sequence
gcagcgaaatacaaattcctgtcgcaaaagagtgttatgaggagtcacgaggtcaaaactcccgttttgtaagtttagtgaacactttgagttcattagcggtggatgccgcgaaacattttgtacattttatattcactccaccgagtttgtatttgtatagaaaattgtatcctagttctcaggagctgaatgcagatgtacaaggtgggggcgatcaaattgccccacagattgattcaaatccggccctcacgtttgtcgatcagaacgcaggtgcagaagatggggtcgacacttatgttgaccctctgcgttccaatgctgaggagactgcccccttctcggaatggaggaagagacctgttctcttggcaacggtcccttggcagactgggacagatttggacaccgttttcaacccatgggtggaatatttttccaaccagtacatcaaagaacgctttggaaggtttcatatagcctcc

SEQ ID NO: 2003 - DNA, 488 bp, unidentified
  source 1..488: mol_type = unassigned DNA; note = unclassified RNA viruses ShiM-2016 sequence
ctgccccgtccaggcataaaacggacaccacctccctgtgtgatcttactcagtggccaataacttggtcctggaacatcactgagcatgctacagggggtagacacctaagggatggtgcggagcagccctccggaatcccatcaggacctagcagtgacgaccttgagttgagtcgtgaacaattccaatgtgaattgtgctgcgaaatacccagacttagcattcaagaaccagaattatatacaggacagactaatacgacaaccgcttcgctacctgaaatagcgacagcggcgacacaacagttgtctaccaccttggtagagaacgcaccaccacacaatgaacaacgccagattgaaccccgcgcatatacaagtacgaatgcctttaaggtagatcggccagaattactggaaacattgtccagggaggtgacagttgtcaccggcacctgggatagtagccacgtacaaatagccgac

SEQ ID NO: 2004 - DNA, 489 bp, unidentified
  source 1..489: mol_type = unassigned DNA; note = unclassified Picornavirales sequence
aaataaaatgtttaaatacaaattgtttttcgattcgattcgatttgttttgggttttggtttttgggtcaagaccgtaaaacggttcaagagaattcgtaaaacagatcgccgctagtcaaagctagttcgtacactagatcactgtcaataaattcacttttagtcgtcaatggtcaggatacttccgctttaagggcgcgtttgtatgattgcctttatatttcttttgataacacgacgtgctcatcccaccttgttagtatcccactaacctggacaaatctcgtgttttgaaaaatatattaatttatttgcgtaaattactatatttagtacttcttatacttaaattccttggagttaaattgcttattataacaatagcattttgctttttacttggatttattagtaaaagaacttacttaaccctaaccctagtttttggtgtgtacaatttatttgaaacataccaagaattcaaaa

SEQ ID NO: 2005 - DNA, 489 bp, unidentified
  source 1..489: mol_type = unassigned DNA; note = unclassified RNA viruses ShiM-2016 sequence
cgtatggagaacatacgcaattattgccgtctaacgggggtgacgtaacaagaccccggatgagtccaccacgtgtggcattttcagccgaatagattcattttatgacgacagattaatggaaatgttttagtgtttaagtaaaagggtttggaaccttagagtaacctcgatagtatatttatatactcccagaacctagccatggggatgggccgttgaggcaatgttctaagaccagagattttaaagcttgacaagcgctttacctgagattcctcttttgagtttgaatatattaaagatagtctaaaaacatttatcagttaattatgttagagtagctgaagacatgtatttcgtgctctaacctctgaaatgttaaatgtttgtccaatggttcggtgatcattggaatattagcgaagttaaccttcatctttaataatcctgtgtcggagcagtggtaaagtaatcggactattaagc

SEQ ID NO: 2006 - DNA, 489 bp, unidentified
  source 1..489: mol_type = unassigned DNA; note = unclassified RNA viruses ShiM-2016 sequence
gtagttgggggtggctctgatggtgtgtcaggtaccacccccgccccatccggaggtggctccgacggtgctgtgggtagcaatcccacccctacgccgaccaggacgcgttaccacgcggcctcggctacaggtgtacccgcaccctacgacttcttaggattaggcgcggtttaccaggtcacttccgatttggtataccagaggtttgacgatgtatggaagctcgccaattacactgacaagaccgtttacttccagctcaaggttgtgtaccacaatcttgcgttcgatacgtccgttaggtatggaaaccaggattcctattcttaccataccgacgtggcgtttgacaacaatggcggtaggctcgtcactgttacaggaaagctgcaacctgctgaggcctggcgttcgagcatctacattaagtggaagttcggagtcacccccccagacatttactggaccctgaagacagacatatac

SEQ ID NO: 2007 - DNA, 490 bp, unidentified
  source 1..490: mol_type = unassigned DNA; note = unclassified RNA viruses ShiM-2016 sequence
tattttaaacactaatttaagtaccttgttttattttataaaacttgcgacttaaaaatgtgtcttctttccttatcgtttttctttatgtttgtattgttagtataaaagtgagtaagtgattcatttcatgcttttcttttattcttttaaacgatattatacattcaataataagtgagtaagtactgccagtgcgctggaatgtggtagccccacttttggaaagctctaaatcttatgttgattgtattatatttgttttcggggttaataatgttccctttctaatattattattagtctgtaacactaacgtacaatgacgtgatattcgtcccagagggaaactggttaaaagcgtgcgcgctacggcgtgggttgatatgcaaccaaagacatatcgttcagccctcagcgaacatagtctgagggaagcttgtcagtgctttaaactgacaaattttattttactgctagagaaatcgac

SEQ ID NO: 2008 - DNA, 490 bp, unidentified
  source 1..490: mol_type = unassigned DNA; note = unclassified Riboviria sequence
gtacaggcgcattcgagagaagtgttattcgcagttgtatgttccgagtacctgaatcacagattcacagaaaggtcattaactgtcataatagtgcgtaatcgaaatttactgtcaaggggaacgagagtgtaaaggtttacaacggttcgcccgaagtacttggtttttgtgcgctttacagtgagagaagcagtatttacgacgagtaacggagtaacaggagtgagaattcatcgaaaggtgcacttcacgattaaatacagtgtaattgttgtgtcacagcaacgagacgagcagtatttgtgaatttgtgtcgagtaattggatcagggacccattgaaacggcttgttgtgttaaaatacagtgtaattgctgttattacctattacaatataattaattaggataagcgaaatcgtgcattagcacatcgattatagaattaggttaattttgttagcgattgttagcgttatacccgcaaa

SEQ ID NO: 2009 - DNA, 490 bp, unidentified
  source 1..490: mol_type = unassigned DNA; note = unclassified RNA viruses ShiM-2016 sequence
cgtagaggtgttgcctctgcgtttatttttgccaccctggctgggtgcttgtcaggccgctatagacatttcatgtttgatgcatgtgtggacgtggtatctgcctaaggaaaagtcttttcattgacggttttattacttgacttactattttagagttttttgactgtgtggggagtgttattttttcgttggcagtatttcgttaaactggccgttattcttttaggtgttggagacgctcttagttaatatgctgctttctttttagttatcattgatctggattgatctgagattatattgaaagcactatgttgtctgtgaaatttgcgttagccaacactagggggatatcaagtccctagcttcttgtgagtatgtggatatctcgcagaaccagttgaaagcactggatgaaatccgcaattgctatgcaattttcatatccgctcgccgacggcggtatataaatgtcggtcatggaaac

SEQ ID NO: 2010 - DNA, 490 bp, unidentified
  source 1..490: mol_type = unassigned DNA; note = unclassified RNA viruses ShiM-2016 sequence
atcagtccattcgtcaagctgatgacttgatccatcaacaatggtggagcactaatgtcaagcaacagcccgagggattatatgtaaatgatggctggtatgttgagaaatgcaccatgcccacgacatattatccgactgatatatatcatcctcactactacctgtataacagattaatagatctgcaggagtttgtgttcggtaaaaccgaaataaaatacatccccgagctttattcacaattgaagttaagatcgttaaacctgccaagagatgatttgcatcataatcaattaaggtccgcggcagttcagattcttaaccagaagaacatcaatcccacaagggttcatgatgctctgatgggttcaattaccagagccatgatacctgatgatgatgagttatcaagtatcagaattcgcaaatccggtcctgttaaggccaggcagagcgaactttcgggggaaggagatccaagcacccg

SEQ ID NO: 2011 - DNA, 491 bp, unidentified
  source 1..491: mol_type = unassigned DNA; note = unclassified Hypovirus sequence
gcctgtgggttcccgactcaggccgccctttcgggcgtaatcggggtgtagttactgcgctttcagcagtcaactttgtcaagatgatgtatctttgactgttggcgttctttaaactacggttgtgtctaacgacacgttctcttaattgagagtcacgctatgcgtgagcccaccaagtggggttgctgggtttccagcggttgtcgctcgcgacagtttcatagggttcacgtcgcccttgctaaacgacgaatttggttttgcttcctggttatactgtgccagccttggtggcacttaaacacttgaatgcgcacaccttgaatcgtttcgccgtcttcgccggtgtcaggatttagggccactgttctatcaagagggataagccgcgcctgtctgtgggtagttggggatgaatagacgtccgtggtgcaacgtgcacggctcccatttcaacaactacttggacgaatcagagcgtaaggtaa

SEQ ID NO: 2012 - DNA, 491 bp, unidentified
  source 1..491: mol_type = unassigned DNA; note = unclassified RNA viruses ShiM-2016 sequence
gtttcggtacgccgaccgtgctcgctcagtgcgagcacaacgcgctaaacgcgctgtacaaacgccatctttctgccccacctaacctttgcacccgccccttccactcgtgtttcctcgactacattcaaactaaacttgttcctcagtttcattttgtccggcaatcctgtgaaggcgcatggaagaagaagaagacccaatctaagcttgactcgatcgaccggtccgttgtttatgaccggttcgaattccaaagagcgaagtcctttgtcaagcgcgagattagtgtcaaggttccgaagaaagcccgtttgatacagggcaatttcaatgaaacgacggcctaccacgatcctgatactttcaaggccatctcccatctttttgaagacgtgcgcttcgaagctgaaggcgtttcgttcgtattacggtacacatctgggtgtactaacgccgacatcagccgactgttctccgacgaggttgcg

SEQ ID NO: 2013 - DNA, 492 bp, unidentified
  source 1..492: mol_type = unassigned DNA; note = unclassified Marburgvirus sequence
ttattgttcgaagattgacaatttgatcactttcagttttcaatttcaacccttatcgcgagatttggacacgatcttactaacttcaataactgaccccaaattcaagtttactaaaggctaagatgaaaataatcactagtttgttgtaaattactcgatcaaaatgttcttaagctatcttcaacttaatgatgcaactctgtttcatctttcttttgatttcaatgtcacagctatatccaagtgtctaattaacaacttgtacctctaaggaaaaccatgaagaacattaagaaaaaggatgttctgattcttcaactgaacttgtatatcctttattgatacccttgagagacaactgttgacgctagatcacggatcaagcatatttcaatcaaacatcctaaattttcaatcgtacacataataaccattttggtagcattgctttgcagtataggataggtggtcgtgaaaagacttccaagc

SEQ ID NO: 2014 - DNA, 494 bp, Human orthorubulavirus 4
  source 1..494: mol_type = genomic DNA
tcatacaaatcaatcactgatatagagttaaggaacattttatatccttccccattggatcaccattaccatcctgatatataaaaccacactacactatgcaccgtccaatatctagccgaccataagatcacaaccacattacaccaattcaatcaaggacatccctgcaaacatcaaacaatcaaaccacgactgcaacagacacagcaccacctgatcaagccagaccctcaccatgcacccaagtcacccgacacaaccgcaaactctcgactccactattcaaaacacatcctcgaacagaccacccaaaaacaccgaacaatcaatctcctggccacaacgatcattgtaaattttaagaaaaaatctaacacacaactagagccaaatacagggggggaaaaacgcatccgccgccacacgcacagatccagaactcaaggcaaccaagacccgccagattccgctccatcttcaaagaaatcaac

SEQ ID NO: 2015 - DNA, 494 bp, unidentified
  source 1..494: mol_type = unassigned DNA; note = unclassified Orthorubulavirus sequence
tcatataaatcaactattgataccaggctgagcagcatcccacatccttccccactgtactgctagcatcattcagatccatagaaccacaccacaccatgcaacaactgacattcagccaatcactaaaacacaaccacaacacaccaattcaaccaaggacatcctcataaacacaaaatgatcaaaacatgattgcagtagatacaacatcaccccatcaaatcaaaaccccatcgtatactcaattcacccgacgcaactacaaatctccgaatccgcccccagaaccacatcctcgaacagaccgcctcaaaccaccaaacaatcaatttcgcaattgcaacaatcattgtagattttaagaaaaaaacaagaacacaataaataccaaacgcagggggggaaaaacacatccaccgtcaagcacataactctaaactctgaggtgaccaatacccgtcgaaatccgctccaccaccagagaatccaac

SEQ ID NO: 2016 - DNA, 495 bp, unidentified
  source 1..495: mol_type = unassigned DNA; note = unclassified Hypovirus sequence
gcctatgggtggtctacataggtgagcatgcgttgctcgatatagaccgccattattggtaacacgcttgaagtgttctcatccggagaaagtgatttgctttcttccatgaggctccctggagggattgtccaataatggttgataattttggttgctgcacaaccggggctttgcccggggatttcatcccgttcaaggtgaggcccttgtagtaacctctccccgctgcgtgagcgaatacataagttcacccagtactgacagtgtcagcgccgcacgtgcgtgaaacgtgtgactcgcagactgaagcgacctatggtgaaaacggatgtaccatctagctgtggagtagtgaccctagaagctaatccgatggttccaccagtcgttgtttgccggcaaacgccacaaacggtttcgtgctttgcgtgaagaagcacggtctcttaagagttcattggtacggttgaccccgaacgaggtccgaacata

SEQ ID NO: 2017 - DNA, 495 bp, unidentified
  source 1..495: mol_type = unassigned DNA; note = unclassified Tombusviridae sequence
ggcctattgctagcgtagagttctcctagataacgttttaaatttcttatggcaaaaggaggagttttaaagcagcttaaaccgttggtccaatccctggccgggagttccaggacaatgaaacgaaaccgcagacgtggtggccgtcgcggtggggtgctgaccaccaagggttcgcgtccgcgaacagttaataatccctcgtggggaaggtcgttgccggccgcttacgcttcccacgtgaggccaaggttcaatatttcaagccgtacggcaactacggctgttgtttcagggtgtgatctaatatatcccattccagcaacgctcaatcctgatagtgagaccatattttcaatatttccagctaatcccgcttactggtccggtactcgtatcgcccagttcgcgcccgcttaccaaaattataggccgctggccttcactgttagttacattcctcaagtagcagtgactcaagcggggacagttttc

SEQ ID NO: 2018 - DNA, 495 bp, unidentified
  source 1..495: mol_type = unassigned DNA; note = unclassified Picornavirales sequence
cgggcaaatccctgcgcaatcaattgaccccatgctggctgtaaaccttagtgtatccgtggctgtccccacggagaataagtatgtgaaaccatggccgtagattgattgttcaaaccttttgaaccgcgtaatatttaacctttcgagaactctattaaaatctatacatcagatgcaagcgttgattgatgtatactttttgtagaactatcgcattgtaagctctttccctctcttcctttcaagctggtagcccagtaggacgcgatctccttttaagaaacacacgacggattcgaccccgctcgttggcgcacccctttaggctagtagtattggaacttcattctctttgaaggtaggcaccacgactagaactcgtggcagatagtagactcttttcaattaatttctgattaggcatgagcaaagtagctttgaataactcctcatgactggattgtacgcagatttcatccactgcactcagaa

SEQ ID NO: 2019 - DNA, 495 bp, unidentified
  source 1..495: mol_type = unassigned DNA; note = unclassified Picornavirales sequence
cgggagagttggcctcacgctgtttagcgtgagagccggctctcctgccccttcccctgagccggggatcttggctcattcccttcttttctatcctccctcattggactttacggatgacccggcataaacttgacaaccgatgttggatttcccttgtggctgtgatggaggacataccctcgggtgtagttgtgtgcgtgtcgctctgcgacttgagcttcaaagtggtgctgaaatattgcaagcgtcgttgctcaattaacggagtgatacaatcctatgaacccaagtgcattcatgcgaaagccccggaggggtgagtagcatggactcgaatcagaagagctagagctcgcttggtacggcacgtagcattgctttgcctaaagaccaagggggtatggctataggtgggggcctatagcttgtctagtgctggttgacagactcgtgctacgcgtctggttcgagtataagtagctgcaactcact

SEQ ID NO: 2020 - DNA, 496 bp, Xincheng anphevirus
  source 1..496: mol_type = genomic DNA
ggtaagcgacatccgagtttataaaaaccctctggttatattacaaaacaaattcattggcatctaattagtaaccgaaactatgagcaacactgtgaatagaattgtatgttggaggtgcagaacactcatcagtgtaaaagcagctgaagatgaaccattccagccttacattcgttgtaatttctgcaacagcaagaactggattgttccttctgggaattaagagtttataagtagtgttgttttcttttcttttgctagctaaatcagtatgtatttctttacatatgtatatattttctattataccttattaaatgtttctgattgagagtatcaatatttaaattctacatcgatagtgagaaacttaatttagaaaaaacctcgtggtcaaagttacacgcaacctagaaaatataactaagaaagaaagagagaggaaaccaggtacgacacctactcaattggcagaacatcattccacttcgag

SEQ ID NO: 2021 - DNA, 496 bp, unidentified
  source 1..496: mol_type = unassigned DNA; note = unclassified Picornavirales sequence
agagacaatcggatgagttcttctcctttaagtaagaataggtagggtcttaacccctaggttgcggacaccttaagttccgctgctaggtttcagtgtgatcttgttagtgtatataaaatctatagttctaaaacacttaagcagtgctgctgaaacaacgaggtgggctatttagccttacttccaggaagcctggggagcagccctcccaaattccaggaaactatagtacggatttcgttagcttgagtaggctcgatttcttaaaaatttacttgctacaattaataacaattcgggtggctccgattcaaaagctaacttagctccaaacactgttgtggatggagcaggagaaaggacgatagacggtactaccgctttcgtcaacgattcggaagtagtgcaagcgtctattatagcgcctctctccgtttcaagattgctaactcaatcgagtgcagtcgaaaatatagaggatataaaaagatgg

SEQ ID NO: 2022 - DNA, 496 bp, unidentified
  source 1..496: mol_type = unassigned DNA; note = unclassified RNA viruses ShiM-2016 sequence
atcgtatatgcgtttatacgcatatatgattagtagacgatgtctctatcgataaagaacttcaagtttagtatcccacgtgagatccttggagcgacaccccttttacaaataataccttttaaacgtattttcaggaccttgcatgacaatgattatcccccgcactgaatacaaccatacgtggattgtataagatgggaaccttgacaaacatttggtacgcgccgaaaggccatcggagacataatctccgcacctgtatgtagaccactacctggctctcaacagcttgagactttgtcttaaatcttcggattggaaacggctctatttgggtgtgctgataacccctcatcggagacgctgaggagggagattatgcctttagtgtacgccaccttgtcttgcgtaatgccttggttggtattgattctgggggccagcccagacggagctaagttgcactagagttatactggctgttcatatcgcc

SEQ ID NO: 2023 - DNA, 498 bp, unidentified
  source 1..498: mol_type = unassigned DNA; note = unclassified RNA viruses ShiM-2016 sequence
tgtagtttgacaagctacatattatcttctttttcgtcttagtgtgtgctgcactgccatttgtgacagtgtagttatcacgtggacgttttcttctatgaattgtcttctttttctttcttcttttctcttctttttctttcttttctacattttcttttgaaaatgttctctttttctttctttcttttctctttcttttcttcttttcttcatgacctttgtgtctgaagtttcttcgtaatgtttagtacctttttaaaggaagtactttactcatgttgatctccctatgacgttcaaactcgcgagagttgtcttgggctgtacgcattttccttcgggagggttttgtatgtactttttaagtgggaataaccgcttatgtggttacttctttctatgaagtagagctttcgttgtttttctctttaaataacgcagtttttgaaagtttttctgtgataaaattttcatttctttttccttttcttcatt

SEQ ID NO: 2024 - DNA, 499 bp, unidentified
  source 1..499: mol_type = unassigned DNA; note = unclassified ssRNA viruses sequence
cttgcaggggttgataccctatggatggacttgatggttcctggtcggtgctgccgtcccaagtccctcgggaactacgccgtaaaagtgttagtcgggccccttgccttgttataacttggggacatagcttggtgctgattgctatgccttaaattgcaccgctttctctagcacaacctgcctggcagtcaactggcaggttgtgctctcctaggcgtttgccacgctggaggttaatgcgtgacctgtgctcaaccggtgccccgccggtcttccgcttaggctaagagcaggtctcgccgcggctgctaaccgcgggttgtgttacaaccagggggggtaaactccagccctaagtgggtccggttctccggtgaatcgctggtggtggtgtcttagcacctcattgccatccgcagcccagtttgtgggtcttcccttggtgaatgggaaaccctcctccccaaattttggttttgtttactggtgatcaacg

SEQ ID NO: 2025 - DNA, 500 bp, unidentified
  source 1..500: mol_type = unassigned DNA; note = Narnavirus sp. isolate H4_Bulk_Litter_23_scaffold_4 hypothetical1R sequence
aaaatcatgaacttaaaatgcagctcaacgataccaacattcagcttcgaaagcttcaaactcaattcattgaattccaaacctcacttaaagaacagcacaaagcaatgatggcaagtatcaagcaacactctgatgcgatgaaacgtctcaaagattatgaagatctccatgaagttgatatcgaatcacttccttccgcaacttcatctcaactccgtacccgccaacgagttgaccaattcatcaataccctcccatcaggaacccagtctcctcatcctgctcccattcgtaaatccaaaattgttgatgaaccactctcattcaagtaatcgacaattcttgataagctgccccttactgtttcattgaattggtttctctatttataaaaactaggagaataatatctttatactacataacgatcaaattcttaagaactatttatcaaccacaaaaaccaactaccaacaaacaaacaaacaaccatcatc

SEQ ID NO: 2026 - DNA, 500 bp, unidentified
  source 1..500: mol_type = unassigned DNA; note = unclassified Luteoviridae sequence
aacactgagacactgtccggatataagctcgggagactcgtcacctccgtcgtatcacttgttgttagtaactacaaatagcacctaaaaatcaaaaaaacagagtgtttgtttgcttttctgctcactttcttttagaaaatccagatcccactaccacaagtgggtgaaaaatatgggtagggtcggacttagccagtcctgtcggtgaagacactggaggaataccaggtggcgtcttctagggataccgattccggattcggagcctgcttctgggtggacactgcctcggacacaaccgagtgaacaaatggagtcactaaccacgatgaaatgagtgggagggtgaatcgacctcaattacgtcgttaaactggttggagttcctaactactcggaagttggggagaaagtcatctcaaaatgatcgttcaaagtcatcgagaaactttggcggctagggcttgcaattatggacttggcttttgcctagaaac

SEQ ID NO: 2027 - DNA, 501 bp, unidentified
  source 1..501: mol_type = unassigned DNA; note = unclassified Sobemovirus sequence
ctggatctttgtacctttgtgccacctaagctggtattggtttatctcacaacgcatgtccgacacagtgattgtaaacttttcgctgatccgaactcggtgcgtggaacgctttggcgtgaattccctcccagttggaagacatttcattggttcagaggagattcctacaggcatcggtttcgttgagcggtcttttcaggtcacagcctttgggaactattcagttcctgagagaagccgagtcaggttgatagactgcccagtatcgtgcgaggggacttttaagttcgatccggtacctttgtggctatctgttatctgtcgagtttgccaatctgaggctaaccttatcatcaaccaggagttggtgcctgggtatagtgaaaacagcaagttcgtgttttgcgaccccgaagggagacctttacggattagaacacgaagaggcgtccagcccagcagattttaccaccaggaagaaaagaccatttgtcagtc

SEQ ID NO: 2028 - DNA, 502 bp, unidentified
  source 1..502: mol_type = unassigned DNA; note = unclassified dsRNA viruses sequence
aacgaggtaagactaagagatcgtccgtagggagggtcctaagtcccctctttttgtctggaaaaattcccgatccagttctaacagagggaaataacgaagatttagttctttgtttaagtggtttttcaattccatttttaaaaattgaaatgtaaggcttggacttaaagtaggtatattgatttttgataggcggtcaatataatgaaataagttgattaaagtcgcaccccgaaaaatctagggggcgcccttttactactgtactaccgactacgggacgtgccgtccgaaatcttaagacttagcgccttaatcatttattgattggggaatcgcggcgctaaccagaaatggaggtgaaccacttaaggtgaggcgacagactgcaacggtagggcttacgacattgtgtagcttgaaagagtgaatttggatcgagccgggtattaggggacagtcggagggatttttaaagcgaaagcttccttggcgcgtt

SEQ ID NO: 2029 - DNA, 502 bp, unidentified
  source 1..502: mol_type = unassigned DNA; note = unclassified Fusariviridae sequence
actggcacgtctacttgggtagcaagggagtttgtattcaatcccacccgatgagggttccttgcgtgcgatagcatgggaagtgggcaacactgatggagggaataagtgttgtctgtaaacaagactgcgacgggcataaagtaacctaaggtcggctggctatggtgattatgctaacaggaagggcaatgcctgggctgtggacatgcaatcagaaatggttgttatgtgcccgagaggacggatgcggcagtcggtcacccaaatgatgacgttaaactgggcttatggtgcaaaccgtgtcacagaggtatgagcacaggattggggacctggttagcaaaatgtgacaccgtatccccctgtggcgccgatcaagtcttaggacacaacaaaagaaacctaaaacttgctggcaccacgaatagtgttgtctagggcacaacacactacaagcgaaacacaacatagtactcaagagtgcacacacaaaacaagg

SEQ ID NO: 2030 - DNA, 502 bp, unidentified
  source 1..502: mol_type = unassigned DNA; note = unclassified ssRNA positive-strand viruses sequence
tcgggaagcccgttattacctttttacctgaattttgcggctggttgcttacttcccatggtatcattaggcacccctaccttttgtatgcgaagtatcttttccataaagaaaatggcaccttggccaatgttctaatttcatattacatggaattccaacattcgctaactcttggtgacgctctttgggaatcacttccgtatgatcttttgccctaccaaggccagcttcaacttctttttaatcaagctcgttctcgcgtgccttcctttctgattcgtgagaataaacttggcgatgctcctgctgccaagctttccgctcgttatgatctctttcgtcttccagctgattttatgcgcatggactggcgccttcttccttctagtattagacgatcacttctcttggctaggggtctgtaatgcctggcagcgttgtcatttcttctaatggaccccaattcttcatccaagatcatcgctcaacttctcgctga

SEQ ID NO: 2031 - DNA, 503 bp, unidentified
  source 1..503: mol_type = unassigned DNA; note = unclassified Hepacivirus sequence
ttgttcgcgtaaatcccgactaggcagaaaagtgaaggagtctgcagcgtgtaacgaccaagcccggacgaccccgttgaaacaggtgtatggtcatcgcgagacccggcggttacatgggtcgaatgtcaaggtgagttgacattctaaaaataaactcagttccaaaattggtagaggtttaggcagaataggttacacaacactgtgctggaacgtcgcctctaatgcccgagttcttagggacagtagacgtaagtcggcgagttgacaaaccagtggcactctttgctgtgttgtaaccctatttctggctccctcgttccgatggcggaagcctttttttaggcagccatgcagcacaccaggcggcgtccctcacacaggcggcaagagcaaaaatccttcgggtgagctcggtgtgcacttttatttaacagcgactatgagcagtttccttttgcagcacattgtgctgtgttgttcttggtggacttccaatc

SEQ ID NO: 2032 - DNA, 504 bp, unidentified
  source 1..504: mol_type = unassigned DNA; note = unclassified Ourmiavirus sequence
gagattagacgtttggcgaggttgtctcgactcagctttgttgagtgtaggagacttctcgcccttactgaaataagaaagtggaaagaaacaaaaaaagagaaacattggcaacgttggacttccctcacgtttgtgaggggtacttgtcccccgcttgcgggcatcgttacaccgatggaaactagtaagtagagcagtggagtaggcccagaaatagtcttggcccgtgtggtccgacttagggtcgctaccttttagcggcgaaaatgctaggaaatattttttcttgcccaagtgcgtagaatcgcgtgcttggggaggtggtcgtacttttgtattgccgggttaaccctccgggggacaaactaccaaggaaagagcctgaggtaaagaaggacgtaggcgtgtgtaggcacccgaacctttgtttcgatgagacaaaaaaaaagtgtcgtcctctacaggacaacttaaattgtgaatcgctcgattcgctttttt

SEQ ID NO: 2033 - DNA, 505 bp, unidentified
  source 1..505: mol_type = unassigned DNA; note = unclassified viruses sequence
ctcgtccaaatcgcaaccgacgctgcttccgctgccgcccgcctcgctgatgagaacctcgctgctgtcgctgcacgcgacgaggctatagccaagacgcgcgagtacaaagcggaatcggctcgtaaatacccgggagcaccttcaacgtgagaaagatcttgagactaagcatgtggctgacaaggccattcttcaggctgagatcactgctctcaccgctgagcgtgatcacttcgagctggagaatgcaggtaatgaagcacttgccgctggcctcaaagcccgcatccttgacgccgtacgtgacctcgaatctgcacgagctgaagtatccaagcttaaggcagattcggctccattgctcgcccgccttgaccgtgcacacatcttgctcggcaagtactccactggctatggattcgctcgcccgtttgaagaggtcgtccacgctgaacttgaccgctccgacgacgagttgagtgctgagcgcaatgaagggtat

SEQ ID NO: 2034 - DNA, 505 bp, unidentified
  source 1..505: mol_type = unassigned DNA; note = unclassified Picornavirales sequence
gttagccacccacgttgttttttccaccagtcacttgactgtgtgttcagttagtatgtgattacactgtatggtatttctagttgcgactagaagcagtccattttcacatgctagccggaatgcattttcgagcctggtgttttactcttcttttggctaaagaaagaaaaccagttaggtgtgtttcagcaaccactatcatagtctgacttacatcgctactattttcagtggccttcgtaattttacgggccgcgctattctttgagtaggaacgtacgcctccgttagaaggctgagctcaaggggaacagggcatagccccggcatttttgtgccgctggattgtgaccccttgtgtgtaggttgacttaggatggtcgaattcctgacacgtatatcaaaacgtggccacctatcagatagtgatacgttaggtgtgggctgtgagcgcctgtttatcactttgccggcgggctaacgctcttcttgtcgcctgggc

SEQ ID NO: 2035 - DNA, 506 bp, unidentified
  source 1..506: mol_type = unassigned DNA; note = unclassified Mitovirus sequence
ctcacgaaacctgcacccgggaaaaatccctttcgcagacgtgaatgatgataggatagttgttctagggaacggtagagtaagtttaatttcgaacctactccacttagtacggcttacccagctagtagcgctcagaaaactgtgaaaacaggactatggccactttagtttggaagttaatggcgataaagtatctactcccccgaaagggaagaagagacttttagccctccatactcactttatgtggaaattagcagcgaaaagtcagctatgggttaacccagatgctgctctctaagctaaatccaactctcagatgtagaccgtcttaacgatatcctttacaggacccattaatctggctttgatcaggttaaagtgatggtttccagaagatacagagttcgatacggggacagtgagacactgaccgagtaccaaatgctctagcacctctgaagtttaccaggagttcaaagcctggctacctaatacttaaa

SEQ ID NO: 2036 - DNA, 506 bp, unidentified
  source 1..506: mol_type = unassigned DNA; note = unclassified Metaavulavirus sequence
taatcacctatgccagttggttctagcttaagccaattattcactaatcactgctaatcatccatcatatgaagtgatcaactaagagagcgcccattaatcacatgtaatataaggagaaaatcctcaacggacaaacgaatcgtttaagggcttgaaccacaatcagatatcaagctacagtatgtcaaatcctatatatacattgtccatattgctacgtgagtccacactctattagctgccagaattcttactcctataataataccaagtcattataaatctgcctgtcaagatgatcgctcagataccacttaggttaactgtcaagttatcaaagtctataacaagcctgtctggatctgatacaaaaagagcacagattgtgatcttaatcccatcccttgacaacataaatctgattaactatgcatattcaagagaaattaagaaaaaacgggggggaatttatacgaattgcggtcacaaaagtataaccgagc

SEQ ID NO: 2037 - DNA, 507 bp, unidentified
  source 1..507: mol_type = unassigned DNA; note = unclassified viruses sequence
ggttaccctgcggaagggtggtaaaagactacgggtcggcagactaagcatctgtaccgtacgacgccttcgtaccgtgttcgaaaagagggtggaactggatcttaatctctgagagaatccatgtcctcttagtagtaggtgcggaatatgccaagctctcctgacgtggagcagcaggagtggttaccctgttagggataagggatctgtgcgacccccccggcataatcgtttagagctagccaccgtgctacggaatgacgcaaagccattcatctctctatccgaagaaaaccacaaggttctcatttttatgaggcaacgacgtacctgagttcagtcctaggacaatctaatccacgtttggtgcagataagactgactcgaaactaagttgaacccactcgccgagctcttcaatgggcggcctaaattgatccagcctaggatcattttagtagtttaggcactacctccatcaacggtcgttttgccaagacctta

SEQ ID NO: 2038 - DNA, 507 bp, Odonatavirus fabricii
  source 1..507: mol_type = genomic DNA
catccataacatgttatatattctttaattatcatatatactcattagcattattacttgattgtatataaccatgtttttgtaactacataactctaaacctaaccaccattgtagctggtattgattcttgtattaaaagttcattaatttgatgtgtgtcttttattgttcacgctgttatgcaagactctgacaacgaggtaatggtctaaatgtgtacaaacttgatatatactgttcctcgtgtatctaaataattaaactaattcattatttccatttatgttgtattctctttagagtgtcaagtcattcaagtcaagcggtagcgggaagagatcaaagtcctctaaaactgtaaaatcagggaaaaagcagaagcaagagggaactccccaaagggttaccagatcaaacaaatttgcggaaagtgcaagtgttctaagtacacttgaaacgttatctatcgcagaacctcctgtatctgccgcgcaacctcaaata

SEQ ID NO: 2039 - DNA, 507 bp, unidentified
  source 1..507: mol_type = unassigned DNA; note = unclassified Picornavirales sequence
ttttctctcatggaatagatgtgtagctctgagtagtggcatcgaaacccttgccgtaagttacatgataatttgaggctgtggctgataatagtgcagacctcttttaagtgtggactcgcaagacgatttcatgggcttatgcttaagagtagctcctgtagtagtgctctgactagccattgatgaaaccgatcaattattggggttgtgtactttacccacttaaggtacctgtggtaaggattagatggtggatcactaccggtcacgcctggcgagtaccaggtgctcattggagcataagaaagttgataggctctgtgaagcttgaaatcaaacccactgtgtagtgtagacaatatgtgttgattttgattatgatcagacatttaatctgtgaccgttgatacttcctacccactctaacggccttatgaactatatatagggttcgcaatcattcataaggttttatatattggattggctaccctacgatgcaac

SEQ ID NO: 2040 - DNA, 508 bp, unidentified
  source 1..508: mol_type = unassigned DNA; note = unclassified viruses sequence
aggagcatcgagcttgagcgagctcgttaaatatacgctcacgggtggttccgtgcacggattctctgaattgtgcttcagacccttttgaagttccgatctttgtatttagtggctgtttgtatattatgcgttcttcaattgttatagccatatgttgtgctagtgctagatgttaggtcaaatttagcactttatcttatgaccagcaagtttaacagatttagaaacgactgctgacgttcaaattcagcagacttttgcttttgatgatagtgagaagcaatttattactaccgttagagacggtgaggacccaactcatgattggggttcgtactctgatgttgatttggccagatggcttgagaggcctattttagcatcgactcatatttgggaggtcggacaaccctttcctcagatttatttcaatccttggtcagcgtttcttgacagccctagtgtggctcaaaaactatcaaatttttatttgctccgttgcaag

SEQ ID NO: 2041 - DNA, 508 bp, unidentified
  source 1..508: mol_type = unassigned DNA; note = unclassified ssRNA positive-strand viruses sequence
ctaggcacctgggcgggggttaatgagcactggaaataagaaacgcgagacaacgctttgctgattacgtataagtggagtatcggggagtaaaatcctgctgattacggttatatggagtatcggaagtggcaattgctataaactgggtccggagtaaacaggctgtttattaattttacgttcaaacctattgcaacaattccttacaacaacaaaaagttaaataggaaacttgaaaaattcctatcttaataaagtatattttgttttgttatcactacccgttttaattaataggctctgtaacattcataatagaaatatttcgtaatgataattctcatcaaaagatatcgatgtaaaatgtatctgtagctattcaattatattaattgagcttagcaatcgttaaattattataatttaaataataatttaatctcaatctagcagattgaaaaacacaaaagcataagtgtataaatatgcaaacgatggaagaaga

SEQ ID NO: 2042 - DNA, 508 bp, unidentified
  source 1..508: mol_type = unassigned DNA; note = unclassified RNA viruses ShiM-2016 sequence
agctatatacgcacaagttcttttaaatgatttaaacgctcaatttggactagtggacaggatgctctatgcaacaagttgttactactcaggactttaaaaccagagaagagtgtttacacatgtagcttttgaacgggcgcatgtgaataaaagttcagcttctaatcaatctaacaatgtcataccagagagggatgctctggaagtatgtgacaatattacatcccttgctattgacggcgtagagaccacaggcgttactacgttcgctcaagaggcttgtgagcaagttgacgttttgggaaagttctatgttcctactagcgtagccactttgcagccggagttgcaggaccttaaagaatattttcgtcgtcctcgcgttattgcccagggtccttttacgcttaacacgcgtaataatccagttcagttgaatttttcagattctaatttcgagacgttctttccaggtgcacgtacgcgacttttaggggtttatggc

SEQ ID NO: 2043 - DNA, 508 bp, unidentified
  source 1..508: mol_type = unassigned DNA; note = unclassified RNA viruses ShiM-2016 sequence
tgtgtatgctacaacatacacactcagtttaacggatctatccgttaaatagtttgcccacttctagtggtcgcttttcaccaggacttgatcctgtcgctttttaaacaacaaaccaatactgttttataatgacgatttgatattgtgttttagttagacctgcgtggttcattagtactgccttgcgaggaactggaaaatgaattactagtcggaccttttattaaccgctgcatgcaagttatagatcctaacacacaatatgcgagaaggaccaatctttggattatgacactgattagactgctggaacgcgtttcaggctctccgaaagatatagtacggagctagtgaaacaagtctttgtggagcgaaattatctctcactgggattggcactctcagaagcgtgagttcctttcacataagacgtatatctgggaagaaaagagcatcgataattggctctgagtttattaccagacgaaacactttttctgctatc

SEQ ID NO: 2044 - DNA, 508 bp, unidentified
  source 1..508: mol_type = unassigned DNA; note = unclassified RNA viruses ShiM-2016 sequence
tccgatctgcaacaacatacacactcagtttgacggacctatccgataaatagcttacccacttattagtggtcgctcttttaccaggacttgatcctgtcgcaagtacaaaatattattacctacgtcttacgatgatgatttggtattgtgttttagttagacctatatgatttgttagtactgccttgcgaggagctggaacgcttatcattagtcggaccttttattaaccgctgcaagcaagttatagatcctattgcacaatatgcgagaatgaccaatgactttggaatatgacgctgataagattgctatggccccgttctaggcccccgaaaagttacagtacggggctaatggaacaagtctttgtggagtgaaattacctctctctgaaattagcgacttcagctgcgtgagttctcttcacattgtacgtatatctaggaataagggctttataggccctgacgtagtactagacgaaaaactttacattgctacc

SEQ ID NO: 2045 - DNA, 509 bp, unidentified
  source 1..509: mol_type = unassigned DNA; note = unclassified viruses sequence
gggatttttgaccgcccagatgagttttcatcgaaagtttgtcacacatgtttgatgggacacaatccatccccttatagttgactatgtactacagtcgtaattctataagagtcttgcctgctagtgggttcacactagttccgttgtagagtttctgggatcttcggattaaaaccccatacccctcgtaagtcaaaatagtttagtctcagccaagaaagaagctagatatactattagaccactgcgtgcggcactgaaactttgcagacaagatagtctgttttaaatcgacttattagagtcagagacgcctccgttttggcctctatgggtgatgtgccctgacacctccgtctagtcaacgagagtacaatcgcatcaattttcttacacataacttgcctgtttctgggctgccctctctcacgggccgaatatcatgtattcgaagtcttgtgtttgccgggtcaccaaaaccggctaggatttaactccgaaaagtt

SEQ ID NO: 2046 - DNA, 510 bp, unidentified
  source 1..510: mol_type = unassigned DNA; note = unclassified Narnaviridae sequence
ttgaggaagagtggaagggtgaaccgaaagtttttacaaggttcaccccgtccttcttcttcctgcccgtggtcgtcagtcttggcagctggagtcacaacaaatgttgactccagtctggactggccacgctgcaccaatggtcgggacaggaagcacaattgtgctaccgtcttcgatgagctgtgcggcagcctcacccgtgatggcacgggagagggcaaattcaaccttcagaagctgagggctgctggcatccgtcttcaagacgttccagcctcccttagcaaggttgcatttgctctgactgcgcagaagaaatgtgtatgtcagcatgagtacgactcactcacagactcgctttactttttgcgggctctatgtgagaatcttcttgatgctgattcaatatttcttcgtgctaagacatccgatttcgacattttcttatccacactcttgaagttgaacaacgtggaaagagtcgcagccattaagtattggactgcg

SEQ ID NO: 2047 - DNA, 510 bp, unidentified
  source 1..510: mol_type = unassigned DNA; note = unclassified Picornavirales sequence
tagcgcagacgcaaacatagagtgtgcaagtttattacttgcacactctatgtttgcgtctgcgctattcgaatctttgtaagagacccttattctggtttggaaacgcctgggcgtctgcatagatgtgcagtcccttttatggagcactcttatttattgcagcttaattctatgattaaatgccatcaagtctaactatggcattttacaactacccgtctttattgataggctcttggttatagaattaattaggcctcttttgatgaaagaataaatcatccgctatttataggaagcgaagaattttctatttatagttgtagtgtcattcctatttaggatacggttggacacataaataactaatcttcttcccagcactttggtctataccatctaccccttagtgttgtgtaaaattatggtggtcaaaataacatcaacaataaagaatctgatggttcccagtctacctctccatcacagattcacaatcccgataaa

SEQ ID NO: 2048 - DNA, 511 bp, unidentified
  source 1..511: mol_type = unassigned DNA; note = unclassified dsRNA viruses sequence
aatacgttgataatagatactttctatgaaagtctccctcttttgcattagccctttcgtaactgatcggtctaaggcctgttcaaggctcattgagatctaaggataaaaattcttagaaatattaaagattatcgggggaagattgcgaggacaagtgcctaggaaacacttgaaacaatccttgcaataagaaacctacaaagctgtctataggtatgtgctcagactatagactaaagtataacactgctccctgagacggggggtgtgtccatatgggtaactgtatgtgatgctaacgaagccctatgcggattgcttgaagcagaagcgatatgatggatggtgcaaacgtgccgaaagcaaaattatttagttttgttattaggtgtaacgatcgcgtgtatactgaagagaagctctagccggtacgatctccttggacactaatgcctttaaataagttaggtgggggcgagcccctttggtactgaggccgcatgtaatc

SEQ ID NO: 2049 - DNA, 511 bp, Echinoderm berhavirus
  source 1..511: mol_type = genomic DNA
aggcccagccttgcggcagggggtgctggcaccgcgggtattgctcttgctcattgttgaaaccctgccccaacccgctatcaaactgagtctcgtgaacttacctaggcaagcgagtaattccactatataattgtttagaaaatgtatatgtctctcacaagcttattgatgattgtattagagagacagttaggattgattatgtgaaattgagagcctgagatggcatatgagtcatctatatttggaaatgtattatattatcgcggttcttataactagtaggctgtagtgtactgtaaaatgtatgtttgtaggtctgtagcgaattgaagtgaatcaaattatgatctaaaaagccacttaccttattaatactggcatgaccacgtagaatgtagaacacatcatgtatatccataatgtatattagtacttaccttctgttgcttagaaaaaatcgacaaacacaacaacgtctcttaaccagactcacaggtgtcacatt

SEQ ID NO: 2050 - DNA, 511 bp, unidentified
  source 1..511: mol_type = unassigned DNA; note = unclassified Picornavirales sequence
cggggtggttggaactcacctgtacggtgagtgtctagctgccctgccccttcccctgagccggggttctttggctcgtccctgatctttttctatctcccctacttgtttgattctccccgactacggagctttttggcataaacttgttatcgatgttggattgtccgttaactgacttgatgggggacatagccccgggtgacctatgtcttgaagcgtttcctcacatggattcaaagtggtgctgaaatattgcaagcgtcgtttccatgtgtgtagacgtgaataggcatagttagcccaactgcaatcacctgaaagcccctgaggggttattaaggtggactcacaactgaagagctggagtgggcgctttacggtacatagcattgctctacctataggaagtgtctacatggctaagggtgggggcccttagcttgtccagtgctgggtgacagcctcgtgccgcgcgtcagtttgtgagtataagcggctgtaaaccgcc

SEQ ID NO: 2051 - DNA, 511 bp, unidentified
  source 1..511: mol_type = unassigned DNA; note = unclassified RNA viruses ShiM-2016 sequence
agaatgatgagcgcggaaaaataaaaatattgacatatccaacgtgtacgcagtaccattcgaaaactcgactctaaagttagaagacataccacgaccacgaccacgattttgccactattttcttttacaagcagcgtaatctagctttgcatttttattactattattgcttcaaattaagccattagaaagtaaatatttagaattattgtatctcaactctatacatggaaggagctggaattgttcaatactatcaggaaaccaaaattcattccatctctccagcccaggccacaagtctacaaaacgcgctagagggtttgacaagtaacagatcaattagggttagggtcaattctgacctcgacaaatacattactaatttcttaggaactcccagtccgggagtaaatcagtcaactgtgtcaaaggttaacgccagagcaagagcagaacttgctttgaactacgacccagttaggtggatcagctcctacgaggcgct

SEQ ID NO: 2052 - DNA, 512 bp, unidentified
  source 1..512: mol_type = unassigned DNA; note = unclassified Marburgvirus sequence
gtggcttaaactagcatgagtatttccaggtcaaccacataataatgttggaggcacagtacattatagttgattatcctgtataataaaggatatacttaccctgatttatatttactggtataaaatagtagcatcatcttatcaactagttgtcatacaataggctgttcctataatctgatggtgaaagtataagcttgtagagttaccatgagtcacaactgttgtatattgtccaaaatatatcttgtgcaagtagtgtgtgcttgaatatgctgatgtaatacacactaataatgattgattaagaaaaatcaatgatggatattaaatgtccatcaagcaggtgtcgtaaaatattaggggtttcaaatgctgccagacttactaaattttacataggattatataattctcttcgatatacgttatatctttagcaaagtaatgaaaacagctttatcatgttagacgccaattattcatcttaagtgaatcctttcttcaat

SEQ ID NO: 2053 - DNA, 512 bp, unidentified
  source 1..512: mol_type = unassigned DNA; note = unclassified Picornavirales sequence
tttttttgttgctcgaccgcctaaacgaaggcaaagtgctcgaccctattgcggttgagtatattgactcagtgctagagcgccactttttgcgctacttgaaccgtctcaaccttacgaggtatgagaaactcgtgtggtccggatcatatccgtcctgcacgatcgagtacttgttcctcaaggctcgagcgaaattctatcatgacaatgatagagtctcgttctacgaggactgtcttcgccgattggaatcggctaacgtctactccgtcctgcatgacgaagaatgctctcatgagcccaccgttgacgtcattgagacgtgtgccgcgcacaatgttgtgcgtgttaaacgagtccgtcccgctatttgggatgatttcactcgtttagtggaagaacatcccgttcgagctcctgctcctattcgggatgctacgttgctgcgccgtctgcgtagtatcattagtggtctggtcgcccaccgcactaatgatgtttatgagggc

SEQ ID NO: 2054 - DNA, 512 bp, unidentified
  source 1..512: mol_type = unassigned DNA; note = unclassified Picornavirales sequence
gggggttgtgaccttcccttggttctctttggacgtaagctatacgatacatgcgctctttgttgtctggttttgtcacttttgttttgtgttatgtttccttctttctgggtgttctagcaccacccaagtcttagcgggttttccgattctatattaagacagatgctagctggctccgtattcaatccatctgagcctgtgtaaagttcttttgatttcttgggcttgcttacaccttgccaaaggtttgttttgagtggcggtggtttggccacgtggtgacacgtgcccccggacgtactatcgctatagtgcggaatctcattaaccaggaatagattgaatgttaagcaggaggtgatgttttgatgcgtagttgggcagctctttggacactagggaggtaccccttatgggatctgactctagggctatgaccatgatgctgcaaaaatttgtttccctttttaaaaacacacgaacacaacttaatgaaataacgatttgaa

SEQ ID NO: 2055 - DNA, 512 bp, unidentified
  source 1..512: mol_type = unassigned DNA; note = unclassified RNA viruses ShiM-2016 sequence
gcaaataagaaacctacggcctacataaatattaatgcatatctacaacataatagacatcgcacagttgcgcttaagttccaggtctttgcgcgtgtggctaggggtcataatatgataggcattgagacagtccaccaacctatgtttgatatggaacgattccctatggtgaagtttggaacggtggttgagtatatttgggatagacatgttatacgagcagcggtgatagacaaaaatgattttgtcaatgagaacgacttcaatactatgcggcattgtgctatacaaagaagtcagtgggcaggaatttgtttgcccaataggtattatgctgtaaacatgaattttgatatgttgcctattttcgcagaactagatgcacatcgtactcgtgaagtacctaaaaatgacgcagcacaaccaccagctccagctgttgcagtggcagataatgctgaaacagcagaaatagaacagaaagcggaaaactaatttgggctaatgtc

SEQ ID NO: 2056 - DNA, 513 bp, unidentified
  source 1..513: mol_type = unassigned DNA; note = unclassified Mononegavirales sequence
tatgttcaatatatataatagcgcaagtgcctctctcttttaagaaaacccgccagtcatacatcaccagtgaatgctgataattgcaaggatgaataattccatagtagttttcagcattgtcctcattgtaggtttactcactggaggggtctttatcatgggtcggattacatccgcaggactccagttgtcttacacccctggctcactcttttattttgtattccctaatttttcgactatggccatagaggcttcattagtttacaaagtccttatatttttcgtatcaatattgatcctctctctcctgtcgatcatctatctgatgcacaaggagataatatctacgataagatgggctagtgaaacatatagagagtcaaggatgtttttgcaagcagcagcaaggtcagggcagtcaaggggaccactgcctgatttaatgagaccctaagtgtatggctcagtaatcttttatttacaaaaacccgctagtcaaccatcata

SEQ ID NO: 2057 - DNA, 513 bp, unidentified
  source 1..513: mol_type = unassigned DNA; note = unclassified Picornavirales sequence
tttaaataagagtgtgcaagtaatacacttgcacactctaagttttcacatgagatgaccgattgtttggaattatatttcactcaattggaaacactcttgtgtgtctgcttagatgtgcagtcccttttatgaacacctcttatttaaagtattcatttgttagaatttatacatgcgccatcaagtctaaccatggcgtttgttacaactacccgtttgttaaataggctcttggttttaacatttgaatgacccctttgttgaaaggataaatcaacctctttcgtcttgaagcgtggagtttcaagtgaatgtagtagtgtcattcctattcaggatacggttggacacgtaaataactaatcctccacccagctctttgaactataccatctaccactaagggctgtgtaaattcatggtggtcaaaatgataatgaaaataataataatcatgattcgaatggttcccagtctacctctccaagttcgattcataaccccgataaa

SEQ ID NO: 2058 - DNA, 513 bp, unidentified
  source 1..513: mol_type = unassigned DNA; note = unclassified RNA viruses ShiM-2016 sequence
cgcaagacgcatgttcagtattgtttttgtatttgtattgtaggtctaagtccttggactttgagttataattttataatgcaaaatctttttacgggtgagtaaacacctcctttttggtaaaaaatcaatcatatttaatgatttaatttagtcaccttttaggcgatactgcatattgttccagcaggatagtattactattgatagtaatagttctactattgtcgaaatgaccgtatgtatagtacacatcactataagaaccggtaacctttatggtaagggaacacaggaataccgtttggtacccatattccacgcattgaagacaacctcattatctgatgatatgcgtgtaggagtttttctttcctccttgtttataaaaacctcactgagtcagttccacatctgttaaaaatgtgggcacaactaaagaccgagttgtgtagttaggccttttattttatttttattggaagcaatagagcttcccagacaaattttaag

SEQ ID NO: 2059 - DNA, 513 bp, unidentified
  source 1..513: mol_type = unassigned DNA; note = unclassified RNA viruses ShiM-2016 sequence
gggaataaatattccttacacaggccttaagccttctagtttatattgtactagatctattccggtatagtatagactttaggtatgatagcgaaacccgtgagggtacgtttaatatcatagaggtctatcttcagatactacgccacgtatttggaggctcataagttcttagggcttacaaccctacggtctttggcatacattgtaaaattacaacataagcttagatcgcagttaccagcgatatctcttcggagaaaaggtaacagaactgtggtgaacgatgttaacaacgtagttaacaacgatgtcctttataaagagttcgtaagatcctttggtaagatcttacgactttataaagattggaagtttgtccaaaaatttgctcgtcggattgaaaagaattacttctctacaaccgattacaaattgaattttggacagatcccaagcgaccgagccattaagcgtgtgaagaacacgctgtgttggtgcttttcatatatt

SEQ ID NO: 2060 - DNA, 514 bp, unidentified
  source 1..514: mol_type = unassigned DNA; note = unclassified Hypovirus sequence
cacagcctgttaaatccttcaggtggccccgtggggtctaaaggagtggatcgtcctacactttcagtaggcttcaaattagacgtgttactgtctattgaaggtgggtaatttaccgatccggggctatgcccgcgagctttgctcgagacaattgtcgtgcgttccgtgcgtgaggtttcctcgtgctttagagcgtgactttgtcatgttataatagtcaagttgtgttacgcatattaatattaacacaagatgagtcccattctagcagtcatgggaagcgcatttcaaaagaatgctgtctaggctggaatggaagaggccagttggggtcttgacttgggctgtacccaagaactaaccaggattgatagggtcaggagtagggtgtgttctaaccaacatcatctcctatctagtcaccttgaattgagtgggtaaaggtgacgaataaattccactctccaaaacaaatagtttgaaggagttacctgccgtctcccaaaaaggc

SEQ ID NO: 2061 - DNA, 514 bp, unidentified
  source 1..514: mol_type = unassigned DNA; note = Botrytis cinerea fusarivirus 1
tttggtgtgacaaatcaaccctgaaatagggttgacgactcgacacgacaacagtttcttctaagttgtcatgatttagtaagtctaaaactgttccacaccgaatttcaaagaaattttgaaaaacgatacggaaagttcttgaattggacaaggcttttcctgtcataaggcaagattgtgcttgtgtgcgctctgaccgaaccggtgggcaaggactggagcataggaaggaccatttagtatgggcttagtcgggcacaagtgaaccgtggggtccaaaagactgcttaccggcttgtgcttagggcttagtcctgaaatttgcgtagtaccccagcttctgttcttacctacttaaagggaaatagacgtggacactagactacatggaaagacatgttgacacagaatgaatagtattctacaaccaacaaaactcaacatttatgaagacaccagacaaacctgaacaagtaattatccgacacccatttagtaattttagtgaaag

SEQ ID NO: 2062 - DNA, 515 bp, unidentified
  source 1..515: mol_type = unassigned DNA; note = unclassified dsRNA viruses sequence
ctaaggcaaagtccaggcacaaaaagcaaaagccgagagctcatcaactgaacaatagatgcttggattccctttttgaacatgaatgtatattgtgcactgatcagatccttgttgggccaaaccaaattgtgattgaccaggataatcacctattccgtcgacctattccatcgacctattcgttttgctcattgttcattctgatcgaggctcccgcgtaccgcgttgtttgtatcggtgtacgcgtccgtgacaatgacggtcaagcaaagcgggccttctataaatggtacttgagcgtactttttccctctttgaaacccacgaacgtgactgagacgacgagcaaacggtgcacttacctctagtcgctccagtgcatttgtgctttcactagacgttcctcttcttcctacgcgctatcttacgggcttcttcgcaatggatcacttccaggctcatgcgccctgcgttgggagctcttccgataacatccagcaagccgatgtgga

SEQ ID NO: 2063 - DNA, 516 bp, unidentified
  source 1..516: mol_type = unassigned DNA; note = unclassified RNA viruses ShiM-2016 sequence
gtgtgcatagctatttacttagctatgcacactacattggtatttgtcagtttaatgctgacacattatgcaactacacagtcgcctttatgatatttatcgtttatcagggctactacatagtcgccttataaacttcaatgtttatcatattgtatgtttaattactgatacttttaccggcttaaaagagccgccgacatttatttgtccgaaatcttttttcttttttggtacgcctgttgaggcatttaataccaaaaccattttcaaagagaggtacgacagttctctgctgtcttactctataaaagcctaccccaaagagtagaacttgagggatgatatgagttttgcgctacttgactgcgcttattattaaagcgtcaagccacaacctacctgtcagttaattttcatgaaattattcggcagggaaccgtagagtcgcgggtgccacgacttgaaaggacttgtccttagcatgcaccgtacaccgatgaaccttacgaggtg

SEQ ID NO: 2064 - DNA, 516 bp, unidentified
  source 1..516: mol_type = unassigned DNA; note = unclassified RNA viruses ShiM-2016 sequence
gggtactagacccgatgacggaatttcgctcatgccggccctggccggggggggcagacttcggcgcacgtagacttcggtcgcggactggtgatatgcgcaagagatattctagttaagtcctagtggcaatattgtcccgggtgctgccctgattatagcagccgagtaacctgctcgatcgttaagagaaatataaggaccggaccgcaagtaggggtcatgcataccgtcgttggatatgcatcagcccccacgtaggctcgacggcgcaccacgctttaaaatggtctcctagctggagtgtacgctagtggcagcttgtgtaggcttgttgtcgcgaccacataccctggtccttggtacaccgatggacccctggccgaggttaatggcggccccgcagggcagttaaatatatgcaggtaagctccagccttgagtgggccggtctgacatacgtgagtccgttcgtgcaccagcgttaggtgtacactacccccctacaattacatc

SEQ ID NO: 2065 - DNA, 517 bp, unidentified
  source 1..517: mol_type = unassigned DNA; note = unclassified Riboviria sequence
gtacaggcgcatctgagagaagtgttattcgcagttttacgtactgattacctggatcacagattcacggaaaggtcgttgctgtcataatagtgcataatcagagtttattgcaaggggaacgagagtgtaaaggtttacaacggttcgcccgaggtgctttagttttgtgtgatacacgctgagagaagctacatcagtgacgagttacggagtaactggacgagtattcattgaaacggctatatcacggtaaaatacggtgtaattgttgtgtccattgtggaccatcgagaaaagcggtatttgtgataggtcacggagtaaccggatcggtgtccaccgaaacggctgcgttgcgtagtatatagtgtaatcgtgtgttagtgtttattgtttatcattattattttgacaatattcattcattatttagataagcgttatcgtgcattagtatatcgattttagaattattttatattttataggcgattacgagcgttaagcccgcaaa

SEQ ID NO: 2066 - DNA, 519 bp, unidentified
  source 1..519: mol_type = unassigned DNA; note = unclassified Picornavirales sequence
ggtcggggagatgtgttcatgatcggttaacaccatcatggatcatctctccccgacctctttttgacccagctatgggttaaatagtacttttcttttctcttttgctttcttttgtgttttgtttgttttgcaacatataacaagcattttatcagtattagtgtctgcaactgtataacaagcaaggtggagcaatcatgcgagtatatctcaattgaattgtgacacacaagtgtgcactatgtggaataaatgccattttggccaaacctggttagccagaccagtagtaggacaatttggcacccttagtgggcgcgacctagatgctagggatgagcaaacctatttcccctgagtacaggggctctccttcacctctacattttggacctctttttgagtatcctcgatagaaggtgaagtgacggtgtaccggatggttaattgatctcattgctgggtgacagcccgctaggaccaggcagcatctttgtatggacctgtacatgtaac

SEQ ID NO: 2067 - DNA, 520 bp, unidentified
  source 1..520: mol_type = unassigned DNA; note = unclassified Hypoviridae sequence
gttgaaatccttacaggtgaacccgtctgggtcctaaggagtgagttaccacgctttcagtggtttgcatttgcggtagtgatgtgctactcgctgcaagcggttatttcttttaactcgtgcccttctcgtgggcgtggaagttatcttccgtgatcttttggatcgtggtttcgtttgaaaccgtagctacttttgtgtagctgtgacctacttcaggttgttaatttgtggttcgcctaccacgtagtgctacggcactgtacattctttactccgaagagtttaaactactatgcgtgttggtactcgtgatgacactgatggccgtgaccgtgtgtcaattagaggcttggtctatatctgttgtaaggaagtacctacgaacagattctgtctcggaagacctttattataaatttaagaccttcaaaaccataggcttaaaccatcgacccaaagacgctttcgaatgtgtaccacttcaagtcaatctttggtagggaggttataaatccac

SEQ ID NO: 2068 - DNA, 520 bp, unidentified
  source 1..520: mol_type = unassigned DNA; note = unclassified Sopolycivirus sequence
atcctgctgctggaattcaggcagctacagcttctacagctgaggctggtgctgttgcaaataaagcggctgatataacaactggagttgtacaaacagcagagggagtggcaggagctactcctgttggaatgatagcgttgattaactcaatgcttggggatgcaactgcagctggtattaatgcttcaaaccaaaatgcaatttcaaaaaattatatacagaattctatggcaaagggatctcaatctggttttcaggctggacttattaaagaatctgagttagctcatgcatctgtaactaatgcaggagctaaaataggaggcatagcaggcccattaggtgcttggtttggctctttgatagctaatgcaattcaagattcaactcctaaggatgattataataatttcaaaacaggatattcctttgatggcaaagttaatccgcaagatactggtttggttggctcaggaactactgctgacctctctggtgaaactaacatgacaacatt

SEQ ID NO: 2069 - DNA, 520 bp, unidentified
  source 1..520: mol_type = unassigned DNA; note = unclassified RNA viruses ShiM-2016 sequence
atcccgctctttagtgttagtacttgttacacactaaatcctattatctaaggtcaatgtgaacatgtttatatgaatgtgtttgtgttgcaaagtgtttgtcttaatatgatgaacattttgtgattattattgattattagttagttattgttagtttatataaacaaacattaggtttgttagttagtgttagctttgttttgagctgctcatggggctcacattcgtctaatgccgctatttaagtttgaggtacgttgatcgtcacctgtcaaccgctgcctattattacttctacacatgcgagaatagcgtttcccgagtagtgttgacgtatgtttgtttgtatactaacgatgttttttattttgttttctagtcctggtgtgtacaggaattcatcgcaactgtatctttgttaagggtacagcaatatatattatagtcaacttccgtaagaaaaccaacttcagcacatcccaattgtgctgtcgtaattttggaggaacactctaac

SEQ ID NO: 2070 - DNA, 520 bp, unidentified
  source 1..520: mol_type = unassigned DNA; note = unclassified RNA viruses ShiM-2016 sequence
actggaatgacgaagttagctactcccgagaatccatgtcttatccagaccatggcccggtagagcggcctgctgacgttatacgtcagcaagggacagctcccgtgtcaacgtcacctacagcacaggccactcctatggccccagcgacatccgcgcccgcagcgccagcttcgccaaccccttcccagccggagggaaacgcgagcagggcctctgcaggtgcggaggcccgtggcaacgccagtctgcaaggaaatgcacagagcggaaacgcttcagtaagccccgcgtcagcaattcctttggaacagcaggcgacagctaccaatggcccgacatcgatgcctgctccgcgaagcgtagcttccgtctccacgtcgaccgatttttcgcggcgcaagcaaaccgcaaagctggtccgattggaacccggagcatcgaccgcgttgagaagagatgccgtagctggaagtgctcagtaacccgctacaaagattttgaagaaaactttgaaatc

SEQ ID NO: 2071 - DNA, 521 bp, unidentified
  source 1..521: mol_type = unassigned DNA; note = unclassified Caliciviridae sequence
catagctgttatgctatgtcaaatcgaacctttaacatctagttctcactatctcgccttgggatatggcttcggccctctatctcacggttaggtagttctgactgattttttgtttacgactttcttggcttttgtctttaaaaaccatgtgtaactgtaagtgcccttatcgacaggacgcgccccacgtggaattggggaaatctggatcatgggattccgcctgcagtacggaaaagtaccgagtacttagtatgttctgtagtgccccatgtgaagggaccgcctgagctagagctacgggcttggaaggtaaggtaggacgcctttttggctatcctacgatcgtccggcgccgattgcgtggcctcgtgcccctctccggttccgccccgatgatgcaggatttccgctaggggtttgtgacgcctccaggtacgtgaggatgggaagcctcaccaatgcgtagtgctgggtgacagcctgccggctggcgcagttcagtgtggtatagccag

SEQ ID NO: 2072 - DNA, 522 bp, unidentified
  source 1..522: mol_type = unassigned DNA; note = unclassified Picobirnavirus sequence
atttattaatttatcaacacagaaaggaggaatctattgtggtttgtaaaatcattaattcaaaaccacatagtcactcagtaatcgccaaatcacagtggatgctgtgtactttagcggttgagtgcagaaaggaggtatatcttgacagatatacaaattaagtactggggtctcaaagaaaccggtcgtcacaatctcgctggagaaagacaagcggctaatgaactgaaagagactcacagacacaatgtcactggtgagaaagaaaccaaacgacataatcaaacctttgagggtgagacaaagagacataatgttgctggcgaaagagaaacgcataggcatagtgtcgtgctcgaaggtattgagaaaggtaaactcaaagaggttactcgacataacgtagcttctgagagaattgattctggtaaattgtccgaatccaaaagacataataaggttaccgaatcaatccagcagcaagatgcaaatacaaggcttcaagttgcttatacccaa

SEQ ID NO: 2073 - DNA, 522 bp, Orthohepevirus A
  source 1..522: mol_type = genomic DNA
gcccggcactctattgtggaacaccgtttggaacatggctgtcatagcacactgttatgagttccgcgacctcagagtcgcagcatttaaaggggatgattccgttgtgctctgtagcgattatcggcagagccgcgacgctgctgccttgattgctggttgtgggttgaagcttaaagtggattttagacctattgggttgtatgctggtgtggttgtggccccgggcctcgggactctgcctgatgttgttaggtttgctggccggctctcggagaagaactgggggccaggcccggagagggcggagcagctccggctggccgtttgtgattttctgcgaaagttaacgaatgtggctcaggtttgtgtggatgttgtttcgcaggtttacggtgttagccccggtttggtacataacctgatcgggatgcttcagaccattgctgatggcaaggcacactttaccgagacaatcaaaccggttcttgaccttactagctccattatatatcgggtgga

SEQ ID NO: 2074 - DNA, 522 bp, unidentified
  source 1..522: mol_type = unassigned DNA; note = unclassified Phenuiviridae sequence
gccttctcatttatataagaactcttcagtgatcaaaagatgtcagcatctgtgtgatatagcagttggactggaatcatttgctggttcagcaaaggagacgaatccagtttttaaagattaccatggtctttttcacataaataaattacctgctatcaacagcctggcatctcatgttccagagagtatcgaccttgctttcaaactaaaacggaggaaatttattatagagaaacttcatttgccaccagaacttcaagagacaacacaaagagagcaagatgatatgccttctgctagagcagttagttgtggtgttggtggtgggacaagaaatctggatttttaatattcttgagttgtctggtctggcattggttgtactgggtgccatactgctaactgatgtccccagagtgctgttgtcccgacttttaggctccaatcacacatagacggagaccacatttgaaaaataattactaatctcgtgtgaaattgtaattagcaatcatcaag

SEQ ID NO: 2075 - DNA, 522 bp, unidentified
  source 1..522: mol_type = unassigned DNA; note = unclassified RNA viruses ShiM-2016 sequence
ggggaacactttcccccatgctctattttaacctcatatacgactttgtatttattaaaggatttggatcgcaacggtcctcttcttttcttactacaaaactcgtatatgttgtatcatcaatcttatcttttcattacaactttacttatcactttatcacaaatttatttgaatgttaacttctcgaaggtatggcaaacaagaatgtgtgagtgtggtttcacgaataaagggtattaggtgcaagaatagcttaaagtatatgcttttaaaacggcctctatacacctagtatactggagtatttaagtatcaaagggatatctatgattataggaaatcgatatcaactggtgctgcttacttactttacgtaatagacttggtaactctattataggtaaaactcacggaacgctggatttcttaatggattcgagaacggacacatgatagtatttaacatcgatatgagacatgaattacctcatatcatcataattttcacttgaacaaacc

SEQ ID NO: 2076 - DNA, 524 bp, unidentified
  source 1..524: mol_type = unassigned DNA; note = unclassified RNA viruses ShiM-2016 sequence
atacaactgaaagcagttaaccccgattgaacgtcttgtccacgatacgtgacctgtgaccgagagaattctactactttgttttcgcattccgtcgctattattttcctatttaaagtaagaggttgcctagagcatttaccaggactctgttaaatagatgagattttgtgtgttgtctaacaaaacactcagggccaagtattccctctaaaatactaaaccgtcttaagtagtgagctatctttgattgtattgttgattatcaaccaacttccgcctttgattttagcccgcaatctgaaaggttatcagttataaaacctccgcgatcgacgactcaagacttgttcctctgttggtactcgattcgccgcccctattgcgagaattagaagagatagtcccaagctaatctactttgaagaatcattgtgatctccacctgtacttgataactaccagtgtattttgctttgattgccatagttgtttatcgattaaagtcctttaggtactcaacc

SEQ ID NO: 2077 - DNA, 525 bp, unidentified
  source 1..525: mol_type = unassigned DNA; note = unclassified RNA viruses ShiM-2016 sequence
agcgtgcttaacagcacgttgaaagtaaattgttcgaccagagcatgcgtaaaactgatgcctcttttgaggaccacaatctggcgaagagtcatattgaagtacctctaatcagtgggaggagcccaatagcgattctttttagataattgaaaatggactttttatctcgcttcttcgcgcgagtaataaacacgaagaaaccaaaattataaaatttttaaaaatagggtcgcaggcttgttacctgcaaacacattatttagaccccccaaaaatagaagctccgtagtttgtccgaattgcggctcacttggtcattaagaagattccctgaaactccgccaaaagcgattgtaacgtaaaggaattatttcgagaaaccgagttgaggtgtgagataacgatattctatgccttccttcttttcccaacaagaagataaacatgttgaggaccttctgaagtggttatcttcagtgacagggtgaaagcacccaatccaaatttaacattttcttaatc

SEQ ID NO: 2078 - DNA, 526 bp, Mivirus boleense
  source 1..526: mol_type = genomic DNA
cgttagagatgagttagacggggttcttcagaaggattcagagaaatttgcgtatgatactctgactcatgtgctccacatagtgcatagattagcaaccatcgaaggattccttcttattgtaacacttgttcaaaaaggtgaagtaagcgttacagccaaacactgtaatgacggctataggagcttcatccatagcatagctcagcgagttgatctgagagccaacatggcagaacatcctcagggtgcctttgagtacaagggagagaccatacatcctttcaagcattggaaagtagggatgagatggggtgtccaagcaatgactatttcacgtcgcttgtgaggatactgatgtatatatgtaaatatatttagcattagctctgtaatcatcttatcttatatccatgtagtcaatattttatgcatatctcgttcatattcactcactgtattaaaaatggagacaggattcaattgatcgatttttgagcagatacactcttcctcagagatcatc

SEQ ID NO: 2079 - DNA, 526 bp, unidentified
  source 1..526: mol_type = unassigned DNA; note = unclassified RNA viruses ShiM-2016 sequence
gggcgtgacctacgtcctggtcttcattgaccgcaccaaaaggatctatatattgatctttcacgaatatgacggtaattgtgaagtgctatatatagtaaagttattagcgccatgtgtaggcgtgaacgcgaccgtcaataacacttcagcgtgcttgagcaggcatgctgtcgtacatagattgctcgccgctatcaataacaataataacaatgacaatacgcttgttggaaatcgttctgccttagaaactgaacagaataccacatttgtagaagacgcacctcttaccattacaccaaatgttgtagtgacagattccacttttaatgacggcgctgttgacaacgtggctttgggcgactggttctccagacccgtacatgttgccacatatgtttggaatgagggtgcactcttggatgaagttctattgccttggtatgagttttttaacattttaaccatcaggaataagctttttggatattcacgtttgaggtgcaaccttcatgctaagttc

SEQ ID NO: 2080 - DNA, 526 bp, unidentified
  source 1..526: mol_type = unassigned DNA; note = unclassified RNA viruses ShiM-2016 sequence
cggaaatgcaattgatcaggactgccgagtatataccaacgcaatatcggttggataggtttaatgagtttttcaggactggggacagcagctccagcgcggctactggccccaagaactcactaaacaaagtgaatgttgtgcgcaagtgcctctcaaaacgttggatagtaggcataggattattagccatggcaagcctggtcattttgcgaaaaccgcagttaccgttacatatcccaacattatcgcgtatcatgtaaatactcatagtagttgttattgtaatgaattagttagtatatataatagacatttagttgataggagttatattaaatatgataagttagctataagtaagggctttgggttagttgataagttttatagcaatgttaaggtacataaacttagttataatgatatcataggggaatatactggtagtaaacgtaggttttataagcaagcattatataagttaattaatgagggttttcagcgtaagtttagctatgtgact

SEQ ID NO: 2081 - DNA, 527 bp, unidentified
  source 1..527: mol_type = unassigned DNA; note = unclassified dsRNA viruses sequence
tttggaactcagctaatacactggtggctgagctgaggttccaccatctaattaaactactcaaatataccttcactaggaataataaattatatatatccctcgtggacgtgattaacgaagtagcaggccacacctttaaattgagctatttagatgataaacagaacttaaataaaccgaagtttttctttgattacgatactgttgcgcgtaaacacaactttaataatgaacctactgaaataaatggcgcaatattacgctggatcttcctacatcccactcctccaagtgtatatgactacttaccaaattttaatgaagatatcagattagaggattccattcaagttcttccagcacgatcataccttaatctagcaagtgtgccgtatgttccaccagaacgtttaggtgacactgactctaaaaatgagtatatagaacttgaccctcacactgtgggcatagccgttaagaaacagaattcagtactcatagaagaatggaatttttatcataat

SEQ ID NO: 2082 - DNA, 528 bp, unidentified
  source 1..528: mol_type = unassigned DNA; note = unclassified Alphavirus sequence
gatcgcaagcagagtgttgagagaacggctaaccggatcaccatgtgcagcattcattggagatgacaatatcgtgaaaggagtcaaatcggacaaattaatggcagacaggtgcgccacttggttgaatatggaagtcaagattatagatgctgtggtgggcgagaaagcgccctatttctgtggagggtttattttgtgtgactccgtgaccggcacagcgtgccgtgtggcagaccccctaaaaaggctgtttaagcttggcaaacctctggcagcagacgatgaacatgatgatgacaggagaagggcattgcatgaagagtcaacacgctggaaccgagtgggtattctttcagagctgtgcaaggcagtagaatcaaggtatgaaaccgtaggaacttccatcatagttatggccatgactactctagctagcagtgttaaatcattcagctacctgagaggggcccctataactctctacggctaacctgaatggactacgacatagtctagtccgccaag

SEQ ID NO: 2083 - DNA, 528 bp, unidentified
  source 1..528: mol_type = unassigned DNA; note = Yongsan picorna-like virus 1 strain 16-0061/ROK/2016 putative1 sequence
ccagtaggtctctaatccgatccaatattaccgcgcacaaagtcgaaaacagccttataacaagactccaagcacttcttcttcgagggtccaacttgttttatatgaaacaattgtacctttccgacgcgccaggtcgaattcggttattcaggaaactactacaccaccgtcaccgtgttcaagcgagtcggaaaggtacaattgtttcatataaaacaagttggaccctcgaagaagaagtgcttggagtcttgttataaggctgttttcgactttgtgcgcggtaatattggatcagattggaagacgcaaggactggactccaataagagcagtgatttgaatgctgatgtcgaggataatgtgcaagaggtttcgaaggaagagaatgttatcattgagggagcagaagtgagtactgttgcaagtgttccccgatcccaattgcgtgaccttgtggctttgtcaacaacagagaaagtttacacatttgctgattcttcttcatctgtagttggaagatgg

SEQ ID NO: 2084 - DNA, 529 bp, unidentified
  source 1..529: mol_type = unassigned DNA; note = unclassified Salisharnavirus sequence
acgcatccctccatgcggggtcgatctgcatgtaaaaccaaatccggctatgtttgtatggttacgcacgccaatagaaaagtttgttcatttatcttttctggtttgacgcttcttacataagactgttgtatggcaatccttatttagggatgggtagtcgcccgcaacaaatgatcataaattgtaagattgagggatcttgcgatatattatttatccccttgctcaaattacaaatgtaacgctcaccgagggagcgcataaatctcgggaccaaacagtgttgtataacgattatgcaaataattgggagtacggcgtcgacgcagcgcaagacccaacgtactcattgacggatctcaatgatgcatcacttgaacattttttctcacgcccagttaagatagcttcttataactgggctacagggactgctttatttcagtccgttaacccgtggactacgttttttaataatcctcgggttataaatcgcatttctaattttaaccttattaggtgtaaa

SEQ ID NO: 2085 - DNA, 530 bp, unidentified
  source 1..530: mol_type = unassigned DNA; note = unclassified Picornavirales sequence
ataaggtaagttaattataccttgtactttattgattatttgtatactatctccattttaaattattgatatgttgtgtgtgaacccatattgatatttaaataataaggatagatatactataattgatactgtatgtaagatttaacgtttaaaattatacttatcttttaaaacacccaaaacttgtatgaaacgcaagtcaatcattcaattagcaaactacccgtatttaatataggctctttgttgattgagtaattgttgttcaaatgaacacctatttaagggttgattaatttcttaatgtgcgtggtggcacctttaaatagtagatttccgtctttctctattcagagtacttttggacgttaactaatgctccatccagtcttgaatgtatgataattaaactcaagattgtgtaaatttatcttatcgcaagtacatcaaataaaatttatgaagaaccagcaaaactcgacgataatttcgcccctgatcttagtaatgtaacaaatactaatttt

SEQ ID NO: 2086 - DNA, 530 bp, unidentified
  source 1..530: mol_type = unassigned DNA; note = unclassified Riboviria sequence
acaaaaccgtcattccaaagaggaagacaacctcactaaaaaattacaagttttttagtttgttcgagaaacataccggcgaaagaaagttgggaaagtttctacttgaacagacggaaaacacatataataataaacgtaaattaccagatgcgattgactgtttcaaaactattcaagagatattacaatctgttgatcagcgaagaatcggtattaatccaactcaactggaatattacaaatcaaccttaagacaaaaattgaacggctcattgaaccgaccatttatcgtagcccatagtggtttcggtaagacgacgctagctaaggaaaaatggattttggatatagatgattacatcccaaaagaagtatttactgtgcaaaactcgtcaacttcggcgcctgagttgattcttcaaaacgaatatatttttaactacatatgtgcatcatctggtgtaggtaaatctcacgttacaaagtttcacaatcaaactaatgtctttatcgatatcgatgaagtc

SEQ ID NO: 2087 - DNA, 530 bp, unidentified
  source 1..530: mol_type = unassigned DNA; note = unclassified RNA viruses ShiM-2016 sequence
tgatatcatggcagtggctgcggcagcaatgtttggaggtaatgtgttgcaaggtttaatgaactggggtatgcagaaagatgttaatgcacaacaatttggatataatacacaactcattaatcaacaaattaaaggtcaaatggcagtgaatgcagttaattatcaaaatttagctaattatcaacaaacaatggcgagatcatctggtgctccagcttatatgtttggaggaatgtctagtgggatgactcccaatattgggggttatcatgtaatgaatacaggtggtggtgcaaattttatgactggtaattttgcgtggacaatgcctgttggaggtatttctggttatacaggacaaggacgagcaccatcaactgcagatgttggtacccaaatgggtggtatgacggcgtcaactggaacaaatccaatagaacaccaagattaaaattagtctacctatggttcctaattcgataatagatggcagcaaataaacaagaaatcccaaaaagttatttatc

SEQ ID NO: 2088 - DNA, 531 bp, unidentified
  source 1..531: mol_type = unassigned DNA; note = unclassified Robigovirus sequence
atgagccttaggcctccaacggattttggcaagccattactgtttgcggctgccggcgtctctttggccctgctcattgcagcttacaaaagtcactacttaccacccgtaggcgacaacattcattctctaccacatggtggtcactactcagatgggactaaaagcataagctacaacggtttgaattgccaacagaatcacagccagaacctcttatcaagcaccagcaagttgatcccgcttaccttagttttcgttgtgagctttttgatttatgtctccagtaaatttggcaataggtctcctagcattcagcattactgcattcatcatcgctagtttcaattcaagtcctagtaatagttgcatggttttgattactggcgagagagcgttagtcaccggttgtgaaataacaccagacttgtctgatcttgtcaaacagttgaagcctcattcacatagcttaggtttttagcactaatactgatttgtatttgtgtgtgattagactacaattcattttaa

SEQ ID NO: 2089 - DNA, 532 bp, unidentified
  source 1..532: mol_type = unassigned DNA; note = unclassified Closterovirus sequence
aacgttgcaatcaagtattgtataccccgattcttctttcgtgtttgcagatggtagctcactttcacccagtcaaatgcgcgcttctccttctcaaagcgctgaaagagagtttgcttaccttctacacagcgaaacgctttttaaatggtgcgcaacctgcgggccttcaatgcggtctgctctcagtgaaattaaccaactcggcaaatacagagaggatgcgaatatcgaagtcgatcttaaaactgtcgggtgtaagtatacaatcgatcgaattagagatttccttaagaatagcaacgactcctcgaacgacgcggttgaacacagctggagtttatctaactcttgcggtgaattagttgatcccagtgacatttcgcgttttaagaagctggttttcggaacgtcatcgtctgttgacaacgatgaattcactgctgtaacccatattcgggattatctagcttactgtttatctttagtcgataggtttaatttaccctcgcttaagggtgagaaagaacta

SEQ ID NO: 2090 - DNA, 533 bp, unidentified
  source 1..533: mol_type = unassigned DNA; note = unclassified Nodaviridae sequence
tgtaaagcgccacggcttcgccgtttagctttccccttttggttagagcgatgtctatagcttgttcccttggttgcgggtaacgtagtgatggcaaagttggccaactgggattactggcgtacgatgtaacagctggatcgtactgggctctgggatcgaccgtctctcttgaggatgctgcacgcttcgcgcgttagggctagagagagcagctcgtctagtattgtgcaatggtcttgccttgctagctaaaaccaacccgaatttgatagtacgtgaacgcccgcccattcatagcgacaatgataaactttcaagccctaatcactcttcttcttcgttttgtttccttggtttttgatttggcattcttagtgcttcgttatagttttaaggctcttatagcccttattaggcttggttggctccttttgcgcctaccccttcaagtttgtctggccgtagctcttttggctttggccgcagtgatctcattagcaaccgcccagcataataccagctggactgac

SEQ ID NO: 2091 - DNA, 533 bp, Drosophilid anphevirus
  source 1..533: mol_type = genomic DNA
ccttaaaaacaagtataaaatatcagcctattaattacctatataaaaattataactaaaacattatattatcagcaatattaaccccaagaattaataatcttaaatcgtaaacatataatcttaataaaacccgttgagtctagtcacatatctgtaataatacccaaaattaaatactatattaagaaaagagaatgtatgagactaaaatcatgtgtccctattgtggaatgatgatcaatgttaggataagtactaaaactgatagtaatttttcaaaaacattagtcaattgtaggttttgtaaagaagaagtaaatatagaattagtcacaactgggaccatagacagtaaagagccagttggttcaaacaaaacagacaggtaagaatcactcctacattatggtataaaagatgctactagaattccatccattttcttataaaatctttaatcaataaaattataatcaagttaatactaaatctttgagtcttgtcacttacgaatagaaaaacccgttaag

SEQ ID NO: 2092 - DNA, 534 bp, unidentified
  source 1..534: mol_type = unassigned DNA; note = unclassified Potexvirus sequence
ctaaggccactcagcaccttcatcgctctcacccgcgccaagggcaacctcaccatcttcgatttcaatgccaggtttagttccaccgcctgaccactccaagtcactcttcgtccttgctattggtataactgtggtctccgcactatttgtgctgaagtcccacacgtttccaattgcaggagacaatattcaccgcttcccctccggcggccaatataaagacggtaccaagcagataaatactgtccacctactcatgctaggtacccgaaataccctgactacaatgcttgccgccactgccgccatcgtcatcctctctgcctatatatttcctaccatcctggcaataatattcgccgtatttgcccttgttgcaatacatatcaccacccctgagcccttctgtaccatacacatagacggggcgtctattactatcactaactgccccgatcctgcagctatattaaataaagtagctataggcccctggcgagggttaagttaccacaataacttgaaataatc

SEQ ID NO: 2093 - DNA, 537 bp, unidentified
  source 1..537: mol_type = unassigned DNA; note = unclassified Sopolycivirus sequence
tagatgatgatcaaaaagcacttgatgattatgatgcatcaaaatctgacccatcgtttaattatggacctggtgaagaatctgctgcaatcgatactgatattcctattgaaacaggcattgccgagggagctgagatcgcttccgctggaaccccttggggtttggcagcccttataaaccaacaagtaggacaatcagttaattcagctataacaactggacaagaaaatatttcatctcaagattatatgtccaatatcaatcaacatggagtaaatgttggcttgaatgcttcccttattcaaaatcaacaacagcaaacaattaaagctggctccgctggaggaggaattggatctatattcggaccccttggcgctcttataggacatgccgttgctggaacagtacaagcgaatcctgatttattcaatactgctgcttcttcaagtggatggattaatcccactgatacaacagctgcaaattctgcttctgctgctgccccaactggtgactctacaatgcaagaca

SEQ ID NO: 2094 - DNA, 538 bp, unidentified
  source 1..538: mol_type = unassigned DNA; note = unclassified viruses sequence
gggattttaaccgcccgttgtattcttacacaaaagtttgttacgcatgtcttgaactgacacaatagttcccctaaaagctatcacgctcccttgtgatgtaactcttttagagtcttgcctactagttggtacaaactagttccattttaacaccaaacacatcaatggattaaacccgtgttccctccccgacagatctacaactcttagcttacagccaataaagaagcttaagtcacgttgttaactcgtcctggagctttcgtgttattgacaattccccctccccctcttttggactgattgtctaaaccccccgacttatatagacagagacgcctctatggcctctatgggtaatgtgccctgtcaacttcctgttagtcactgaagtacaatcgcattcacacacacaaactaccgcttgctcgttttacgggttgccctcattcacgggccgaatatcatgtattcgcaaagtagtgtttgctgggtcaccaaaaccggctagagtcctactactcgataaataagt

SEQ ID NO: 2095 - DNA, 538 bp, unidentified
  source 1..538: mol_type = unassigned DNA; note = unclassified Partitiviridae sequence
catcccttttggggcaaaaggtttgacaggggattggtcaccctacaaacttctggataggaccaccctacttgcgacggtagcccgccttacccgcaagtggagagcagtgagggcggatgtttgggctagaaccccttgcgataacgagtactcgatggtacggtcacagagcaaactgtactggcaaagtcgggtcaaggagtcgctgcgacacccagacattaggttaagagtcagttctatggatgcaggggaggcattcaagctggcgcacaaacatttgcaacgcagattgcgagtaactgaagaggcggtcaaggagaagaacttacctccgctgcatcttcagcacttgcgcgctctcattgtcgcgttaaaggattggcactattctccggatagggtgtcgattcttgcgacatgtgagttggcgcgaggctcctccccccctgaaaggcctccccgcattgaacagcggtgggtgggaggggttccaaggccattcgcaataaaggaggagataccaccctcgaag

SEQ ID NO: 2096 - DNA, 538 bp, unidentified
  source 1..538: mol_type = unassigned DNA; note = unclassified Triatovirus sequence
ggcaaacgtgtgatccctgcattaactcaacaaatatctgatgtaaataaagagtttttgtaacgctgcgtttgtaactacctgggctatttagtcttacctcccaggatgggtagtggcagccccacaatatccagggaaccatcagtatatactacatggttaagtggcctgtagtacgaataattcacttgctacaaaacaagaaaataattcaatagctcaagctgaggtagcgcctcaggaaggacagaatgctcaggagcaacaggaaataacatcatttaatgatgatcttgctgttattcctgagggagtacccggagagacaccagtcccgtcttttcggcatgatcaattcacggacttttcagaccattctattatttcgtttttagagaggtctcagcttcagtcgtcgtttcagtgggaattcgcgcaatcgggcggtgcttcggggttgaattcgattggttacgatctgttgaaaacgaacgactcgccagggttgttagtaccttcacagatattcaagccc

SEQ ID NO: 2097 - DNA, 538 bp, unidentified
  source 1..538: mol_type = unassigned DNA; note = unclassified Picornavirales sequence
gattgcgatcctttcactgagcactatttacagctggtttgctgggaagaaaacccgcttacgagagcgttatttcggaaccttgatgcaacaagttaaatgcaatttttattactaagttaatttggaatgttgtttatttaaacttttgttcttttagtttgttagtttatactcctatttactttagttttaacctaccattagtttattatgtttatttagttttgtttactttgaagtttcttacctggtgcattggagcgaagtagcttttgtgaaaagtccgatgttcctgaactccattgggaacctatgcggcctctgacgggtgtctttggcggaaacatggataactggtgggaatctctacacatagaggacaagcaccaacttcagacgctttgtattacaaagccgggctgtaccctgattttggtgtatggatacccatggggatggggtctgttttgtctactgcctgatagggtttttgcaaacaaatgtgtaagattataagatttgctgtagttatttt

SEQ ID NO: 2098 - DNA, 538 bp, unidentified
  source 1..538: mol_type = unassigned DNA; note = unclassified RNA viruses ShiM-2016 sequence
acctctgaactccctctgaagtttgtgctaaacaaccttgatatggtaccgctagaggttttcggacctttggcggcaatttcgctctgtgatgtcacttgacaagcaaggaatctgtcagcaacaatgacagtgtaaaattccccaagaactggcgacgatcctgaggcaaagcctataagacctcgtggtgaccctccagtgtcatgaatttcactttgcgaaaatcactgcacttactaaagaggtatgtgacatttcctctttcctttctctccttcctttcctggtacacattggttacgcaacgggcataactactcctcagacaactactgtccgtatcgctttgtgtactttggcttgctatttagcgtgcgtgtgccttgggcagccccctaaacacgtgtcagaggaccgctccagcctagttgggttactacggcagccacgcttgcgtggtggagtgtaaaactaacctgctcctacttcttcttctccttcttcctctacttctcctcctccttctactaactct

SEQ ID NO: 2099 - DNA, 538 bp, unidentified
  source 1..538: mol_type = unassigned DNA; note = unclassified RNA viruses ShiM-2016 sequence
attactcccgagaatccatggcttatccagaccatggcccggttgagcggcctgccgatgtaattcggcagcaagaaaacgctcccgcgccaccaacacccccagcaccagcaacttcggttgctccagctcaaaccacgccagcagttcctggcccttcagcccctcccactgtggccgcagatgtgacaactccctgtgtagaacagccggagggaaacgcgaacagggcctctgcaggtgtggaggcccgtggcaacgtcagccagcaaggaagtgcactgaacgtaagcgtttcagtaaaccccgtgtccaaaactcttttggaacagccggcgacagctaccaatggccagacatcgacgcctgctccgcgaagcgtagcttccgtctccacgtcgaccgatttttcgcggcgcaagcaaaccgcaaagctggtccgattggaacccggagcatcgaccgcgttgagaagagatgcagtagctggaagtgcacagtaacccgctttaaggattttgaagaaaatttcgaaatt

SEQ ID NO: 2100 - DNA, 539 bp, unidentified
  source 1..539: mol_type = unassigned DNA; note = unclassified Totivirus sequence
gaaaaactatccccgctggtcggtgggccgatacccaatcggtctatggagggaattcaaatagggctctggtagtccgctcgccatcgccttcggtctttccgttatggaaggtttgcttacggtccacgtaggttctccgaccttgcgaggaaagattgcgctgctttgcagttcccttaactggggcgggttaggacgtcggtagggtgcctgtggccctgcggcaggcggatctagcacgtaacgtatcccttgccagggagagcgtgccgaattgctatgggttggtgtaggtcctcggttgtgtacggctcctcgtccacctacatcacacatgagaaactgatgacgacacaggcgtgtctaggactcatgcgtaactgctccgatgggatattaggtgtaacgactgcctgtaaagttaaagagttagcaactcgggctgaccagtctgccctttgcgtggggtgtggcatacgctaggacgtggacaaaaacaacaaactaacaacaacaacaccaagccaaaaagaaag

SEQ ID NO: 2101 - DNA, 539 bp, unidentified
  source 1..539: mol_type = unassigned DNA; note = unclassified Picornavirales sequence
ctaggaaggcctttttgtaattattcgtagttgcgattattaaatatatagctatatctcttgattgagaaatagtattctgtacttttgtatttcatttgattatgattaatttatacaaatagtagctatatacttgacaatcgtctcttgtagtttaattttaaattcctagaacaccttaacccttacaaaacacacatatcattaattttaacatttaacatatacgcgcatatcttaaaaatttaaaaataacttagtgggaactacttaaatatataaggttaatgttatatagatcgaagatttatacaaatcacgaaacctcgcaagggttgcttctattttagcattaacaaactgtattttcttaaagtaccttttgtatcaaaaacaaaaccgaccacacttaaacatgacctctgaacaataagtttcagaagcgatcggaaatgatctatcacatacgtagttgtgatagcagtttgggtgatctgacttcacccacccccccctaaaaactttttacaaatatg

SEQ ID NO: 2102 - DNA, 540 bp, unidentified
  source 1..540: mol_type = unassigned DNA; note = unclassified RNA viruses ShiM-2016 sequence
tcgcattgttgtggatatttggtgtctctatggtttgttcactactattaacgtgtcttttaggttattattttataagactagttaggaggacatacagttatgcatgcagaaaaatccaaaaacatgatagtagtgtagatgccttagagttagtgactgtatatcgatctactgttgactctcttcctatgcctgtacctttatcctgaccctcagtaccgcaagcaactcgaacaatctaaccaactgtgtggggtgcgaggttaaagtatggtaacatactctctcactatgaagccagggggagatttagtagagccaccgcccgccactagtgcggaacctgtccgtaggttgggaacctggagatcagcgtgccgaggtccataacctctcccagtgtatttctgtgtgaggcattggcaaagttatgggtagccttgctggttctgcctggggagctggaagtcttcgagcccagggggtatcgtcaccgcccaatcttgtgacgtctttttcaaacatttgtattctatc

SEQ ID NO: 2103 - DNA, 542 bp, unidentified
  source 1..542: mol_type = unassigned DNA; note = unclassified RNA viruses ShiM-2016 sequence
gcatttgcatcactttgacctggcgaggtcagtaaatatacgctttttacccccggtgcagggttacattgtaccaccttatcgcagttgattacggcagagtcgaaatgatttgcttgttttattttcaattctgacgctctgcgatttgcatattattgtacataaacatgcgtctgtggagtgctgagtcgcacccatagtactattatagacttgctacaacattaaatcaaaattttacggtagaaaccgccaattcatctttgaaggaacagaatgtgtcttttaatgaccaatctgcgggctatgttcattcccttaattctgttattgattctacgagaaccaatgtggatgcatatgatgtggaattggggaattttttcgaacgtccattaaaaatagcttcgtatgagtggtcaacaaccattactttctttcaagattttaacccgtggtcattgtatttagagaatcctcgtgtagcgaatcgcatttccaattataagttgcttaaaggcaaacttcacgttaagttt

SEQ ID NO: 2104 - DNA, 544 bp, unidentified
  source 1..544: mol_type = unassigned DNA; note = unclassified Riboviria sequence
cttaaataagtataacgtaaaagccactacagttgatgacttgattcaggatatgactagacaagcatgtaaggcttttacgttatacttatttaagtgattgatggttgctggttgctgtgctgtaggggtcaacacctccaaagtaagatgagagaaatcaggcattctatgcccgttctcactgtatcttccttggaactgtttatcagtaactctcacacgcacaagacgcgaaaatagatctcacggaaatgaatcctttggtatatataacgaatttgctaattctactggtgttgatgatcaagttaaatcattaaactcaattatttcatcagatccatacagttttgaatctgcatttgttaaagaacaaccgtgtaaattgcgagttgtatcattgacttcaaaccagaaagattactcaaatttgttgaaaaccttaccggaagccaccttgtgtgctctattttcgcgtcttgtgcgtgtgagagttactgataaacagttccaaggaagatacagtgagaacgggcataga

SEQ ID NO: 2105 - DNA, 545 bp, unidentified
  source 1..545: mol_type = unassigned DNA; note = unclassified Picornavirales sequence
tgtcaattcatttttgttgaataatcccacgtctttcggacaggtcagaccgaccttttctaatagttcaattctattaaatggaaattacaataaggctcatgattttatgaatgcgaatgccctaaacacgcttcagtatcctaatgtaccaccgcctccttatgttaaggattcaccctctctgctttcctctgcagaaaaagcaggtggattaggggagatgtcaacaatgggtataggaatgggcgtaggagcgatggactcagcactcaatgattacactaatatgaaaattgagaatcaagtgaggacgggaacagggcctgacggtcatgcgtttgatgccgtacagcatgcacaaaatcaagtggcgtcaaataatgctcattcagcattcagatcttcagcattgatgctaggatcagctctaggtccagaaggattaataggagctggagttctttcagcagcagattatgctctgcaagctgtaacacaaccctcagagaataccaccaatagcactagtggcgatttggtaa

SEQ ID NO: 2106 - DNA, 545 bp, unidentified
  source 1..545: mol_type = unassigned DNA; note = unclassified RNA viruses ShiM-2016 sequence
cgtgcatataatgtcttctacgacattatatgcacttattaggaaatctttgtacgcttaccgcctacgtgattttcgaacacgtaacgttaggatttgcttagcatttacctggagtactgtaattagttttgacactatgcatgctgtttctacccccgtcttggttactacaccaagcagccggccttttagggcggttaccgttattatacgggctcttttgagtatgaaatttttgaagatttttaatggatgaaaaatcagctggcgggcatgccccgctaggacaagacgctctagctattgagcgcctggctatgaatgccggaatgaggtacattgtttgtaccaagaggttttttagatgttgtttgttagcgataattatgctttcgaaatcagacatcctgacggtgcgaagccgtacgatacaacctcaaggggtgcgtgtcggtgtccattgtattgaacatggacatacttgtttccgggaaacaagtgtcgaggactatctcccctcgagctagcttgctagtaatgtg

SEQ ID NO: 2107 - DNA, 545 bp, unidentified
  source 1..545: mol_type = unassigned DNA; note = unclassified Riboviria sequence
aggttaaagactccctgggggtataccccagggagtctgaagatatttgagcctcgatcggctcagatttagtgtgttaaacacttttataaggttatcaatttaccaagtatgagtgttatacactctgcattggtattaattggaccttttaatcttttcaacaacctaagtatcgactgtgctaaactagcagtcaaactatatgttattataaagacccataatgtctataaacttagaattataaacaattattgtgttgggactttgttggtcccattgtaaaattatttcatttgacggaggtataataagcctaccagtgctccgtctacagctttaaactttgacgcgtattttatctaattctgcgcaagattgagtcaacgtacttttatttgtattaaatttgtaaaaatgctttgatcgaatcgatcttcgtgcagcatttgtgtaaaagcacgcgccgttaaaactctacgagtcattttggaactcttgactatatgcaaggcaagctgaggtcataaaattccaataca

SEQ ID NO: 2108 - DNA, 546 bp, unidentified
  source 1..546: mol_type = unassigned DNA; note = unclassified Botybirnavirus sequence
gcaataaaaggcgaagccgggaggcttctattttattgcccagtttttcatctggtcaaaatgaagtcggctatctagctagcggagagtggaactggtcctcttcgtacgaaaccaaaccgagcccccacccggtgaggtaatccagtggcaatgcgtgggggagacctcggcctcggccgagtgattgtgcagaacgggtggtgatgtcagcaatgctcaccgtacatgtccgtgctagggagaatgtcctgtatccagcaggaagatatcccgcgtgtaacgactgcaagcactttgtctcctacgtagaacagtctatcacctagcggcgctgatcggccgatacagtaggtggtgtgtaggcttgccagcccaacccccgccacagacatagcttccaaacaattacacacacacaatatagcagagtgagctaatccagcagctatattaacacactacagtagatcaacttttgaatactgttatcgatcaaacacaagaatccatataccaatctcacaaattacaaaacacaaaaaa

SEQ ID NO: 2109 - DNA, 546 bp, unidentified
  source 1..546: mol_type = unassigned DNA; note = unclassified Picornavirales sequence
gggacaaccccacagctggtacaaccattgtgggttggtctccaccctttttcaaccgtggcaacttcggttaaagttgcaaatcccccctctccctattccacctcccttactttcactccccatatatggtcccagattttattctacctctttatatttttatttagtacagtggtggtgaattactcccagcataaactttgctggatcagtgttcatcaagcatactaattactaatgtactgagctatactattatctggcatctcacctggataaccggtgtgaccatatttcctaggttgcctccctatgtattttgtagcacctgtgcatctgcacgttggggcgacaaattgtaggtttcctggcacgggtaagaattgtggaaagctagtatgcagttaatgcaagggcgcgtttttcgctaccccgacactgctaaagtttttgggaggggtcccttaaacatttctagtattgagtgatagctttgcggcaggtcaccacaaccttactataaataaacctgttgaatctcac

SEQ ID NO: 2110 - DNA, 546 bp, unidentified
  source 1..546: mol_type = unassigned DNA; note = unclassified RNA viruses ShiM-2016 sequence
aaggggtcttaaccccctggttcttttgataaaatagcaataatgcacaattatagttgttgcaagattgttgagaaaaacattttattcaattcagtcttaattggcggataggttggcatcccgtcatgcatttaaatgcagatatgctttccacattttaaagtgtggaaccgatactgtgctcttgaaaaatggtgtagagccgcgcttacatttgcaggtgtagcgtgaaggaacacggaccaccatccttagcgttttaacgctgaggcgaccgcggccctgaattaatcagtgtgggctagattatgccactgtacaacacatttacaaataaatacaataaaaagaaaatttgaggtccaattagaggacactaaaaaatatttgtttatttaatttaaataaaccaacccccacttaaacctttgtgggaagggaagcttctgcttgagttgagatacctttctcatttaaaaaaggcgcttttattttggacatttttgcgacacaaaaagaaatccattttatgaaaacacatca

SEQ ID NO: 2111 - DNA, 547 bp, unidentified
  source 1..547: mol_type = unassigned DNA; note = unclassified Picornavirales sequence
ccttcgtgggcaacgatcagcacacattgtgtctgatcttggcctacggagtttacctttttgacgtttgatagtacgacaactattcattgtatttgttactttgttcaccttacctattgtttcattccctgtatatgaatatgaatttatcttaaacggttattccatttgtttcaaaggaggatggaggctatcgagcttgcatggaattgcaagcagtactttagtcaagccacttggaacgaatggtttttattgtttaatatttatttatatgttagtatacactcctagagttctacattgtttgtatgaagaatgggggaaagctacttgttagttagtaccacagtctttttaagcaattccagtagactggtatttttgaggaaaggtggtatggactgaattaatgggcgcattttttgccaacccggagagtcctaaagttatttgggggggcccttataacatttccactattgagtgatagctttgcggcaggtcacctcaaatctactataaataacctgttgattttcac

SEQ ID NO: 2112 - DNA, 548 bp, unidentified
  source 1..548: mol_type = unassigned DNA; note = unclassified Picornavirales sequence
gtttttagattttataaaaaatttcgaaacccgcgacgtttttgacgagatatgtgatttaagacacttactaaagggtttaaagttacaagatttaattttaaaaaaaaacttaaaaaacgtcgtttaaggtcacgaaaaccatctcgtttaaaaattttaaaacaatcacaaaaataaaacaaaattaataaaacaatctcaaaaacaatataaaatatcactcttgtagagtgtaaaaatgtaagtcggtactttaccgaattgtggatatcaatcttatccaaggtgtatttaaacacgtggcttttgggttttgtcgccctagttgtcgtccgtgcgttccaccttattcaaaccgagtaacaagttagttcttgtaagggctagttaatacctcctccaaaagagtttgtagtaacttgctagtacctgcttgagccgtatcgtgtaaaaggcttgtttgaatgtattcaccaatcgtaagatttatttctgattggtagataaaccccagaccgtttccaatttaatattaacccaatatg

SEQ ID NO: 2113 - DNA, 549 bp, unidentified
  source 1..549: mol_type = unassigned DNA; note = unclassified Metaavulavirus sequence
ggataggtgatccacctggaattaagctggttgattaagaatgtctgatacaacagagatcaaattagttaatctaaatgtgctagggagatagtgcaccaaagctataaagttgcgtattttatcgactcgcacttaattaacctgaaaccaggaatctatctttaagctatgaaattatgtgtcaaaaaaactaatatcaaattaaggagtatatccccatacacaacaagcattaataataatcatcactaagtatatagaaatcgggatcaacaatttgatcttcgtgagacttaactatacacaagattaatattaattcatgagttgactactcagtgttgattaactcttttggtcaaatttaggtgaagaatcaatataagacagtaggaactagattacaaaaaaatgggggagaacgtttgacagggcgcgtaatcagacatagcttgtctgtgtaagttttaagagatacgcggtcgctcaggagtacaagagtcaaagtagaaacagtttaaaggacaggacacggaaagcagaaca

SEQ ID NO: 2114 - DNA, 549 bp, unidentified
  source 1..549: mol_type = unassigned DNA; note = unclassified Astroviridae sequence
ttttgcattctgcaaacttcatcctcggggtcagggtttcccggcaccactcctccacccattgagtgtgtccttttggtgataacgccgccatttggttctcacactgtaggaggaggtctgtcatattgacaccgtgtgctgataggattgttcgagttttcccatagcacatgtgttgaatttcagtgtaagtaagttccctggttgatggtttaaagatgtcaaagtagcatccctcaatctgcgccgtgcagtcagtctcaagagcacgcgtttctccagctaggaacccaagcaagagaaagagaagtagcatgcaggcaaaggtccaggtccttgatgatgcgcgcacagccactgacacggcatttttgctatcgatgatggcatttctaaggagttttacctcctgctgatggtgccgtatcactctgtctttttcctgcagctctttctccctttccttcaagagctcacgcaaccgcatgttttcctctgtcttctgggatgattgtgcagcaaagagccttatcctaagctggttgg

SEQ ID NO: 2115 - DNA, 551 bp, unidentified
  source 1..551: mol_type = unassigned DNA; note = unclassified Morbillivirus sequence
actataacaataataaacagctactaaatagtattatgtatttaagtgtacactgataattgcgaataaaatacaccagattaataacagtatagagttaagatctaattgatatgtgggttggtactcgatcatttattagctctactgattatctatatcttgaatcaccaaatgtaagagcatcaacaggtaataagttttggattgctagattgacacttaattctcagaactagaatacccagattgtcaaacctataaccttgttagattcattaaagttagattcttgtaatgttgatcaattatcacttgagcaattataaaaaactaaggacctaatgtaataggaacccaaactccatccagtgagctctaaatcgccatgcttgaatattaatttatctagggcctgtctaactcagaacaaagatcacaactagagtctaaaggagtgggtcaagtctgaacaattatcaagagccgagattcaaaactgattcctccttaaactcagaaccctaacaatatatcatccactcaacatc

SEQ ID NO: 2116 - DNA, 551 bp, unidentified
  source 1..551: mol_type = unassigned DNA; note = unclassified Picornavirales sequence
cccctggggactggcgcttacgcgttagtttccaggatggtcttttcaacccagctatgggttaaatagcaacttttttatttttccagtttcactggactgtgtattggacactacacagtataataaaaggtgagtctttctcaccactttcgtgtctagcggttcaactcatttaggcatgtttgtcaatgtatcaatattagttgaagtgaagatttggaatcacaccacaaccccagtggtgcccaccataactctgcctcggatttcctccatagtaatatggaccttggtagttacacggtgttgtttatacatgagtcttcatggatcttttattgccgattgccgaacccctctatgaccactgttccgttaaggttttgtaagtctgctcccatgtaaaagccttggtcgtgcttaaatgccttcccgggtgagaggaaaggcctacttagctcacgcggtaggaacacctgtcatgctccgacacagggacttatattgccgaaacccattttccattttaaaccaactactctctcact

SEQ ID NO: 2117 - DNA, 551 bp, unidentified
  source 1..551: mol_type = unassigned DNA; note = unclassified RNA viruses ShiM-2016 sequence
ccctgaccgggggcaagaacgcaagttcacctctggaaacacccttacaaaggggtcgtcagtgtttggcgctcttctgtgcggccaggggtccaattaacagctatttactgttagacacatttcagtgtcggcatgtggatggcattcgcgatcgcacttagcctaaggaggttacacctgtgcgtatttcacacaagtataatcaacctctttggttggagtgtcggtccgataaaaacggcccgctcgagtacgctcagttacctattattggcgacggcgcagtacctgatagacttctgccgtacaaggttgcgaaaccttatactcgtgcagatgtccgtctggatcacttagttcccgcacctattcccgctggagttagcttaattgagcttcctacagcagaacaggttgtaagttctttgttatcgagtcggcccacgttggcatcgtcagtatttcaacctttcgttgatacagctggaatccagaactcagcattacaaaatgctattgagtatggaaatatcttgttactcgtctct

SEQ ID NO: 2118 - DNA, 553 bp, unidentified
  source 1..553: mol_type = unassigned DNA; note = unclassified RNA viruses ShiM-2016 sequence
tacggttttaaaaccgtacgcaatatttgccatctagctcctgatgtaaaattgagcattaatcaagtttagctctctactataaattgagtaattgttcgtgatgaaatattcatgggcgactctagctctctagtataaattgagcaatcttttatttagtgcttattgttttattgaagacgactgatggcatacggaattgtacttttaattaagggttagtatcctaatagtaaccatgataccgaataaagtaggtccaaagcaaagtgaaatttgtggaggccgtcatggcaatgctattagaactgaggatttaatgcttgacaagcgcaatatctgagcagatagtgtaaaaaatagcaacaatagttaaattattttacgatatgttatgaatatgttagacatgtattatgattcataacctctattcttaatttaactatatccaagtctcggtggatattggattctgttcgcagttaaccgtatttttacattgcccgagtcggagcggtgatattgtatccggactacttaatacaaa

SEQ ID NO: 2119 - DNA, 555 bp, unidentified
  source 1..555: mol_type = unassigned DNA; note = unclassified Picornavirales sequence
cgccttttaggctgtttttccacggctgaaggtgaaagaagtcgttacccgcctgcctacttcgggccgggctagtaacatggatactaccctaagtgtgtgatccgggtgaggttccccccctccccagaaacttgtgatgagggtcaccatcccgcatacggcgacgtatgggtgtccctgcgctggcacaaggcctgctcctgaaagggacaggcgcgcttaggatgttgaagtgtgaagacccggactgagctaggtatggagtcctccgccccctgaatgcggctaaccctaaccccggatctgtcgcaggcaatccagcctgaaggcagtcgtaacgcgtaagtctgggatgggaccgactactttggggtagcgtgtttcctttttattttattatggcgtgtatggtgacaacaatagggcattgttgttatcatacgttcagcgccttcctagctcttctacagtggttgataaccgctgtttcactgatccccagtggaatttcttggatttttctcggcttatttttaggaggatttgcttaca

SEQ ID NO: 2120 - DNA, 556 bp, unidentified
  source 1..556: mol_type = unassigned DNA; note = unclassified RNA viruses ShiM-2016 sequence
gtcagcaattccctctaatagggccgaaaccttattagactacttagtggaacagtacaactcttgcaagttgctgtaaagctgagttctcctgattttcaatcaacagaaaagagcctcattggaacgacatacaaagcgtaatcgttcgaatcaatgtcctattttcgacaggagacgtgtaagtgataacacgtgccagtcacgaccatccggtaacgacagagagctattacaaacgaaatgtattacaaatagtataattaaatctattgatacattcttagcactccatcatcttcacatagatgacgtaaattttaattcatactctaaaaaaattaacgagtatgttgatgataacggtataaaaccgttaatagacagttttaaatatttctgtttttacaggttcaataagtttattggggatcttgatacataccccaagcctgataattatttagacctccaccctaataggcatttggagaaatatctaaacagaaaactgtcaagtaaaacacctaggaactataaatttttagtgtcatta

SEQ ID NO: 2121 - DNA, 557 bp, Morsusvirus argatis
  source 1..557: mol_type = genomic DNA
gtaaccaacatcatgagaggcaccccacctacccatgcggcatcattctctcattggcaccctaatctgctcgcttagcattttgtgtacctcgccattctaaaccatactcattggggcttcattggtttaaaaccatgccgacacaaaaattccatttttgaggtctggactctctcccctcctcaccccaagagactatctgactaccgcatcatgtccagccgtctccccccgggtcggtatcgtcggcagacgccaggggttggccgcggtagacgcccggatgcttcgtcggatagcacggagtttttaggggccgggggtgacatagagcaactacgcattgcggtacaaagcctgtcggaacaattgcagagtatagaagcccgcctcgtcacggtggagaccaaactggtgcatctttacgacgttgccgtgttcccacagcggcgcaccaggccggatgtggggaatcagttaccaatgggcatgtagccgacacaaaaaacctccaattggtttaaaacatcaggatctgtcctgatgtttagacc

SEQ ID NO: 2122 - DNA, 557 bp, unidentified
  source 1..557: mol_type = unassigned DNA; note = unclassified Hepacivirus sequence
gccgctcccgaaagggagtccggcgcgtcatcccactccgaggagtggggtggcgtccccgtgtgccggggaaccatgaagcctaagggcatccacattttagaatgaacttgaagcttcgtttcgctggccggaaagtcctgggttcccatggccagggttccgcaggtgggtaaatcccggtggggttccatccaggatatacggcaggcgggcgtagtccggcggttcggacgacgtgtgggtcgcctacggtggattgttcacaggatgggcactccggtgtgaataggccccgtcagggtgcgctgacgttaaactcaggccttgcctggtgttcggggaggattgcagggccacgccgcctctaagggccgtatggcacagtacttcttcgggcgggttgtcaaggccctccaacgcgacaccagtgcctcggcaggcatggggccacccagctcggcgtcccgcacacagacggcgtaggggaaaatcagcaatgtgaccccgggtggcattttccttctctctacttccatgcatgatcaaccgcaatc

SEQ ID NO: 2123 - DNA, 558 bp, unidentified
  source 1..558: mol_type = unassigned DNA; note = unclassified RNA viruses ShiM-2016 sequence
tgggtgatgagcccggtgaagatattatattgctttttagttttattaggtagttcagttagtttttctaactgttcttaacttttactctaataagtagtatctatcttcattagcaattcatgaagtgatgtttaactcctaccacctttggtgttagagggggattcttactatcctctttaattagtaagtttgtttgggttcaagccccaactgtgaaattagcttgtagtacaatatattgaggcgtgtgactgaagaatcacacaactcgggaagtgaatacttccctctgataggagtagcagcctaccagagtattgcttatatagtttgcacgacttgaaatttccttttcctgatcgttcccgaaacgattcattaactatgagggacgtggtcctagagggactaccgtatggtaagacgatagaacgttaatctaaaaccttcccacgttaagaccaatgaggtattgttcctataccgtgacattgagtctttgacgtgtaataaaagtagttattttctaaagaggaaccgtggagacacatt

SEQ ID NO: 2124 - DNA, 559 bp, unidentified
  source 1..559: mol_type = unassigned DNA; note = unclassified Narnavirus sequence
gcctcaaaagacgaaatcgcacgacaaccctagggttgacgtgtggtggaacgcttgcgaggcggtacacgggagtcggggtgccatccgtcctaagggacgtggggccacccgacaggtactccctcgcaacacgcggcagcgtgttgcgttcctaaagttatcccccccctctgctgcccacgccaagttgttaaacttggtgtgggaggccctcctcggtgtcgcggccgcctaccgccctttgcctacctgggggagtcgtttcggtaacaagcgttgcttggaacttcaacggctcgccctgtggttagtaagggcggcagacggtcaagggatcggagcgacgatcgcgtggctaaaaggcgcggccagtggcgcccgcaacacttgtgttacaggcgcggccttgctgccttccacgcgatttctcgtcaggaagttgctgatcggcgatactcgcaatgagtcgctggaccagctgtccttcctttcccgatcccttccggaaggggactctgttgttgagtccaggacacttgtcgctcaccgcgacaat

SEQ ID NO: 2125 - DNA, 559 bp, unidentified
  source 1..559: mol_type = unassigned DNA; note = unclassified Totiviridae sequence
tattcatcaaatatatcaatcgaatccaatactttatgttcggttacaggcggtgaaacttgtaaaccttgataaaatacagaaccagattgtatattacaccacttccgttttggtggtaaaggaggtggagttggaatatacatcttaccaagattatgtttagacattttagctggttgggcagaaatgaatgtatatgtcggagcatagcagcggaccactatacacaaacatcgtatattgaggtttttctctagtttatcgttgatatgagagctcttgcgtcatacgtggcgtctgggtagctcgtactcatgttaaattaggaatcgttcaccaaaaccaaccctctttttaaacccttggaaattttatctgattctaagtaaggaacttagttaccaatgatcttagctgataataaattttccacaagcatttagtttagtgcaatcgcttatctgggatagcaacccgttagcactcaacttccaattctcctatttctggtttaaagccagcatgatccctaagcgggagatgattgtagaaatag

SEQ ID NO: 2126 - DNA, 562 bp, unidentified
  source 1..562: mol_type = unassigned DNA; note = unclassified Umbravirus sequence
ggggaatctggctcgccaccagcctcaagctcttcccacaaacttaaataaaatttaaatttaaactaggcttaaactgaaacttaaacttagacttacacttaaatttaaattttcacggtgagactcacactacctcacgtaaaacaaagttgtggcgatgtgcgtgtacagtgcacgcctagttaaatcactgggggacgtacgagctgcttgtagacacccggcagcgaaataagggtgtagcgcagctggcgcaacgatttgttaaggatctgacactggaaagacagactctcatctaattcttatccgtatgctgtgctcaccctggcgggggtttgacgcgtttgcttagagcaacatgtggacgggttttcgtggacccaggcgccgtgggcgcaagcaaggtaagcttctgccttaagagggcccccccgcccggggggtgatttagtacacacggtgtgtcttcacaaccgcggcgtgtggcacgtccagttttcaggccagggtacttttccttgatagatggaaaaaccctccactcccagcacacacg

SEQ ID NO: 2127 - DNA, 562 bp, unidentified
  source 1..562: mol_type = unassigned DNA; note = unclassified Picornavirales sequence
ccttagggtctggaatgcgtcctttctgggcacttccacaatcctaaggtaattttcaacgccagcgatggagcgatatccaaagaacctttatgttttagttcgtcttgtatgtttataaaatataaaattgggattagcaacccacaaaaacatttttgttattctcaccacatgagagggtggttaaacctcttcgtaacctatcttgcttgattggctacttgggctagatttaggacaacctctttagcaagcctaaattactcctcgtacttgcacctggtaacaggcgtacctggaggttacggtggcgctaacttggacttctcgttaattcgtgcaagtttaaatgatgcctattttgaatacaagaaagtatgatagtaacttagggcgtgaagttccgcttaacataaggcagtataagtactaagataaggtgtaagacctaccttaataactgttgtcttttctcatggtctttccgtgggagcccttgctaggggtaaagttaagtattctcaaataatttttcattcaaactctttctctctgtttt

SEQ ID NO: 2128 - DNA, 562 bp, unidentified
  source 1..562: mol_type = unassigned DNA; note = unclassified RNA viruses ShiM-2016 sequence
cgcgtaataccttgtttcacccccggccgctgccgggattttaataagcgtgtttaagcacctacgtcccaccttcgggtgtaaattacctgcgatctgcgacacaggggcgcagggtcgtgcactagtcgatcggtttgggcgggccggtcgtcgacgacggagtgctgccggtgcacgataagatggtccaggttgcaatgatccacgcgcctggtaggggacgcgggggggggttttctttatatcgactccacacgacccccccttggccgggactgtccctaactccacccttatgcctgagtagccggggctagtccggtgaacagcctgggaacgctgggaagcgatacggtgagggcgctaccgctacccgtctgcagcggtttctgttgtgtgggcgacagagtaaagtggtagtttgcgcatgtgagggtcccgaagcggagcggcctgcgagtgcagggtttagccttacctgcatgaatgtgggcttagctccgtggatgttccgtttggctcgcacggccaggtggataatagaccgcaaggtcttggc

SEQ ID NO: 2129 - DNA, 563 bp, unidentified
  source 1..563: mol_type = unassigned DNA; note = unclassified Picornavirales sequence
tggcgagcaattgattaactcgcccgcactatcacgcggattgtaagttcaaacggattgactattatgcggacctctagttcaaactttttgaagcggactattggttcaaacagatattatttcacgcggatttacagttcaaacggataagtgtgcttagatcaccttgacagctggaaagacagcaaacaacaacctttacattacttgatgcttattcagtaatggcgatgagaaatctcgtaatgactttatagagtaaagggcggaaacgtgttttactactaggagaatacatgcgagtaggttacattaggagttgattgataacgagtcctttgatggcactagtttatttcgtgcaaacccttaggataacacatggtaacatgtgcctttgggcagagctgattagactggtgaataccacaaagtgaattgtgcgtcgagccttttattgtaatatcggttactagcgttaacgaatgctagagtttgttgtataacactgcattgcggctaaagtaagtgtgagtgtttgactttagagtagtttcaag

SEQ ID NO: 2130 - DNA, 563 bp, unidentified
  source 1..563: mol_type = unassigned DNA; note = unclassified Picornavirales sequence
gcacggggtttatagccccgtgcattgatttcgacggcaagttattgtcgatagagtattacatacgttggatattaccattccttctaaggaggtctggtgttgtctttcatatgttttatgtcaaatagcaaaattttccaattaccttttacccacattttatgtttgtcttttacggttctctccgtaacacataattgtctaagtgtgtgtaaaccttttatcaggaaatagagaacttttgattgcctactttatattaatatttagcgaaatatttgcagttaggaatagttcgtcaattagtactgctccccgtaaggtgaactttttggcatgcaagtgtgagcagcaccttgtccttaactgtatttatagtagttatctaaattgatgtttggtaaggttgtcttaaggagatctgattataaggcgattggttgacgttacaactaacccccctttttctcatagcacaatttacaggagtatcacgtgcgctaccttttacctattgttcgttgtttttcatattgccgcgaggtgcaagacttcctaat

SEQ ID NO: 2131 - DNA, 563 bp, unidentified
  source 1..563: mol_type = unassigned DNA; note = unclassified RNA viruses ShiM-2016 sequence
tttcttctttttggactggaagaaattttgtgtacatatttataagtcctttttgactgccgatgtctataaaagcctggcgctagctgcatctagttgttacctaagtaggaatgtgcctttatatattagtgatttagtgaatttcatatatatttatcgttttgcatatgttttcataccctgtatatatttgtatttataaaaccttactctcattgcgtcattgcttcacgcgcaatttggagtctaaacatagctgataagcaggtaaaacattttcaattattacggacagattattgccatgtcttaaacaggcaattagtgggggagagcctcgaaccacccacattgagaggacacctaccgttcatgttcatcagacaagggacggttccttggaacttgatatagggagacatcctattgatttttccaaatcagacatagacgctatttcgcaaacaggaccagtagatagattggtaggattgaccgggaagtacacaccaacctgggcagtgcaaaaacctcctgatgttgtagttgatgtcagttac

SEQ ID NO: 2132 - DNA, 565 bp, unidentified
  source 1..565: mol_type = unassigned DNA; note = unclassified viruses sequence
actgcgtacgggaattccccgtacgcagtgtttgcaagtagtttggcatcaaatatgcccttatgtagcagagaaccttctctcacgaactacgtgttcgtgttatttagctcactccctatgtttgtctatcttcaaaaccatattctaagtatgtgaattactaactcacaccccctttatgtatttttaatggaaaagcaaaacgacggttatctagcatgttgctagacactccgtggcctattgtctctcgagactctaggcaacaacagctatgaggtcgccccctcttagctaaccttatttttattaggatggtaagtcctttgtttatgtaccttttaaacatcaatttaccgattactgattcgtccttgacgatcactctcacgagtgtcagaattatacattcagaactaagctctaatcaagagcaaaattcaactatacaggcttttagttgtcttattttataagcgatcagtgaaatatcttttcaggttttagtatggcctttagttaatacgtttcacacgttaagaactataaaacattaccaacc

SEQ ID NO: 2133 - DNA, 565 bp, unidentified
  source 1..565: mol_type = unassigned DNA; note = unclassified Riboviria sequence
caaaaaacttgactaaatatcgctaatcctaaaaatgactcgagtgattgaatttactattgagtttcatgaggatgacattggagatatcagactactctcttactactttccagatgaaactgactctccaatcacactgactccagagatgattataaaatcagttgaagacaaataccctaacatttgcatcgaacaaacactgagatatgaactaatgcagtcaggtgatctcgtagatgcgagagcagacgatgaatttgaattccacgaagatcatgtgatctttaaaggtgaggaattcagttctattatgttgtatctatatgtctctattgatgaagaacaggaatatgttgactatgaaagacgcttgaataccatttgaatccttattgacaactttatgttttatttttatttatgttctagcagtatgagcatcatttgaaaaaatttgattaaacattttgattaaaaaaacctatttgatctaagaaataaagatttaagtttcccaaactttgaacacaaagcattttacaaccccaattcttcaatc

SEQ ID NO: 2134 - DNA, 566 bp, unidentified
  source 1..566: mol_type = unassigned DNA; note = unclassified RNA viruses ShiM-2016 sequence
tcctcataaaactagaaacccagttatgattctgggtgctacggcgtagcaaaaatcatgtgtatatatggataccaagtattatatgtttttgtatgtttgtgcttattgtgcttaggctttatacatatcggcattccacaaaaggaatacacctttttaggtgaggtttcgccagccaatgtaaaatataccactcatggcactgagcaatgctttgagattgtaaaatatcgcttactattaataatttgtataataaaaatgtgagagtaaatggatgtgaaattacctatgagcagccaaccattctcgagattttatcagatcttaaaaagtttggaataaatcccaaccgatttgataagttgtggcgtaaaaaccgcaaacatttaggtaaacgggtcgaatcttttgatggtgtaaccattccttcacaaaggattgtttatactaccgatatttctaccttagagccgcatagtgggactgaagcaacagtttcaacagcggacgctgaaacaaagactgccaacttgcaattcgttgatgatgttagtccacat

SEQ ID NO: 2135 - DNA, 567 bp, unidentified
  source 1..567: mol_type = unassigned DNA; note = unclassified Riboviria sequence
gtttgggttcgtcagttggaggctgttttgggctcggcccctggcatagtcggggctttcgttaaagggcggtggacaccagacctcccctctagcgatcgctccgtcggtgctaaccttgccctcagccatccgacaggtggtgcaaagatccttggtgggggatctgtccgtggcggcactgcaggacaaccgcgtagggaaacctacattgttgtggagctatctgatggctccagggaaactgttttccctgaactgctgggtcgtttggcatcttattctcttctcagagagagaaacgccgatcttgtttctgcccttcgccttcgggcgcaggagtggtgcaagaatgctgggctttcgagcacagtgtcttggtgggctgtttgttcagccatcaagttggcgtggcccgtgtcggagttggaaacctcggtttccgacgtcgtaggggtcgggatgtcaaccacttcttttcctggtctggcttaggccagatcctttgaccttaaggggctttgctttggtgaatgtcccggccctcttcttgagggttccaccctg

SEQ ID NO: 2136 - DNA, 571 bp, unidentified
  source 1..571: mol_type = unassigned DNA; note = unclassified Picornavirales sequence
gcgaggataccctcaccggtatcttcgcagactctaaacaatctatacagcgtgtgtatacacgtttgtttgatatgattgttcatttgatttaataatgttttattgcctcagagtgaaatctgaggtttggaagcttacatgcttttaaaatattcattgccaccatggtttacgcaccataggtggtttgtttcattgaatagttgttgatttctcgtataaaaacacacaccctccaaagttggaggtctggtttctaagtgcataagcttggaagttaattgtgtggattgtggccgagaagctgctattgatcttgtttaagatggctcgatcgtaattgtaaaatcatctctctatgtaaatagtgaaaattgccaaaacgcacgtaaaacacattgtcgtgttagtcgtggtctacagagtattgtaggaaagataggtttgctcagcctttaaatgagatgatggtgtaaacaccccctgtctgacacagaggaagaaatgtcaaccgtttagtgtagttcgagcacttattatcgaatcggtaggtccaccgtaaggacat

SEQ ID NO: 2137 - DNA, 571 bp, unidentified
  source 1..571: mol_type = unassigned DNA; note = unclassified Picornavirales sequence
tagtgacccaggggggggacttgcgagtccacctctgaggaatctatttaacgccctggactagcgtatagtccatgctgtcgttttgcacaaaaacgtttaaatgtttgtttgttattacatttgcacacatgtaactccaacacaccctatcctaagtacattacctcgtggtattatgatactggcagaaacagaagttgttggagtgaccttttagacaacagtttagaaagtggcgggagtatcgaacccaagcgctagattgttgtatattagctcaattcattcaattatgtgactgtacatgacaaataccattagaaatcttatcaccaccactggttagcaacccagatgtctttggcattgcacggtctgctataaggtggaaccatggggtaagcttcgcaagactaagatactaagtccaagagtaagggttaagaatttcttccctgtggcagtaccactcaaggatgaatggtcataaggaggggtcctatgactgaggtattataggtgatgaaccagcgcgcatggctgtcttctagcgaagtaaaataaatat

SEQ ID NO: 2138 - DNA, 572 bp, unidentified
  source 1..572: mol_type = unassigned DNA; note = unclassified RNA viruses ShiM-2016 sequence
gtgcgcagggtttttatccctgcgcacagctttactgatcatggtgattttcttgaggcatatatcggcacctatgtagtcactgaacttttgtgttaagagagtggctttatcacaatgagtttatctgcatatttgtcgttattatgtcttccttttgcaccaagatcatttctagtgtgaatgaattatgtatgaatgtgaacaaaaatatagataacctaccggttctttcaatttcgtattctttatacattacatacttgtacctttgctactattttgagccttcggaaagctctttgagtgggtagtagtatatgttaccttaatgctaatatgtacgggacgatgtatgtccttacagtgcttgattagatgatagtgatgatagatatcactgcgtgattcgttggtagagcaatactgtattgcatatgatcccctaggcggatgagcattatgtcgtagtatgatagatctttattttcttttgaagttttatacgtttaagggttttacgttaaaacctcagagttcattgcttatattttatattgttcattataaac

SEQ ID NO: 2139 - DNA, 573 bp, unidentified
  source 1..573: mol_type = unassigned DNA; note = Hubei picorna-like virus 78 strain WHSF6879 hypothetical protein 11 sequence
ctgtaaggttactcccttacaggttctttgataatatattacagctgatttgatatcttacttgtgaacattcagatctgttttaaaacacttttctgaaatgcttagcttgtattttattattttcagtgtaactatcatctttatctggtgatgttgctctcaaattttgttaaatttgttagttcagcatgctttttatcgtatggtttttacagtaatatatttgatgagaaaccttttggaaaaaacgtttactttaatgtaaacagtttaattcatattcatttattaatattttcattttcttgtactttgtacattcattttcatattgtcccttggatttaaaggacttcttaattgagaaacagctctctgcggagagtgtaaataacttatctggggtagtaacccgttaacagtttcaatacattttgaatatccttaaagtcttcccttcccgtatttaagctataagactcggcgagttccgacgatggcaattttgttttatcttttcttacggagtatgattatttgctttttaatgatagtagtaacttcggttca

SEQ ID NO: 2140 - DNA, 573 bp, unidentified
  source 1..573: mol_type = unassigned DNA; note = unclassified RNA viruses ShiM-2016 sequence
gtgtgtgtgtgtgtgtgcgtgtgttagtcagagttctttgggggccacaagttctcggtcacgacagccgaccggccttctattggcaggccggcggtcagggacgtagcatatcaggggcatcatctcccgctcgctcgccccagaggtcaacccgcctgacggcggaatcggctcaacggggcgatcgggacgattagggtaggtagctctgcttccgctggactcgcgtgccgcagaaggcgaagagggggcaaacaacgacctatgcaccgaccatatccgaccaattcacatcccgggtacgcgactccgggaactcggtccacaaaatagaatttcacgctcgtccctagcgactttctgaaaaccgaaagtcttccgctgggatcgtgcgggggcgtgtaagtggggcggtgcgtgttcttaagttggtgttaacagctgcgccgcgactatatgtaggtgtgtgtgcgtgtgtgtgtgtgtcgcgtcgtgtcgagtcgtgttgtccgcacatttgagtcgtgctgtccgcaccttttcttttcagtgtgttagaatacccgaggc

SEQ ID NO: 2141 - DNA, 574 bp, unidentified
  source 1..574: mol_type = unassigned DNA; note = unclassified RNA viruses ShiM-2016 sequence
gattaagttactttaaatggatttatcaaccattgtatttttagtatctttcctccttgttgggaggtaaaatttgtggacttgatttagttagtatttagaaagttttcgtccaacttttgtttgatatactgtgccgtcatattcttggcacaattaagggttgacaccccggtaattgctcatgaattgataattctgagcaactttgtttgatctcttatgtaagagttatttactccatagaagagtttcatgttggtgatacgtatgattgtggacccgtctcgtagggttattttaaacacatgattttaacccagtttgttccggctgggagtacaaaacaagacttctgagggtggcaccgatgaagagtcttgagccataattgaaataaatctatgtgaggctttgtttggattgtttagtaatctgtacgcgacgtttaaggtattcaaaaaccttggcttcggccgtaagacgtgcatgatcgctttacatgaatttcattgttaatttcgcattagagtgatgctttgttgttgagcacgcacttttattctttatcgct

SEQ ID NO: 2142 - DNA, 575 bp, unidentified
  source 1..575: mol_type = unassigned DNA; note = unclassified Picornavirales sequence
cccagcctgggcacctttttaggtttatggttagcgtttccctttaacgcgaattctagtataaggttcgctggctttgccgcaccttatattctctctttcctcttattatcccatctagttttcaatcttttcttcaactagtcactctttctaatttttcccttctattttgggggcagagtaagtctgttacctgagtggatagaggtacacctctcgagtccaaaccttttctttttgatagtttgatcgcttcggtgggcacatagtgatgagaagtaagcggtcacaggaggatacaagtctagtttccatggtagttgagaagttttgagatcgttgtgatacgtgccctacagctgggtaggatgtccgagtggacaccatctcgtggtgacttcaatacattgcttctggaggacttggcttatggtgttggctaacaccggaaaatagcatatttgttgggtagaaacttgactagtgttagggtggtggtaacgaacaaaccctttgccagtactatatgtccgtgcataaataccgatttttgcccccaaaaccgctttttc

SEQ ID NO: 2143 - DNA, 575 bp, unidentified
  source 1..575: mol_type = unassigned DNA; note = unclassified ssRNA positive-strand viruses sequence
gggaaatttgtgagattatcgccctaaaggataactctcatgcgggtccgagtcccgcctgggaacgatatgtcacgtcaaatggtggtagggaaaccgttgaaccaccagaccaccctggtccggcttgtaggctgcgtgggctgacggaacagcagttggcgaggagctgcgctatgtaataacgggtggcccgttcctagtcatcgtcgaggggcaaataatcgctcccacttcggtgtcctcgatgtgaaaacaaactcggttttctcgcgggttggttacctgctccagtgagtcgattaaatggggattagtgctgtagggccccagccacaggttcggcactggtgtaacaaccgtcacccaggccagggtgtatgttttggccaaagacacctctagttccctgccattccggggaaggcggttttccgctaggtggagaaccaggctattctgtttgcagattggtgcgtgttagcctggactgtgggtgtcagtcaactcacctgtgagagatggtcatagatgcctcagtttaatcttagccttgaccgggtcagcgctccctt

SEQ ID NO: 2144 - DNA, 578 bp, unidentified
  source 1..578: mol_type = unassigned DNA; note = unclassified viruses sequence
tatcttcctcccccccgcccggcatggcttaaaagttccagaatgcaacaatgaaggttacgttatgagtaaacggtcttggtggtccactttactgtgggtcaccctgcactgtctctaagcttgcactgctgtgccaatcatgagcgtttgttagttaagctgcatccacttcactgtggatgaagaagtcgttctccgtcttcactttcagcatatcggagcctcagtgcgttctgacattaatttgttggacccctgttgagtgatatggaatgacccggcagtaatgtcgttaggtagggccccggtgcgcttcgctgcgtgcacccctactgtatgcaacctgtgatccattacaccattggcccattaggctaggttgctgtccgagccgatcgtcctaattagacgagcatcgtgagcacataactcactacgtcgctgtgttacgttggtccccaccctccgtagactcacccacagcccgtgaaggaatacaaggtgtccttctgtgtagagactgcacgctcggcggtctagttgccacactaggctgaaaggaacagtccacccac

SEQ ID NO: 2145 - DNA, 578 bp, unidentified
  source 1..578: mol_type = unassigned DNA; note = unclassified Picornavirales sequence
ataactccttaaagagaacaatacttataggcaataacaacaatgcaacaatggaagttaacacaggaggattagaggttattacagtctctaactcaaatataacgatcatacctaaagaattttcattaacatttacatcttacaatgcccagcaaacgttgtcactattcccatttcaaccattaccactaaataatttacccgaatatttaacttttgacagaaaatataaaactaccactccttttactttaacgtttccaactgaaatgtctcaggttgtgatggatatatttgggttagttataccagcaaattcccttagtggattaacaattaattatgtcattcaagattcagatgcttttgtgtttcaaccccagatttacccgaatcttatagttaaatctaagtcaaattcagtgaaccgctcagacgttatttctccaagcactcgtctggtttatcccaatggtttcaatggggatataattttatccttcgaaaccttgcgaggcacgccacttttatctgattctcccttggtatttattgttagtttgagttaaggaggc

SEQ ID NO: 2146 - DNA, 578 bp, unidentified
  source 1..578: mol_type = unassigned DNA; note = unclassified RNA viruses ShiM-2016 sequence
cctcgtacggacgttaaccgtccgtacgagatatagtctagttggcagcttaaacccgctgcccaggttctacctgtattttaggtactgttctggtttgctctggaatgggatcgcatcgtacatggaagaaccatgacgatgtcccactgtagagtgtaccacactgttactgctacgattgacagctatataaaagtttttaatggagggggagttaacctctgtaaaaaatcataaacccttataaagtgtttttcatactgattcaaaggcttgcacttgataaagcctcaagatctaaccccataatcaatgggattactgtgcatacggaagtaccggagccagttcttatgatggtattcgcttatatgccgaaaataaagcccccgtcctaacaaaacaaggtgggcaccctacacgggtggacaccgagccgtagagtcacgggaagtgtagatttgaaagagcttgctcttagtctgcttctatacgcttgacagagatttgagttttgcacttgtgtatatagcgtctcatttgtcttgttaaaacgtgtctcgatttgttgtcga

SEQ ID NO: 2147 - DNA, 579 bp, unidentified
  source 1..579: mol_type = unassigned DNA; note = unclassified RNA viruses ShiM-2016 sequence
actcacccttttacaataaaatttctactagtaaaagtaaaaggatgcttaaccgttaaatgctatcacactaaccgcgtgctctatttagagttatatcctaggatgcgcgaagagcaaacctcttaatatccaaggaactagtagtcgagtaaatgcactaagttatgctttactttaaataaataacttgcgaatcaacaaaataataataatgaaataaataatgtagcaccccctagttttaatgacgcaccagatgcatctttgcttcctaccgaacagatatcttcacttgtaacgcacgatgatggaggaactcctcatgaatattattcttctaaacctattcacgaactatcacaaattgaacaagcgactggtaacgagtttactaaatctttggataatttcctttctacacccattagggtagcagctggtacttggactactacacagacggcaaatactgacctgcaaaccttaaattttccggatgtcttgcttaacaaaacattgattgcaaacaaattagatggttttgctttcttgcatgctcgtgttaagtttcaggtg

SEQ ID NO: 2148 - DNA, 580 bp, unidentified
  source 1..580: mol_type = unassigned DNA; note = unclassified vectors sequence
ttgcaataattgactcagatccagttttatagaatcttctcagggatagtgataacatctatttagtaatccgtccattagaggagacacttttaattgatcaatatactaaaggtgctttacaccattgtcttttttctctcctaaatgtagaacttaacaaaagactcataatatacttgtttttaaaggattgattgatgaaagatcataactaataacattacaaataatcctactataatcaatacggtgattcaaatgttaatctttctcattgcacatactttttgcccttatcctcaaattgcctgcatgcttacatctgaggatagccagtgtgacttggattggaaatgtggagaaaaaatcgggacccatttctaggttgttcacaatccaagtacagacattgcccttctaattaagaaaaaatcggcgatgaagattaagccgacagtgagcgtaatcttcatctctcttagattatttgttttccagagtaggggtcgtcaggtccttttcaatcgtgtaaccaaaataaactccactagaaggatattgtggggctagcaacaca

SEQ ID NO: 2149 - DNA, 582 bp, unidentified
  source 1..582: mol_type = unassigned DNA; note = unclassified Picornavirales sequence
gcatgatacattttaaaattcccattttgggacgttgattattgcgtgatataatcattttcctttggacgttgactgttgcgtgattcagtcgtctttttcctcttgtgttattttctctatttaataaatccaaaaacaaatagagtttagtttccattttatattatttcgggcatcgttttggtcaagcgatgtagatcatatgtatgatcatttgttagcttatgtttaggaaagcattacgaatattcttaagatacaggagttttgcttgcggcgtggtacccgtaagacctcacaccagaaaattagttattttaatttgttgtctcactgccttgacccgttgcgattagaaagtaccaggattggtgccatgtgcttccgttatatcctgcgaaatcgataatgtcgactgcggctggatgggctttgtttcagggcaacattgagaaataccaaaaatatgtttatgtgtgagtggctcccgaggtcggggatattcactgtgatgggcttctgaacataagagtactaacatgtgtgagtacttgtgatgtgaccacctttttaaacatt

SEQ ID NO: 2150 - DNA, 583 bp, unidentified
  source 1..583: mol_type = unassigned DNA; note = unclassified Cucumovirus sequence
tttggtgtctttccaaccgacgtatgattgtcctatggaaagacaccaaagcgggaagatcatggttatgtaacgaaacgcattgcccatctataggagacaactccttgtcgcctagatcagctaagtaaattctcaaagacccttcagcatcagtggaaactgttcgagtaacagcacataatacctgggggacgctcatatatccttttgagcacaattcaccaacatcatatccagacttaaagaaggaagcaatacgaccgtgggtcatctcgggaacgaggggccggactgaaatagcattatcagcacgcatccaatgatgccggcctaggtcacactcagtagccattttcttaatggcttcagggctaaataatatcttttgaagatcgtcagacgtagccgctgaggactgttgagttaaagtcctactggtaccttggaaagccatgcctcggtaatcttaccactgtgtgtgtgcgtgtgtgtgtgtcgagtcgtgttgtccgcacatttgagtcgtgctgtccgcacatatattttatctttctttttcagtgtgttagattcccgaggc

SEQ ID NO: 2151 - DNA, 583 bp, unidentified
  source 1..583: mol_type = unassigned DNA; note = unclassified RNA viruses ShiM-2016 sequence
tttatagatatttatatctatatctttttcacgttggaaggttttaacattctttgaatggtttttctttcaacacccatctatcattcattttattaactcattattcttttaatcatttcttcgttttttcagatttactcttgtcttcggagtaatgactatcaacctcttataatgagtgtttatattatttgatgaatttattgaatcactacattaatttgtggtagttggtgaccctgggtttgaacgtaccctcggaaaaatcctgtttcaatatttacatcatttaatatgaatgttctcgagctgaactcaatgtagctcatcctaaataaatctttgagagtttgcgcgactaaagtgccaagatgtggaattcatccatgagtaaacatgtaaaaacgtgcgccacttaataatatcttccgtgatccaatggtggtggggtgtcccgactcgaagaggtgaccgcgcacttgagaccgttgcgacatacgatctcccctgttgctttgggttaaaagcatgtccttctctccaattacgttttatggttacaacttttgctatatagata

SEQ ID NO: 2152 - DNA, 585 bp, unidentified
  source 1..585: mol_type = unassigned DNA; note = Hydrocotyle vulgaris tombusvirus strain pt175-tom-27, complete1 sequence
caacggggctgatttcttgccctttcgggcggtttgtttgccctttcgggcggcttgcttttcagcaggctgggtacctttccgcacctgtgagtaactagctttcgctggttgcatggcggtaatactctctattaccgccatgcaaccagcgaaagctagttactcacaggtgctgaaaggtacccagcctgctgaaaagcaagccgcccgaaagggcaaacaaaccgcccgaaagggcaagaaatcagccccgttggaagtggctttgggtaagttgttgcccggagtgcatttggggtggttgggtaaggttgtggctgagttggccaagcctagccctgggtctgcggaggcctcgcaacctccgttgttcagagcgctcactgctgctctgaaggtgattggcggccaggacatcgatgctgccaatgcgtacaggaacagctctgccgtgaaagagtacgtgggaaaggtctttccccgtccgggaaacgccaagcagagcgaggggccggcaacgaacgtggctccgttgaacagcaagcagcgtcgggcgctcaagcgtgccgacaaacaggccgc

SEQ ID NO: 2153 - DNA, 585 bp, unidentified
  source 1..585: mol_type = unassigned DNA; note = unclassified RNA viruses ShiM-2016 sequence
gtagacggcgaaccgtcaccccaacccccccctcctccgccaccaagtccggaaccagaaccagaacccaaaccagccccacctccaacgaggttttggggatatgagggtaaaccaacctcccgagtttcaacagctcgcaatgatcagttcatagatgtcaaacctttgacatttataaaactgtacaaatgggagaatgaacattggagtaatgaaaattttactgccaattatctacaaaatgatcgcgagaaagcaaccccctatttcctaatccccgcagataagggggaattcacagtctatatagagaccgatggggaatacaaagtccgtgcaatcacagatcctaacaagggtaaatgggcaggctttgtagctttcaacgcagatcaagacggctggttcgcacgtgagtattcaggagtcaagatttcaaactatcaagctacacgtagctttgtcgttggacatcctgatgctgaggtcaataactgccacttccaaggttctcgagcagtagaaagtgattactactgctcctttgacctctccgtggccgaggatggtgcttattgggct

SEQ ID NO: 2154 - DNA, 585 bp, unidentified
  source 1..585: mol_type = unassigned DNA; note = unclassified RNA viruses ShiM-2016 sequence
cctcccctttcctccatgccaccgattctggcccctcacagggcggtctttcggtggaagtgacatggaagaaaggcgggggagggggggtcacgcccgctgacatggtgtcagcgggctatgccggcgaaccggaagggctacctgcccttgtgaggtgaatccgtggagagaataagagaacgcgttactggtggctttacaaccgagaagaccatcaagatctcgaatggcactgccacccgagtaaactatgctggcgtcaaggtaacgaagaccatccaggacacgctgactcctaacttcacggccttgctaaaatgcggacaattccttccgctaaatccagtacgaatcaccactgctactgaaacccgagtttcttcgggtgacggttgcaagatctggcccaattacaacccgggctacatctattttgatggtgatgttggtggtacgagcttctttacgagcgcgtattgccctccttggcccacgattggtgacaacgacggtttgattaacgccgctgtcgtcgcagcccgcagtaatgcggtgtctgatacgtgggatgtgttgacgttt

SEQ ID NO: 2155 - DNA, 587 bp, Mossman narmovirus
  source 1..587: mol_type = genomic DNA
gatcaagtcagccatcggtgggagtgttagagctcttccaatattcagttcatcactaggtaacctataagctcattagtaccagaatgtgatatgtttccgatacggggtgtcacactatgatacacaacagcgatagtacagattagtagttatatgcaggtctctaatacttaatggtacgacatctcaatcagacaaatcattaagcaccagccacgatcagtgtctcactctatagctacaacaatgagtcttcctatacagaccttccaagcactgtatatcacacttataatgggtaagggctagtttcagtcagatagtatatattgtttgggttaataatctaacaacaaaaaacttagggcaaaagaccctttaatcctggatctctgtacagtgccagacagaccaatccatagctccccactcacagtctcctcactagcaatcaccggaggattcgttgtggtaagtcatatagagctatatttatactttcaccaaattctatattcactgtcagcatccgctggatcttgtcttacaatctgttgcagggaactctatatctggattaaatc

SEQ ID NO: 2156 - DNA, 588 bp, unidentified
  source 1..588: mol_type = unassigned DNA; note = Beihai sipunculid worm virus 6 strain BHNXC41400 polyprotein gene,1 sequence
gtgcgctcgcaaaatgcgagcgcacacctgcaggtttatgatgttgttcttacgtcttatgacaacctgcggtggttagaaccaccttgactcgaactgagtcgaattaaattttaacgactgaaggatagacggttccccgcccgtcgactcctaatcggtgatccttaattttgatcgtgtttgacgatcttgatatggcccgtttgacgtgcctgaggtagttttcttagtcagaaagccttagggattacacgttagacggaattgatagattttatttcacgagatttgttttggtgaaacgttgacctcggcctgagcctactagatgatatgaaatctcgcactttccagtaccagcggaaatccgccgtactcagtgttagtgcagtgattgatttgatttaagttttatcagtttgtcgacgaataaaggagttaggtcccaaccttacaatagggatacctaaagaattcagacccgtgtaatgcgggccctcttcggaggtgtttgggctagtaccccactgataccacagtgttagttttactcctacgactgatttaaagtcatctgctcgacaa

SEQ ID NO: 2157 - DNA, 588 bp, unidentified
  source 1..588: mol_type = unassigned DNA; note = unclassified Picornavirales sequence
ctatggccacccagccatagtattgcggattagcgtcccattaagattttaatttagctattcacaaccttttgttctttctttgattgacttaagccgctgtgtctcacccttttttgtaacctatttatttttctccggattaatatttagccgctacatcccaccccctccacctcgattgcccatttacgacggtttttctgttacttcattgtaactgctctctctctctcggaatttcggtgatctctcgtactagcatagattacgagaacgatgccaatttgttgacttcgctcttcttttgctttgacgaatacatataagtcacgtacttttaaatgtccctttagacatgtttattaaagggaaagtgcgtatcaggatatgtatcaggtaccctgaaagtcataaggttagactttcacattagggatacgattacggcccagaatcattggattctctgggttatacgtaatacacacgcttattacaagcttctcttcttagatgttaatcattcaggcgaatggaacgcgcgtctcacgaccgtaagtactaatagccaatcacgaatttgaa

SEQ ID NO: 2158 - DNA, 589 bp, unidentified
  source 1..589: mol_type = unassigned DNA; note = unclassified Bacillarnavirus sequence
ggactcttccatcacccatttatatgtttgtattttacatatttatatattaagtgtttatttcttttgctgagaaatatgtacagaccactaatgtctataaactataagagtgtgcagtctcatacttgttcccacgggaaattgacgtgtatatattagtgatttagcgtatttaatatttatttgtcgttctgcatatttttacgtaccctgtatattacattttcatagaactttcagtctgtctagcccatgacttcactgctagatttgactataaacatagtgataagtcggttctacatttacacaattacaagccgctggcaattgctttacaaatattgccaaccgtgtgggaaaatctccagaaaatacacacttgaaaggagatgagctacctcaggtttattcacatcccagagatgatccattggaattagatatttcacctatccagggactacagcgccaggttacgatcggtaatctctcatctgaatctttagagatatctgaggaaattcagtcggagaaagtggaaatacaaccacttgatgatcgtgagagagaaattacagaatta

SEQ ID NO: 2159 - DNA, 590 bp, unidentified
  source 1..590: mol_type = unassigned DNA; note = unclassified Closterovirus sequence
gctgcgtacagcgaaagtcaaggacttgaagctagctccgagttttgactttcgctgtacgcagcgattacataatttcgcgcatctggcgcgcctttaataccgttggagtcctgcacttcttcggcactgatacaaccactacggtggttaaggagttttcggctgctgggccgatcgtccctttacggaaatcctgttttccgttctctgttcgcgctgctgttcgcgcgattaaagctgccggacgtcctattgacgctccgcgctccggatgcctctgtggcctccctgttatcgacacatctggtgtcgtgcgtccccgctctgttgcgggcgtttggaggtatgctctgtgtaaacctccccttactgctgccgccaagaggtccatccgcaaggcgaagaaagattctgcattctttctcagccgggcttcttctctcttctctcgggaagtcccctgcggcacgcgtcacagacttcgcaagcgtgttgcgaaactagctgaccccactgtgcgtgaaagtccccaagacaagactaaacttaaggggcgccgacatggcaaaaactctgacctcccgtat

SEQ ID NO: 2160 - DNA, 592 bp, unidentified
  source 1..592: mol_type = unassigned DNA; note = unclassified Picornavirales sequence
ttgggaaatccccaatgcttctttcaacaccgcctgactatgcggtggcgcttcggctcaaacaactagtcacttccccctcttaactactacccaagacttctaactacccttacctacttatttgtctaaatttcaaacttttattctcacgcgtcttataaacatcttttctatttgttatggtatgttttgtgatttgtgtggtgtatttcatttaatgggatctagtggaccgtgccccggttgggtatccgctccctttaaatgtttgcaagcactcttgacattataacctatcatttagtttacttgtttgtatgatcgtatttctgaatcgtaacatttatgcaattctttctcgccgagacttgtctaggagataaagttcctgcatatttagtgttacggttgtataatggagacttagatagcttcacactgaggacgctttttcgctatccttttgacctgattcaggccagtgtggagttaatgattgtatggatgggccctacaatttgtctaagacttggtgatagcctcgcggccgctcgccatttatacaactgaatagcggttgaaactctct

SEQ ID NO: 2161 - DNA, 596 bp, unidentified
  source 1..596: mol_type = unassigned DNA; note = unclassified RNA viruses ShiM-2016 sequence
gcggaagaaaaaccgcacacatatactaagcataaatcgaaggagatttaaagtgaagcatttatttaatatcgtaacaatgaatgtgaaggagccctttttatgttaatgtacaaacaaattgacaaccccccgtctacgcagacattaaatgctgtcttttatatattgagattaaaataatattttgtgattatagaaaacacatcaatttcttactccagagatagtaggagtctaaaactaatacaaaaccgaaatacactattcgaagtaagttctcgagggtagtgttatttcaaacgggacgcacaagagctaactagttaaagacactcttgcccacaaattgaagttccgaacgctgtaagaccgcaggacccttttatattatgaatactactattacgaatgtagtcgttagaatatttatttatataaataccaatcttcaatttctttatcgtatgatagtgacattttgtcatttagaagattactttatatatatatatattactttcaacgtcattttaacgtgtgatcttatataatgtcccatgcatttaatgcggctattagttcgctcataaaat

SEQ ID NO: 2162 - DNA, 597 bp, unidentified
  source 1..597: mol_type = unassigned DNA; note = unclassified Anphevirus sequence
ttgcatgtccagtaaccacacatatatcacgtcaatctcgatgtggtcattgtctcagaaaaacagaagggggtccttaattggcaattgtttgttcatacttgaatctcctgtaaaaaaaaccttcgagtgcctttatacttaattaagactagtaattatattttatacacataattttttatgttatacaccatgcatatacacatagctgtatctcttatcacattttaagaaaaaccgaacaaaagatggatcgagccggaaacacaccacaaaacccacatggagccatcagggatagtggatggatcactgtaaatggtcaactaccacctaatgacctagaacctcctgaaaggaagggcggaattacatctcaaccggtatacggctattgtaggcggtgtgattccgttgtccaggtcaaaccttctcccttttccagtcattatcgaaatggtcgagtaattgactctaagaagtcatcagtctgtgttactccctattatctaaccccatgagagaataaaggcacctacttgactcccactgtgagaagttgagccaaacgatttagaaaaacccgagtccaag

SEQ ID NO: 2163 - DNA, 597 bp, unidentified
  source 1..597: mol_type = unassigned DNA; note = unclassified Picornavirales sequence
cggaacgttgtatgctcagggcgtaggcaccacccacgggtggtgcctacacgtgtggactaaaccacacactcttttcagcacttagtgctgctatctctttttgtaacttagaagtttgtacacaatgcgttagggccacacatccagtgtggtatcgcaaagcacttctgtttccccggtgctagtaggagggtggctgctccacggccacttgccgaacccatcgttacccgactcattacttcgcaaagcctagtaacccagttgaagcaagcccggcgtgttccggtcaggaaaaaccccccctggccagaaacatgtgatgagggtgggctatccccactggtgacagtgagccctccctgcgttggcacatggcccgatctgggcgtggttcttgtggatgctgccgaagagccccgtgagctagtgtttataccgccggcctcgtgaatgcggctaaccctaaccccggagcagaggctactgaagccacagtagtcgctgtcgtaacgagtaattctgggatgggaccgactactttcgagtgtccgtgtttcctttattcttttattgttgtttatggtgacaaac

SEQ ID NO: 2164 - DNA, 597 bp, unidentified
  source 1..597: mol_type = unassigned DNA; note = unclassified RNA viruses ShiM-2016 sequence
tttgaacccacgctgtctataagtctagtgtaaccgtggctgtccccacgctgaatagcatgtgaaaccgtggccgtagaatgattgtacacttctaaagaactgtgcaatatttaacctttttcccttacgattttattctatatatcagaagcaagcgttgattgatatatactatacttttgtacaatggaaaattgtattagtttttaagattttagttataagcttctatcttctcctatatgctagttgactagtaggatgcgatctcctcttgaagaaacacacagcggattcgaccccgtctgttggcgcatttcaggtgattattttggaactccgttatcttcggaggtaggcaccatggctagaacccatggcggcttgtagtctcttataacttttgatccctcgataggcatgagcaaagtagcttagaataactcctcatgactggattgttagcgcatttcatccagcgcacttggaagatgattttatgagatatacgcgagccgtagaaggtcagtccctgaaataagggtggcattaccggaaacgctatcaccaattgaaagccgcaacccatataac

SEQ ID NO: 2165 - DNA, 598 bp, unidentified
  source 1..598: mol_type = unassigned DNA; note = unclassified Anphevirus sequence
tcgtctgtaggaactgtgtcttagtaagattaatcataatagtataacggtattaatctaatccttttgggtgagttataaccatcacctatctgcctaaacgtatctagtgcgatctatgtgtaagttagcctttagaagctttataataataataataggcatcggaagcaagtgtggtatcattataaaaacccgccagttacaaatcatgcctgtttcaatagcttgtgcacattgccactatcccattgacatccagtcagttggtgctcccagtgatattgggataaactgcaagatgtgtggaaaaacatcatacgtaatcaatgccccattttaacatgggtaggtagaaccgccacaccaggtttatatttatcttttgctcaagcacaatgcaacctagcaaatgcattaatatatctatatattttgaagattatacatattgtgcagctacattatcatcactgtgaggcttcttttctttatttatatttggctaatttattcaatgtataggttctcttgcttataaaaaacccgccagttacagatcacttgtcgtgtatttggaacattgaaaatcgaaaat

SEQ ID NO: 2166 - DNA, 600 bp, unidentified
  source 1..600: mol_type = unassigned DNA; note = unclassified Riboviria sequence
gcgggttaccccgcatggcgttttgaacgtgtcaaccacgatacggttgctgtaggggcaccagctgtgtcccacctcttgctagcggagctcgttagccggtgccggtacgttaagtcggcaacataggagttagttttatttcttctttactatattctttgttttccaggttgtctgcataccgagagctgctaccggtgcgcccgccggggttaactgcatggctagcatgcagctgtggccgccaaaagtgcagatgtagtgactatcgttgcggtctttgatttcagggggcattgtacgcatcctgtatcgaacgggtcagttggggtaggctacgggtgaaaccccagtggtatcctaataatatttattaggaccagaggcacgctaacgcagcggataatggtgagtttcaagggacaaaaaccattcaacgctggggctcgggtgtcactcctgattcgcgaatacatggtgtgtacaatgtgataactcttgtcattgaagaccccatcgtaagctacaccctatgcgtttagggctactcaggggcatgttaggttttaaagcccatatgtttgttagtatgccagg

SEQ ID NO: 2167 - DNA, 600 bp, unidentified
  source 1..600: mol_type = unassigned DNA; note = unclassified RNA viruses ShiM-2016 sequence
ctagactggtcatgtattttgtgatcatgctacgcgaatggcgagactgtcaattaggacagcctcggtgtagatactgatagtatctccgggtctcttatatttcagtaatgaaaggaggagaatactttggaaacaaattttgcgttaagcttaactactctaaccaaagtaacaaccgcagtctgtaaagcactacgatcattaggtttgtcaaagagaaaagaacacgcaatcgaggatatattgataaaacaattgtcctcctcggggcctgagtatgttttaaaacgcttatccgaattaacggactggcgaaagaaacatctcgagggagagctaagttacgctcccgcatggcacaagaagagtacgttaaaggatggaacaactaaaccatctgataggctgggaagccaagtctggaaattatcagacaaagctttcttttgtgtagttggttgcttgaggaaaagtatagagttaaatataccaaccgaaaagcagctttctaaatggttagagggggtaaggtgcgaaatcacatcaatacccagcaagactataacgctatccccaccagttgaaacaattgactgg

SEQ ID NO: 2168 - DNA, 602 bp, unidentified
  source 1..602: mol_type = unassigned DNA; note = unclassified Picornavirales sequence
gccagttcagggctgtaatcctgggaaatggaccgaatccatcagtgatgtagacctgttttgtacggaaaagcattcaggttagatcaccgtttgttgggatacgttaatcctcacacccccccccattccatttgtatttaatgtttagccgggtggtgtccggtatataaattaccaatgtttaacggatttgtttgtgtaccttcggtctgaaatcctaatgctggataatccttggcgtctgtgtttcacggtcttggaccctctttaggtgaatatgattgcaacctgtcggccctcttcggagcgtttagacatatcatattcttgggtcgctagcgcttgctctaaaccctcttagttgaaaattagagcacgtacgaactttagtggtcagggtgtacgttaaccacctataaaggtcatgtttatccacatcgaccctcaaggctaaccctttgagttaaaatcggatatcacttcgtcaaaattcgtcttcggtttctgcctccgcgtcttcggtttcggttagcgtatcttcggcttcgattcatgctttggaaaagcgtgttgagaaattgtctcttattgtgactaag

SEQ ID NO: 2169 - DNA, 602 bp, unidentified
  source 1..602: mol_type = unassigned DNA; note = unclassified RNA viruses ShiM-2016 sequence
agtgtcgcaacgaaagcaatgccccctacctctttgatcgtccttcatggtgggaaccgtgttggaatgcattgagggtggagagaaaacttctttaggttagtatcgatatccaattttgtgcgtggaaagcttgagctggctgaccacattttgcacttacttagcttgcgaaccaaaagaataatctagcgttcaatctgcttaagattgacagagagaggtggtatcctctccaagctgacactgagcttgtggataaagacagtggggaaggcgtaaaggttcaacaggaaactgtccggtttcatgacaatcaaaaatcttattcatacaagattccgactgcacctgataccattgctgaggattctgctattgacgcagcatctctcggtgagtttttgagccgtcccgttaagattggaacagtcacctggagtgaatctagtgcggctggtttagcaacatccatatacccttggtctgcattcttcaatgatgcacgcatcaaatataagcttaataattgggctttcattcgatgcaatttaaagatcaaggtgttggttaatgcttccccattttattatggagcagca

SEQ ID NO: 2170 - DNA, 602 bp, unidentified
  source 1..602: mol_type = unassigned DNA; note = unclassified RNA viruses ShiM-2016 sequence
caaaaatccaagttatacatcaagccaagagacaagtgcaattataaataattaacccaattacctacagacaatccaaatatatcggaaaatgaatccaactttaacaggtggcacaggcgaagcaagaaatggtcaatgggataagagaagaaaacaagcctggctaaatgatgcgctattgctgctcgacttgaaacttgggtttactatcaggacacgatcagactcacagctacagatgctagtatcaacatttgcaagcaacgagaagttgaaagagtattggcttaccttgggtgatacaactcatttggtacagccggccggtagttcagcctcatcgtacggtactgcgtttgagtgctcatactcgggaatgtttcgagaaaagtacttagagtgggtgttccaagacaaacaaatagttgacgaaatattagaagcaataggccagccaaagctgtcaatagtgtagacccctgaggagcttagcgaaacggcaatgccgtagggtcgcccccatttgaaaaaagaagtaactacaaataacaatagctccaacaaataacacaaatacaaacaaacaaacaacgccaaaa

SEQ ID NO: 2171 - DNA, 603 bp, unidentified
  source 1..603: mol_type = unassigned DNA; note = unclassified viruses sequence
gggcaataccctgcgcaatcatttgaactcacgctgtctgtaaatcttagtgtaaccgtggctgtccccacgctgaataagtatgtgaaaccgtgaccgtagaatgattgttcttctttttgaactgtgtaatatttaaccttatatctaatattttattgatctatttatcagaagcaagcgttgattgatatatacttcaatatttttgtacgatatactgtattaattttaattttctttctcctactatatgttagttgcctaataggatgcgatctcctcttgaagaaaaacacagcggattcgaccccgactgttggcgctcttcaggtgactattttggaacttcaattatttgaaggtaggcactgtggctagaacccacagcggtaagtagattcttaattttatctaattatgttaggcatgagcaaagtagctttgaataactcctcatgactagactgtattgtgcatttcgtctagcacacataatgaaataactttaatttaatcgcttaccgtagaaggtcaaccccattttatgggtggtattaccggaaaacgctatcaccaattgaaagccgaacccaatataac

SEQ ID NO: 2172 - DNA, 603 bp, unidentified
  source 1..603: mol_type = unassigned DNA; note = unclassified Riboviria sequence
atatacagtagtcgactaagacatccgaatgcagtatccttaatgaaaagaataaaacacccagattgtacactgtacacttattagagttattacttttaaaataccacgcgtacatacgtgctattttaaaagtaataactctaataagtgtacagtgtacaatctgggtgttttattcttttcattaaggatactgcattcggatgtcttagtcgactactgtatatggcgtgcacttctgctgcctaaggaattattgcgaaacccccccttctcacaaacacacaaactcacaaatactctcgaactcatcacaactcgagttcagtttttatataaagctggtgtctgagaaacagctagtcgcgagctagtgtactatatgtcatgtctatgtagtacagtttcaacacgtatctttgccttatatgaattccccacacaaaaatttccttctgagtacgcctcccggtttcataccttactgaaacacgcgaggacaaacggccgtggcctctcagtcgtagctatcaaaactttatagccgaacaccgctatggcaaccccatggttattaggcaattctgaaaatcttaaact

SEQ ID NO: 2173 - DNA, 603 bp, unidentified
  source 1..603: mol_type = unassigned DNA; note = unclassified ssRNA negative-strand viruses sequence
tatagaaacagtactactcgtgagctactagacagctgaatctcacttggactgattacattcgtacatgctaatcacacttgtcctctggcaatgcatccatgtgtagttgtcacgcaaccggatcacattcgtacacattgtgccgaacatgcatttggcatttatacagtagaagacctaattgaagacattgatctgtacaatcatgaattggctcaggcacaagatacaggcgaatggcgacacttcaatgaaatatggagcaataagataaacgaaaagaatttggatcacattaatatccttttagtgcccagtattggtttaggagagctcattcaatcaaggagcatcatggcattggttcttaatgacagttccttcagtttgtctctcagaggaatgtcgatgcaggataaacctttacagattgagttcagagaccagagcatgatgtttgaaggatatgtgaaacagttcgaaataattagttcgctttcatcctttataatgacttatatgtgaaattaaaggcacaatacaccgttgaactacacataaaaaaaaccgtttaaagcttagttctcttttaacactaca

SEQ ID NO: 2174 - DNA, 605 bp, unidentified
  source 1..605: mol_type = unassigned DNA; note = unclassified RNA viruses ShiM-2016 sequence
ctttcaaccccgggttcttttacaggtcttactaaccttgtctaacagtaatgttgacaaaattagtggtttttaagtgcgaagagctaggtttttccaaaaaaccgtacacttccgtgctcgtaagttcagcacgcctaatggaggcaattcttacatccatgagctagcaactccaactgctttaggttttagaatagattgttcgaattactgcatcaggaccatctgtcctttcataaaaccacttgttgattacaatccgctgtcagttaatattttgcactatatgtgctaactctgaccaggtgagtaattagtaagaaccatcctccatcaaagtcacaactggccacgtttgaatacgctgtctgctttgaggtttggattcaattgacacattgcgcggcattgatgttgattgtctgctgagctagcttagtgacactggggtcaaactgcttgtgctatcgtgtgataacgcgttacggcgtctgcactggtatgacgatgtccagtgactcgagttaggggaagtgcctaacgttctatcgtcacttaccttaaactttccgtttcttacggacccacagctggtaacacat

SEQ ID NO: 2175 - DNA, 605 bp, unidentified
  source 1..605: mol_type = unassigned DNA; note = unclassified RNA viruses ShiM-2016 sequence
gcccgagaagggcttattatgacgtgaaatgaacgtatgagttgttaaagctccatgtttaaaatgggggctctatattgttattttatgtttaaatataagatctgattggaactcttttcggtaaataaaaggagtgtgttcactagtaatgtttggttcggtttttgttattaagagatggagttaaaacatatacagcttcaaaagaatgaagaataccaacaaacgtataagttttatgtcccatacttatagtattgtgtataaacattattcgtgacacggctagattatcatacgttatcacgttgcagcgcgtgtgcagttttgaaaggataatcattaatagcgtttgttttttggctgtagctcttttatagagttagaggtttataatacaatagaatcttaagtgattcccataatgtccttggttgtattttaaacctcgaatacgtgaatgcaaatactcgatacctaatagagttagctatgctacccgttgttgtatgagatggtatcaaatccaacggagttagagaagttgggagatagacctggcttatggttagtttcacgtattttaggttgtctaaaacgaa

SEQ ID NO: 2176 - DNA, 605 bp, unidentified
  source 1..605: mol_type = unassigned DNA; note = unclassified RNA viruses ShiM-2016 sequence
acccaattatattacctgatattgatgatatacattacaaatacgcttttttaagtagtttcagaaataatgtttttttacattatcatattactactaatattaatagttttagttattatattaatccgcttagcaaatcattgactaagggtatcagtagatattatacggtccctttgaatgggaacacattttttgattcgtatgttattgatgatgttgtattttcacttgaaattaaatcagatggcgttatattagttgatgatcaacaagtattttcccttaataatggagttaataattacactacttgtacagtaagatttaaaactgtcccaaagaaagattctaacaatttactaatagttactatttatttagtcgaatatgaaaaaatatttagtaaggacccattaaagaatgatgaatactcctttaatagaactattaatagagtttatactaggtcatttggtgtgtccgattttaataaggtttttgttgatcctaagaagtcgataaatgtttttttatcgctggatacatttaatgacatagtgcatgactctttatattctattttcattgctcgatctgaa

SEQ ID NO: 2177 - DNA, 606 bp, unidentified
  source 1..606: mol_type = unassigned DNA; note = Mint vein banding-associated virus isolate NCGR MEN 454, partial1 sequence
cgtaatctgatagcctgagcgattcagaattcctccaaaccctgcctttgcagtcttcgttcctttcgtttaagttcactttcaatcctgtactttttcattttttactgcatcccatcccatcgttcatcaattcacaacccgcagaattcatcttctgcatttctcttcttttcattcttgtttttcgttcacttccattttctttgtgtctcaccaccacatcgacttttggctttgttttctctttgttcgttccatacttctcaacccgcagaactcgtcttctgcattttcgttttcttcgttttctcattttcgttcaaaaacacaaaaagattttgctttcttttcctcttttgtctctcacgagacccttgttgtcgttcacgcccagttgttttcacttgtttctctgttttccaaaacttttgttctctttctttcttcgttccattcactccggtttttcttcagttttgtttctctcctttgcaccactccatccttcgaacgttccattcctctttgttttttgttcttcatttccacttcttttcattctttttgtttccccttcgttccttcccacactcccatcgcggt

SEQ ID NO: 2178 - DNA, 606 bp, unidentified
  source 1..606: mol_type = unassigned DNA; note = unclassified Iflaviridae sequence
cgtagatatgttcatgtttgttttgttttgtaatttagttcaaagggctatacctacccctgattagtaacaaaatataaaactcggtacagaccggggcaaactaatatagttatttaataatctgtttgaccttatcttatgttcaatgccgtgttcgcttgcgtttttcattcccaggaaaatgttccccataagttttcagattattgtttaattattgtttgtgtataaacaattattttataaggcaaggcgttaattgatttaatgtttataagtatacggatttttattagcacgaattaattccatggtgaccaccgactagtaatcgagtactttgagtacaaggccaaaagccctctgtataacatgtgaagtgtgttagaaatgataataaaatgaagttgaaagtaaccgcttaatgattttgaacgtgacaagcttctatgcttaaaatcatctcatatttattatgtaattcaatagatgtgtatctctacctattggatgtattcctctaaggaatagatgatctaagaaccggtcctttggtggtttcatacgtcatgaaatcaccattcctttttaaaattttcaatc

SEQ ID NO: 2179 - DNA, 606 bp, unidentified
  source 1..606: mol_type = unassigned DNA; note = unclassified Picornavirales sequence
ggaggatactttgtttagctttgcaattcttaaactgttttccatttcactggtcgtttgacgcttgtagggcgacaggtgttcctagctcttgcttttctaaactatcgaattttgttttccactcgttcatatgtctatgtatgaatgaacggggtgagtcctcgttggccctcgctggagtgtaaattcccagtctttctggaactagaattacacaagactccaggagtgttctgaagattttcatatttaaataaaatcttttgggattgtccttgatggttgtagcgatgtctagtgtgtgtgcggattcccatgctggcaacagcatcctcacaggccaaaagcccagggttaacagcccccgctagatgcatggtaccccccatgcccattttggatatgaaattaaggtttgtttacttaggaatttcataaggaagcttctgaggctatgaaggatgcccaggaggtacccgctatatgtggatctgacctggggaccccttgcgtagctttactgcgtagtgtgggtttaaaaagcgtctagtagccttgttttcgggggaccgaaaacttccacattattttgagactggcatc

SEQ ID NO: 2180 - DNA, 606 bp, unidentified
  source 1..606: mol_type = unassigned DNA; note = unclassified RNA viruses ShiM-2016 sequence
gccggggctctttgagccccggttatcgtttgagtagtctgatagaatatgtctatctgcaggtcttgtcattgtgcgagaaatgcacgatgatgatgttcttgtagtgttgcgaagtcttgccagtgtgcgagatcgcacgttggtgatgttctttgcttgatatttttattagtatgaacagcttggtgttacactgagctatatgctcggtgtcgccaccccaaactgcctttctactactcgagcggttacgcagccgttttctgcaggtttttagtcaatttatcctgcgcgtaaaaattaaatacactttcaacccagttgacgctttttaaggattttgcgtgataaatcatccccgcttctgcggatgaaaagacggacatcgtagatcaagactgtaagtccgtgggctgcatttcacttttgtgaatgtagctgttacagtcagttagggtggatatttagatgttttatgcattgtagatattcaccacatcgatcacccggatgcaacagcgtgacggtgcgtacatgtagaaatagcgtgtatgtgctgaatgttactatttccctcattttttgagagctcatttgtcatgt

SEQ ID NO: 2181 - DNA, 606 bp, unidentified
  source 1..606: mol_type = unassigned DNA; note = unclassified RNA viruses ShiM-2016 sequence
ttttagctaacttatcctctaacattattgtgttagatttatttataccttaggaggtacaaattggattatttgacagaatacccgattgataaatctttatccattatcagtcatatctcttcagtctgctctcagttaggtggacctctctcacaagaattgaatactcttgttcaagaggggaactattctgctctaatcaactttaaatttgattatcagaagccctatacacaaaacgactttatttacgcccgtcaaattcaagctcttgtttcaaaacaggagtttattgacttaggcgtagatcgagaagttgaagcgtataaaaccttttctgaggctgaggaattatgttcgcgtactaatgaacgattccgtggtagtctatctgacgtttcgtcagagtgtcactccgtgctttacggggcgacacgaaaaatagctaccatactcggagacgttcctgagtacagtgaattaaatttctcttttggacctggagctacaaccaacgttaaacgagcgcggtctaaccctagggttaaacttgaagctcctctaacttgtagtttcgaatttgttccccatgtcgcgaaattc

SEQ ID NO: 2182 - DNA, 606 bp, unidentified
  source 1..606: mol_type = unassigned DNA; note = unclassified RNA viruses ShiM-2016 sequence
tggtgccgcgcggtgcttaatggtgttgaggcgcaagtaaaactgcaccacaggaacattaaggttacgtcccgtgtcggattagtgaagttgaggagaggtttcggttattttcgtgatgttgtgcaagacaacatttttttttataataatacagtcagcgtggtattgcgggctttgactgagcggttgtattacgttaagggtgtggatgggtttgtcccatgccctcgacccattgtaccattctccaggttgaaatggattcgcgaccgagtgcggagaggattagcagctgtgccgcctgtgtggacatatgaacaatttgtcaattcatacacaggtagcaagcacagacgttacacctctgccgtttccaatctagccgctagaggcttgagaagaagtgacggttacttgacaacattcatcaaagccgaactatacaatggcacaaccaaggctgacccttgcccaaggttgattcagccccgcagccctgagttcaatgttgaactaggacgatacttacgtccacttgagaaacttgtctacaaatccatcgaccatttgtttggccaccatgttgtacttaaatgtgacaac

SEQ ID NO: 2183 - DNA, 607 bp, unidentified
  source 1..607: mol_type = unassigned DNA; note = unclassified Astroviridae sequence
tgtgttgcaaaatcccacaaatcctcatatgttttctcaatttcaacaggatcactataatggaatttctcaaacatcttcgtataagctcgagacgtccaagttgtggatgcatagtcgtgttgttcataaggtgttattatccctagtaatggatctctcactttttttcaactatcaaggatggagtgaaaactcaaaccactatgcaaatggttgtcacacaggctcggaaaataaggaaaaagaaaccctttacatgtgctttttgtaataagacttttacaaactggcatgaccgccagaaatgtaagaaaagccaagagaaaaatgcagctgaaaagaaaaaagatgagccaaaaaacgagaagaaggggcagtagaaacatcgagctgccccgtttcggttttctcgtggtatgactatcttgaaaaaccctttggaaagatttgcctacctgaagaacaaacattgcttggctatatagcagttgacaaactagtggagagaactaaaaaagtgagagatccattactagggataataacaccttatgaacaacacgactatgcatccacaacttggacgtctcgagcttatacgaag

SEQ ID NO: 2184 - DNA, 607 bp, unidentified
  source 1..607: mol_type = unassigned DNA; note = unclassified Picornavirales sequence
cgtgttagtgtgatcttgctcttaatcggataaaaagagagaataataagatatagagtagtgctactaacataagggtcttagttatttagctttaccacacaaggtggaccgtggcagccccacaatatctagtgtagctctctaggatgggaacattaggtcgtgttctatccgaaattacccatggcctgcgtctaaaagtaataaaacaactaatggcaataataataccgctgtcattgatataaatagtaatacaggtattaatgagaaagagagcattggtcagagtaattttacagctcctcaagcacaaaattatgaagaagctccacaaatttctcaaacagttgaggagcaagtgcaaatcgtaacatttgatgatgataatgcagtagtccaggaacatataccatatgaaatagaagttccacgttttggaaatcaacaacacacggatcttttgacacattcagttgtgacgtttttaggaagaccgcggcttatttcatcatttccttggttggccgaatattctcggtccacgaatatactaaagttttcgaatcacggattgctcgtaccatcgaatattttatctccg

SEQ ID NO: 2185 - DNA, 607 bp, unidentified
  source 1..607: mol_type = unassigned DNA; note = unclassified Fusariviridae sequence
gtcaagatgcagcactatggttgtgtctacacttgtttgtgacttgaagtcgtcggactgtccactctgctccttgagacatggtggctttagcctttatgtcttaagtggtcgagttgacgggccctcgccctcaattctcattttatttatttgtttaatttatttggccacatagcccttgtgctttgtggagattatgatggtgcgctggttccgcactgacagggagttttgttttcctgtcagttcggggcctgtgaaccatctaatctcctcaacgctcatggtgactatgtgcgggagtcaactgatgccgagtatattattgaggttggcatggtgtttgccattccaacaccaataatgtggtcgggcccagatggtttcccacctggtcctcatcctgcgtcgccaaggttgtaggagtggctttgccgcccctgagatcttgtcgacgccggttgtggagccggtttgccactgttccccaaaattccttttcttgtctcattgtcaaatgcaagctgcccgaatattagctgagcggatgaagttcaaaggggaagcacccttacctatgccaccacgcgccccttggctgaaa

SEQ ID NO: 2186 - DNA, 607 bp, unidentified
  source 1..607: mol_type = unassigned DNA; note = unclassified RNA viruses ShiM-2016 sequence
cgccaattcttacgtcagtgtgttactgtttaacatcaccatggcttttagcactgaagtccaatggtgtttaatcggcatcgggttatgtcgtaccggtaagtatgtttatgattactttaacaggtttaaattacgggccaaggccatcaccactgctgctaattcacaggtcaatgctgtcatgcaagtgatgaacggcgacatctatgaccatatggaaattacagatgtcaccgaagatttgtctgaacaagttcttgattcatccgacaattctgttgtgaacaagcgtaggcgtgttagacaacgtgccccttttagagcttatttggtaaaaattggcaaagcaaaattcggtctgctcaaacgaactgaggccaatcgcatggttgtccgtaagtttctgtatgataattgcatagcacatggcgtgcttgcaagacacattacagataatattgacttcgccactgagatggtatttatacctacagagtccgagttgaccaatatggctatcaaatctactaccgttaatgttgagagtaacattgttgcccgcttgctgggcaccaatgatgctttcaattgatggggcccaagc

SEQ ID NO: 2187 - DNA, 608 bp, unidentified
  source 1..608: mol_type = unassigned DNA; note = unclassified Trichovirus sequence
ggtggaattactcaaacattttggatgggatgacaaggtgttgcaaagttacatcagaatgaaatgcacattgggttgcagactagggggtttcgccatcatgagattcaccggagaattctcaacatttttgttcaatacacttgcaaatatggtgtttacgttctgtagatatgaggttccagatggcaccccaatctgttttgcaggagatgacatgtgcgccctgaggaatttgaaagaaatcaatactcatgaattcattctgagtaaactgagcctcaaggcaaaagtcaatagaacaaaagtgccaatgttttgcggctggaggttgtgttgtgacggcctcatcaaggaaccttgtttgatatacgagaggttgcaagttgcaattgagaatgggagactgatggatgtgatagactcatattttctggaattttcattcgcctacaaattaggtgagaggctctattcacatcttgaaattgaacagctgaattatcatcaagttttaacaaggttctttataaggaacaagcatttgctaagaggtgattcaaggcacaacatctcggaactcgagtggctttcagacgaggatggcg

SEQ ID NO: 2188 - DNA, 609 bp, unidentified
  source 1..609: mol_type = unassigned DNA; note = unclassified RNA viruses ShiM-2016 sequence
ctttttctggccgcgcttttaccgtggtcggcataccacgtaggtctgatgatcaccgctaatcatttgacgcaaaaggccaagggggggggtgactattgcccggacgcacttgtgtaaacaaggtaagagggggaaggcatacatcaatgtccttcttcactcttgctatcgctgcaaggtagatttgtccgaaaacctcacggacgaggtatagactccaaacctcccgcccccgatcgtgtatcacatgtcgtgacacgttactcgtagttcttaggtctttgttagtaccaacaagtccatcccgcacccccctctggaacggctttgggagggtggcgcgtgcggcccgggcgctcctagcaaagggtgccagctgggttcaatcaacggttgtgtgttgcaccacgatcttataggattcgactcacccatagaactacaagtaaacatcacgcgtgcaatgacggctatcgcctgaaacaacgaaagggggcaaaactctttagaacatctgttctcatctagcggcagggagagggaattagctggcagtaaacctcgacctgaaatttttaatgcagccagggcgccgtttttactcta

SEQ ID NO: 2189 - DNA, 611 bp, unidentified
  source 1..611: mol_type = unassigned DNA; note = unclassified Botourmiaviridae sequence
tggaagcccctttgctttcatccgtcgctaaccatttccggtctccaccaccctcccttccacgcggttacgtcacatttgcacgtaagatcgttcgacgcctgttccctcacgggtgggacgccggatcttacgagtcttgtgtgctcggaaccgatccttctttgtcagcatgtttggagaatcgccgcagtgcgggcggacttcacggctatgtttccaaccctcgggttgagaatcaactcggacgttttcgtcacgatgacttcctcacgacgtgcttagacggggcaacccgtcctttgagcgtcgcttcgggtctgactgtcgtccagagtgccggtaagcctcgcccgctgagcaaattctcggcggacgcgatacacttgagaccgcttcataaggcgatctatgatagactgtcgcgcgagaaatggctctgccgtggtgattttacaactgacgttctacagcgcgctggtttttcctttgttgaaggcgaagtcttgacttcgggggattataagagtgccaccgacaatctctctatcgaggttgccgaggctattcttgacgaattgctcaagtccacggtctctgtgccggggtcg

SEQ ID NO: 2190 - DNA, 611 bp, unidentified
  source 1..611: mol_type = unassigned DNA; note = unclassified RNA viruses ShiM-2016 sequence
gtgaggtttatacctcacacacaattttgacccatctatgggtaaaatagacgtccagagttttttagcatgcattctttgagagacgttaagcacatgaaagagcatgaagttgtcgatgtacagagaattcattctccaaggcagggcacatcttagtatataaaacaaaacgattccgattatttacgacgaaaccatttaagtattaatcctgacccgattttgatatacgacaaacagctgaataactgttaaaactattcaaatccaacggaccagtaatcttaaattacctgtgacagccgaagtttagtaggttcccaatatagccgtgaaacgcttgagggccgttacagctctaatttaagacctacgtttttaaagcttggtaagcgctttacttgagcaacatatacaaaactagtaccaaatcttagtggaatttaagtatgatatttgaatgttagacatgtattatgtcaaatatcctctacatttctacataaaggtcatgcaatgctcagtggttattgcattatggtcgcagttaacttgcagttttgtattgcctgtgtcggagcagtagtaaagtaaacagacgatttcac

SEQ ID NO: 2191 - DNA, 613 bp, unidentified
  source 1..613: mol_type = unassigned DNA; note = unclassified Picobirnavirus sequence
tcaaagatcaaacttggctcaggagcaattgacggcttcaagagatcaggtggctaaggacctaggttatggtaccttagctgaaagtacacggcataacaaagcacaggagcagcataatgttaacgtccttggtgagcaacaaagacacaattatgcccaagagagctataatgtagcagtgttaggtgagcagacccgacacaacatagctaacgaagagctcacacgcttggctaatgaagagattgcacgaagcaatcgtgcacgagagagcgaaactaatcgacataatcttcaaaccgaagatgtggctaggcagcagttagttctatctcaagattcattggctgaaactgtgcgatccaatctcgcacgcgaaagtgaaacgcatcgatcaaacgttgaacgggagagagaaacgtttagatcgaatcgcgctagagaggaagaaacttctcgatctaatcgcgcaaaagaggatgagactcgaaggtcgaatctagtccgggagatcgagactgaaaggtcaaatcgggcgagtgaaggtattcgtcaacaacaggtgaatttaggctatgcgcagttaggtgagcagcgccaatatcaccaa

SEQ ID NO: 2192 - DNA, 613 bp, unidentified
  source 1..613: mol_type = unassigned DNA; note = unclassified RNA viruses ShiM-2016 sequence
gtgtgtttgttcaacacacatgttcatttttacccagttgctatgttgcaatacctaacttaatcagaggttatgttttagaaactcatgatattagaggttatgcttgaagaactcggtaagttgatatgttttagacactcagaaggatgaactcttgctggtcgtttattactcgttagtcattacgtctggtaccttcttgctcgtgagaccgatattgatggtcttctattactcgtgagaccaattttgttagctattgttaactcgtgaggcatgggatttattttaaccataaaacttatactaatatgagatggttttagccctatggaaatgcttagtacccttaggtgtgggaacacttttccaaagtcggaaaaacttcaaccgctgtgttgtacatgttgattgattttacatctcaccgctatgaaaaaggacattgctttattcatatgataaggacgatatggagccggtttagctacgtcgagactttggtcgtagacgcgtagtatgccaagcccattggtcaaactattaaggctctctggattagcaacccagtagtagatttagttttggtctgggcgtattccctgaagat

SEQ ID NO: 2193 - DNA, 614 bp, unidentified
  source 1..614: mol_type = unassigned DNA; note = unclassified Picornavirales sequence
gtagtacgttaaacgtacgaccaccgatgagactgaaatgacactagttgagattatttcaatatcctagtgttataaagtcaatatttgttggttgatcgtttcgtcaatcgatggcgctgacagccggaaagacggcaataataaaaaccaagatttagtttttaagttttgatttgattgcaaaagctatcttgaatagacaatcaaaatattaagtattgcaaaagcttcttaaagaagacaatatttaattagttagtaaccaaacctcatcgtgcccctaagggttaaccggttacgtaaaagcgtagaggtattaaggtcactgcggagacctaaaatccgcaattttatgttttgtaatgttttaattatagacttagatgtaactataagagtttataaatacttgtttcaagatttatagacaagatctgatcctatggattttagataaccttcatgttagtggatagtgtgtgtacctatctaaacgcataaggctcttatttcatatttaaagtaggactatgtattacggcgcatctaacggtaacgttagtcaagaccggagaatctcggaatgaattttagtaattcccaaatttata

SEQ ID NO: 2194 - DNA, 615 bp, unidentified
  source 1..615: mol_type = unassigned DNA; note = unclassified RNA viruses ShiM-2016 sequence
ctcgcacacgcgtttgcgtgtgcgaggatttcatttagtagttgtctctattttggagacacaattggtggacaggggtccgcccctgttacaccgtttgtcggagcaatggggtacgccccattgttccgtgctattgacgatttactttcttaactaggtatcgaaagtgttaaaccagctttcaccaaactttctacggagattgtaagattaaatctgacctgctagacgtatcataaaatccaatgtttactagtattgcttaaagctgtccgatcatgaggaagtacctactttcggatgtggtatttatgaggcccgtcacttggcctagtatgaaagaagtgaccaccaaaccagtccgcgaactatgttcgtttatagttatgatgtgtaccttttctaaggcgcgactatttagtctcacattttataaattggtgacaatttacataattatattcgtttagtgtgcggagagccgtagacctatggtgtatgttgatttgaaagagcttgctcttagtcagtacattgaaagccctagtggtgtagtaaaacataggtcgctttgtgaacgagaaaccccaacttttggggctttcagttcgc

SEQ ID NO: 2195 - DNA, 616 bp, unidentified
  source 1..616: mol_type = unassigned DNA; note = unclassified Picornavirales sequence
tgcgtatgtaacccatgcgcatgttttcatatagatatctttaaaacaatttgtagagaccctgcatattcttctttagaatcaggtatgagaccctgagtatttgctgttaagttttatttcgacgactattccgagaaatagggactctgtagccctggtattttgttctataactgtctggtttgtaatgaccttataaacatttcagttgttcataacatttgctataatttcagtataatatttctgtatgattataattttgcaaaaccccttttgttaatcacattttattcaaagcttcttaaatgaagttgcattagcattttatgcttttgctgtcagtctgatttattgttatatttacttattaatggtggcgagaattccactcgtcttgaaaacctttattttatatagaggtctgttttgttcacgctttaggtttcctatcgagcgactatgtgatgaaaaatgtggtagaaccaagtgtttcatcttatgcatacacctcaatgataggttgttaaaatctatatcacgctcgtgtcgtgaatgttgggtactctgatttaattgcagtaactttcctaaccgagttgtcatatcaacc

SEQ ID NO: 2196 - DNA, 616 bp, unidentified
  source 1..616: mol_type = unassigned DNA; note = unclassified RNA viruses ShiM-2016 sequence
atatgcatgggcttcccatgtatatcaattttatagtccgatccttattttaggtggcgagtatcctgctacatattttggcgagtacccttagcactggcgagtaccctatatctagtagacgattacccatttatttctgggttgggtgacccccttaattttaaataaccatcttatatcatattcattatttcaaatgttatattatatatgcttcctcatttattattaagtttgcttgatttaacaagtttgaactcgttatgaaacattgtctaagataactggattcggattctgggccagttatggagaaacggacgattgactgagagtaatggtgagactttttataattattcagtaacaactgtggttagtttgcggacgcccgaccgttctgtaccaattttattaagtctaaatgggcccttttgcaccttttggtccttaaggtctacagccattgcttgtagttacggacattcagacctccctgtttgatagcatctttctaatatttccagaagtatttgatttcatccccataataattttaagattgtgttttaaagtttttgaaaggttttcacaaaatctttcctctctggca

SEQ ID NO: 2197 - DNA, 618 bp, unidentified
  source 1..618: mol_type = unassigned DNA; note = unclassified Permutotetraviridae sequence
aagccctttgtgcttcgtccctttgatcctttctatcttcctcttctacgacgacaaactgctcacccaactcgctaatactttctctgctaatgccgcgttcaagtggcttgggactttcatctctgcacataagaaacaaatagctgggctcatatttcttgtcccggccacttttctgtcgtgcgatcccaaatgggcaaccgtagtatctgctgtggtttcctatctggtatcagaggtgttccccgcccctgggaagtatttcgagtacggcttccttggaggttcactcattctattgtgcaccgcaaggaagccgatccagttcgtcgtcgctacggtggttgcgctgctaaccattggtcttgggttgtggggctcggaggtatttgcctctttgccctccacctcacgccagggctagcaatcagcgacatccctctctgcgaccccagaaactgcaaagtctcctgtactaccaccggccacccgctcccttggtgtgacacaggtcccactgtctactgctactcagagggcaaggagtgcaagcaatgttgccccttagctctcccaccgtgtacgccatggccgtcgtgcttcttcacgactacc

SEQ ID NO: 2198 - DNA, 619 bp, unidentified
  source 1..619: mol_type = unassigned DNA; note = unclassified Picornavirales sequence
cgatgtatcggtaaatgtagtttaaccctctgtttctcgagagagacaggttggtgttctatgttctgctgcattgagaattgggctcccgttgtattgttgtacaaattgttgatatgtgttactcgtaaattttcagttaagttagcgttagaatttatgtgtctaccattataaacgtttgtatgtgatgtgttctaatttgatgtttatccctggtgttgaccgtgccaggcgatctgtaatatctgatgaagaagtggtgtagcttgacctacttgccctaaacttgggttttttattttaattttggaatacagctatttccctcctagttggattaagacagatggtgctgcttgacaatcagcatcaatcggtttggacgtttgtccagtcaagttgagtgtttagtacttgttactttgattttggaaattttagtgcctcatagctgtgagacaacactattagtccttgtcagagcgataaaggcttttcatgagacgtaagttgagcaattatgattgggtagcgctggaaatccgcgtagctcgtccttgttgaccatccatggtggtggatcagattgcttggctgacaaataaccacagatatt

SEQ ID NO: 2199 - DNA, 621 bp, unidentified
  source 1..621: mol_type = unassigned DNA; note = unclassified Picornavirales sequence
acacattcaatttgaaactcatattcattcactactgctccttggagcagtttgtgtttaatataaaacccaatttatatgttattatatgtttgttttgttttgtctgactgtattagcactattaacgtgccagtcgaaaagaaaataaaaatagaaaaatataaatactttataaactgttatgatgtcatttgcgaatgagattgaataagtacagaaagaatgttgagattgaaaccccgtttgagtccccaaagatgcatgctatattatctcatactctttgcatttttatgaatttcaatttatattgcaaaaagaaactaacatttcaaagttattcgagattgatgttctataagaacttatatccttcgaaaatttgttagtttaatataacgtacctaaagtaatgaaatatttaataccacccctcctttgagtagcttaacctctcaaagatcccgctgtggatttgtattaaatatgtaatgaaatgtgggaattgtactttattaaataacgaatgattagagcttgcccgattgaatttaggcttgttcaaattgatcgcttgaacaaagtattagatcactttttatggatttagtatgaata

SEQ ID NO: 2200 - DNA, 621 bp, unidentified
  source 1..621: mol_type = unassigned DNA; note = unclassified Picornavirales sequence
actagagacctttaacttattttttgcatcagtacttgtgtataaccttactaataccgtcattaaaactcaaagtagatttaatgaagctgttattggatgtatatttctactgattgaacagactttgtttgttccgtgcatggtctcaaaattaaaataaaataaaacaaaataaaacattataaaattgaaaatacaaaatattaccactttaaagatcactagaatgttttgaacatttctataccaccttatatttattatagagggctctatctacgagcacctagcgtttacagaagacgtaacttttgctttagcactttaaccttgtgaatggaatattggcggagggacctatgaggaagtacctactaacctcctttgttatcaaattttctgagtcgatttatttcgatgtttcatagttgtggcgcactcccactaaatttagatactcaaaacccaatatgtggcattcctacgttgttagagagttccgcgcaggcggctatcgcgtttatttaatagataaggtttattaatgtaagtagccattcttacatgaaatactaatcaccttctattatctaaaaccctgttgtttagctatatatt

SEQ ID NO: 2201 - DNA, 622 bp, unidentified
  source 1..622: mol_type = unassigned DNA; note = unclassified Benyvirus sequence
catccagtgtagcagcctaccatgccaagtatgtaaaagtccattttttgttctctattgctgagaaatttcttaacacgggccaacagtatttgtgtatggtgggtggatctcctttcttcggatcgtaggcgtctggttgagacgccatttaaggttgtgcaaggtgggcgtgtgtcgagacattcacgtaatcatcttctcacagggggtacctaaagcccccatggtcgtagacctttaggtgaccttagaaaaggcacgcgggcgactgattcgttcaaggctgaggagtctttaagtgttcttacaaggacacgaccgggttggaaaagccctctctctacagagagaaaagttgacaaagtccttacgcgataggggcgactttcccaatagggagtcccagtcgtaggctctactgttcagcttcgcctttcccaatagggagtagcagaacacgttcgggtaataagggcccatgttggtcaccaagtgcgaatgagcaacggaaagttttcggcaatcggatgaaagcgtcttaactctgaaaaagggggccacccgtgaggggtaagtgccatgtgcgtggagtttgaacggcgatctggaacccggtaag

SEQ ID NO: 2202 - DNA, 622 bp, unidentified
  source 1..622: mol_type = unassigned DNA; note = unclassified RNA viruses ShiM-2016 sequence
atcccttttgccttggagaggcgtaaaatctaccagctccggaactattcgtagcataagtttaaaatagttgtgtatatatggatactacatattttataatttacatgtttatatattttatggaagctttgtacatatagacatcctacccttaggataccggtatttactggaggtttcgtcaaccagggaaacattgtcacacacagatacagtgggtactgttctgatgtggtgtttatattaaatattgcctacttcacttaataataataatacaaacagtcttagaactgactcaaatagttctcctgatagcgcttatagtgtctcaaaagcagctcaacaggtttcaacgcaaaatgtacattttgttgatggagacacgccatggtcttacgacatttcatcatcaccggatagcaccacccagctcgcaggatttagcgatgcagaactcggttccttcctcggtcgtcctctcaaaatcagagaatttcagtggactccggaaagcactcgattgtttgaaatttttaatccgtggactgatttttttagtaatacagatgttttagagaaaataaatagatatcgtaatcttagatgtaatcttaga

SEQ ID NO: 2203 - DNA, 623 bp, unidentified
  source 1..623: mol_type = unassigned DNA; note = unclassified Picornavirales sequence
tggccgcaatcgctagtgctattggtgctcttgcaggagctgggattaatcccaactctattatgcaagctggtttgccttttgcccaggcagcccagcaacaaaattatcagcaacaaaatattcaatcttattttaaaggagaacaaggtttacaatcagatgtacaaaatcagtttactaaagctggcttgccttcttttatggcttataccggtggtaattcaggttctaacagtttgccgcgtcaagaattttcattaggcggcatgaataggttcgttggtggaaatgttggcgccaatatgccttccaccatgaatgctatgcaacagtattaccactggggtaacccgtttggaagttcaggtcaatttaatttccaaggagtgaatggttcaaatgtaccacgtaccaatcctataccaagcgatgcaaggcagaataatacaggttctacatttacaacaccagacaatgctaatacaagatattccacgcggggaacaccagctcaaagatcgactgctgaaggaaccactgtccctggagcttttctcaatacctagttaaaacgtcattgagagaaatacgtagttatatcttgcccagaaataactgca

SEQ ID NO: 2204 - DNA, 623 bp, unidentified
  source 1..623: mol_type = unassigned DNA; note = unclassified ssRNA negative-strand viruses sequence
aggtttcagtaactattaaccgaccgacgggtctggggattcttaattagtgggatggtataactatcatgatccgtctaattctgaatttctcgtaaaacaaatcttatttctaagacaaatagaaaaaaactcgactgctatagatccaatcattcatcattgtcactcgatggattccaaaaggatctactcagaggaacgatttctcatatccgtgatacgtccaacagatccggaagaagaatatgtagagattgatatattcactgagaataacatggacaatccgattgaaatgacaacaggtgaactccatgacattgtaactgataaggttccatttatgcatatttagtccactgtatttgtactctccacagacagggagaaggtactgatgtctgtcactgatagaaatgtcaagatccatttcctgaatcgatttatcacaatagacaacatgaggtttgatttcaattcaatagtactggctatttctgtagacagagaagaggagagacagagggaaatgaaggagtaagaaggatgatggaatctatatctgtcattagttcttgataaactgctatgttattacttaaagaaaacccgattgcatc

SEQ ID NO: 2205 - DNA, 624 bp, Phomosis penoulivirus
  source 1..624: mol_type = genomic DNA
tgcacgggtttagcccggcccccggatctgacgcgtgcctgcggactgttgaagtaggttgtcgtccttgcaatgtgagtcgattaaagagattatagtgccaaaggaatctcgcgctctcgagcgttcggcacttgcatgttccggtgccgggctgcgggttgacatccgcggtcccgttcccccctaggggtatttaaccggtgggtatgctagtaaggtccggccttcgggttaatgaacgcatattaaaatcttagatgtattcctcgagaggaacgtaagaacccactaggagatgctccaggagtggaccgtagcgggtagtgccgacggcctgggtggtggcggttgtgaaacaccgcggaagtggatgtaggggcgttgcatgtaatgcagggttagaaacctgccccgagtagcggtgtcgctgactgtgcctcgcgcgcgagtgacctccccgtgactgtgtgttcgtgcacggcgggttcttgccctttgggggccgcgaaaggttgtgtggacatggtcgctacctttcctaccacacccaaaactccgggacaacgaagtccctgatgagtataaaagcgaattgaaaatagaccccaaaagaaacagaac

SEQ ID NO: 2206 - DNA, 624 bp, unidentified
  source 1..624: mol_type = unassigned DNA; note = unclassified RNA viruses ShiM-2016 sequence
aagaagtgagactttaaaacactttatggatcgcaattccattctttggtaaaacttagacaaattgtagcttgcagatttattagaagagtttatagttgtttggcaaatgataatctttatattgcttacaattatttcacctttcgtgccgtattgtactctagttcaaaatcatttgtggtttgctattctatttaatgttatattagttgttttttatgctatagccattgtacatgtggcaaacgttgttatacatgacgtagacgacgattaatatggttgttgttattaatgctccttttactgaagggggtgtttctagggttgggaaattttttgttttagttttcccaaaaaaatttaaatgtaggttatttgttaccgtgtaccacgagactttcagctgtcaagtgggcctatcatgttggtgctattcccaggagaataatccgacgagtcattactaaaaatgctacccattgtcaaaaatggagattcgaggagagaactgctaaggccaagttgcttcaacaagtgcgggttggtatagccaatagtgttaggaaagagaaggagaaattgcgtgatgagaaatttcagtatgagtacgagcctcag

SEQ ID NO: 2207 - DNA, 624 bp, unidentified
  source 1..624: mol_type = unassigned DNA; note = unclassified RNA viruses ShiM-2016 sequence
ttagcggaccgcattttgtctgcgcaaagtgacctagggtttgaagaatatatagaccgggctgactatatcaacgccgaaatgcttgcggatgcactaggcattgatgccccggattactcgggagaagaagagttaaaggagaagttgcggaagatagaccagaaagtcaaggaaaaggtctgtggtacaaaggagctgcccaggaaagggaaggttcataagcgcaaccgtgcgccgttcatccgttcaatggtaactgaattacggatggaattcccgttcaatgtcactgaagataatgcagctaatcgcctgtccatgcataggcgcgctgttcaattgatgaagaatcagggactgtgctctgcccacattgttcgcgatgtagacttgattgttgagatgatgttcgtaccactgcagagtaacattgaagcacgtgaatgtgctaatacatgggctgtgagaaacgacatcgacaagtataacgccaggatgctctccgcctggtatgagtggttactccccaactggctgttgaatagacagcgggggagtgcccatcgcgccgcttagggaggcccagtgaccgtactcggaagggaagagactggcattaaa

SEQ ID NO: 2208 - DNA, 625 bp, unidentified
  source 1..625: mol_type = unassigned DNA; note = unclassified Picornavirales sequence
gagagatattctctcacgtgcgggtaaacgatatgctagtcgttttaactggattttattcagtttatgattttaactacgtacatgctagcccatggcgtgtgcttttgaagtgataggaacttcaataatgcaacttggaaagttgtatcaatggaaggattttcccaagactgtgtcttggaaccaccctattttgggttggggcttgcgcggcccctttactcttagtggtaagtccttcgaccacctcaacgaagtaggcagtagtaggcgcggctctctgagcctcgtactttatgcttcagcaatgaagcacagttttaaactggtgcgtacctacgtctcacaagagaacttgtgatttgactgagtacttgtcctatagtatggaacattttggaattgatgaaccgatttggaaccgctatagggaacggatttgattcccttggattgctttgcttgaaattgtttctgagtgttgtataacgtttctatgctgtccgtcttgcaggacattaaggtatagaatttatcggttacccgggccggagtttaagtagatttaatgaggttggcaccttatcattatttcttgcaacatttcaggctaagatgatgg

SEQ ID NO: 2209 - DNA, 626 bp, unidentified
  source 1..626: mol_type = unassigned DNA; note = unclassified Anphevirus sequence
agtaaaaaggtgtgcggggtaatcccccgcacgcctttgtttgtagaatgcacttatacagattccgctcttgccgttaattataccgctcttgccgcaatctgtcaccagatccgccatttccgctataaacgccatttacgcaatctaaacttgttttctctttcactaggttatgctcacctaattactcaaatttgctacaccacccacagcacttgattagtcaccacttgctgcttgtattatatagactcttttgtacacatttaatgtaccatatttatttaccaattatagaagaaaaataaaaatcaaataaccagaaaataaaaatatttatagacccacaatgtctttaaaattggactcaactctatttctttgccgatttagacttgtttgaacctttattccgaactcctcttgtatatacgaggctagtaaggtaaagtgatatgccctggacgcatgtatcgtcctgtttgtgagtaaagtataactctctccctaaaagtttttacgtttgtcagggataagaccgctagtgatgtatgccacggacacagaagtcctatatgcatttaattccactagttcataacgtacccccccatcttaacacc

SEQ ID NO: 2210 - DNA, 627 bp, unidentified
  source 1..627: mol_type = unassigned DNA; note = unclassified Virgaviridae sequence
gcctgcccacagaagatggtctacttccatatcagaagatgcagaggagaggtcatcgacaccaaccacccccgcggtgtgtatccatactttcatactgatctaccagcgaaatttcataataaaaaacccgctagttacaaatcatgtctgtcattgctgcattgtgggcatctgggagcgtgaccttctacaggttcttagaccacttgatcaagagccttaacgggggtataatgttcgacccccagccggacggatctctcttcggcccacccagaattcacttgatgagtgtgtcgtcagagggacttgccattctggggacaatcgcattggctgcatgtgttgggtttcttatagataactggcatgagtatgtgactaggcagaggtttcgcgaaagggtaagaagccgattgtctcgggtggattactatacccccaatgagtgagtcatagctcgccccaaaatcctcagtgctcaaattgtgacccactggatatgtatgacacacgatagtgttacatgtgaatgcgctttattttctagctgtgatatttttatgtttttattagtaaaaaacccgccagttacaaatcaataagaggagtaacacaggaacg

SEQ ID NO: 2211 - DNA, 627 bp, unidentified
  source 1..627: mol_type = unassigned DNA; note = unclassified RNA viruses ShiM-2016 sequence
gcgacgcaaagtgtaccttggtgcatagtatagccatttggcgacgggatttcccggaaaatcgaggcatttgcctctggccatttggccctaagtgtttagtgtgtgtaggaaagtttgtcgcttatttccgagcacatgtatgagttgtatataataggtctcgtaactggggcggcccttgttggactagcgtggtttataacgacgcgcgtgcagcattggctcattgtgcgaggactaccggcccacgtcggggatcttgagttacctagcgaatccggcatcggatattcgctgagttctttcgatctcgactcggttgatgattaggttgtaagccttttggcgtcttagttttcggcctttcggcgtttagttgtaagtctgacccgtttgggcctttagttataagttgcctcttttggcttattgtaagtttccctttcgggttagttttaagccttttcaggtcttaggttctaggtccattggattttctattgtagctttttagcttttgttttgtgcccccttttggggccgacccacgtttggcgtggcttatctttatgtttgcttaattgtaggttgcgccgacttaagtcggcgcgttgtagatttaag

SEQ ID NO: 2212 - DNA, 628 bp, unidentified
  source 1..628: mol_type = unassigned DNA; note = unclassified Sobemovirus sequence
tctccttctcgtgcatgtcaccttggcactggaattcattttgggggcgtcggcattttgccggcgagtagggagcgccactcacgccggtattcgccgggggggacgtgaggctgcgatagtcggcagcgcattttgctggtgtaaaatagggaggccagtccctgctccccgaattaccttcctgtcgtacgttcccgcgtgcggctatgagccaatttgcggcgtggttcctcccacgtgaaggtgaaggccaggggtgcggtagccgccggtatgcatgtatgtagcgatgattcgatcgtcgcgggtagtgccacccctcccgactgctcctatctggattaaaggttgaagttgtgcgatgatgcccaaactcgcacgatggaacctagggcagcgggcatggctacggttcggagcgcgtgtacggtccggggtcagccgtccctcggaaccccatcgcgtttcaggttagacggttagggtgggatttttcccagggcttttgtattagttattgcgcgcttggtgtttttccgagaatgacactcacatcaagttgtcccccttgcgcactgtttttggagcgaactgttttgcagttattagtggattttcgcccact

SEQ ID NO: 2213 - DNA, 629 bp, Enterovirus C
  source 1..629: mol_type = genomic DNA
attaaattaactctattgaacccgttatccggtgatataggatatctgtgaactaacatcacaataatcagttagcccctcgatttatgccttcagtggttatcgaggtctgctcatacgacgaggagacaggagattgtgaacttgagagtgcggcgaagatattcaccagtaacttcgacgggacttacgtcctatacactcacagttccgggccgaaatacgccggatcaactgtcacactcgtctgccctcactgcggggtgagtgaacaagcgacgttcccgaccagaggcctttcaggcaactggggtcaccacgggccgcacgacttacgacttgattgtaaggcgcggcactggcacggagcgtgcgaggtcattcccctctctgagcaagagtcgcgtgtagcgtctgacggggttttcgaaccaggtctaacgcacatcactacgacccgagggcagtcttggactagacatctttagtccctcccagttctcgctgggagtcccgcagcctggctacgggaaatatcggtggggttgatcaaacctacacctcttcgagaaaagcgctcttcgagtactccctcggcagactattctgttgcgtctcccatagtgaag

SEQ ID NO: 2214 - DNA, 629 bp, unidentified
  source 1..629: mol_type = unassigned DNA; note = unclassified Iflaviridae sequence
ctccacacgggtttttgcccgtgtggagatcatcaagcttttatcagtagtaatttgcagttactcgagtcctctgtttggactctatttaggaatgttaatttaaactcaattcagtcgtcgatgtctctattgggtttattccctttagagttatacaattgtcttgagttttaaaaattgcatcactatttagagtctcgcattttgcgcatgactcggataattttactttattaccgattttagtttgtgatctgacccagttttctatctattcagtgtttttgctaaccatgcaataatatgtcgcactgtctacgccataaagcaagactatttataggtgcaaatttaactttgagaattctaggctttgaacttcttattagttgtccgataatttgttatcgccccggaccgggcgatttccttctcatttatgagagaaacttttcaatgtgctgagtactgatcacgtggaagcacactaatatgtccacatgaactatagtcataatcaatgaccctaaaagtccttgtccggaaaacacgcacaaggcattatccgcaggttttgtcgcgaatccaaaataggccggattgtagacctatcgaatcgcgataac

SEQ ID NO: 2215 - DNA, 630 bp, unidentified
  source 1..630: mol_type = unassigned DNA; note = unclassified RNA viruses ShiM-2016 sequence
ataggtcctaacagtgtagatctgcttatttcaagtttttctagttttctgttggatagaatagtaatatattattttaatccatttagttcacggggctatacctaccccctattagtaacaaaatcatttaaaatactcggtacagaccggggtccaatttaatattcttaattatgcaattcgaccttatgataagttcaagaagcttctcttggttcctaataatccccctaggaatttccccttatcttttttgtataattttgattaactttggatgtataaaaattattattaaggcaaggcagatagtataattctgaaatgttacatgatttagattgccatttgaagcccctagataaatagttctgggtatgagttcgaggaaacaacaacgatgccgattttggaactacaatttactttatgtttcaaagtagggttttactagtctgtgacagcttttgcttaatacacgttagcctatgtgctaaaacttcgatgacatgtttatccatggacttcggacatatatctttaagatatgcgtgtactctgaaacgtcagatggtagtagcatgacgaagatagcaacctaccaattttcctttattttctttcact

SEQ ID NO: 2216 - DNA, 631 bp, unidentified
  source 1..631: mol_type = unassigned DNA; note = unclassified Bunyavirales sequence
tgtctcatccccgaccaccatgtcgttaaactggtcgcggcgcgcgtgagtgtcgtagccccacggggaagccaaaatcacactcatcgtagtggttacatacgaatacatgtttttgcttgtttatcatgattcggaatgcttgcgatgagaatggggagtattgaaactcgagtgctatttagttaccgcagagtcccactgcaattaaaatacgcgataggagtgttctaggaggcaagagcattaccggtataaattaaatcgtctcactaaattttctaatgaaatagagtctgctgaagactttaaaatcagcgggtatgtaccacaagctggcgagcctggtactactatagcccaaggcaatgggcaaaagttggaggccattacaggcttctccgaccagttggctggttggacgacttctatcacgggaggtcgtgacgctacgtataatttagctaacaataatgattccgacttgggagatttcctcggtcgaccagtcaaggtgttagagacacaatggtcgataggacaacctctttttgagcgttttaatccttggtatttgttcttgcacaataccagagtgaaagagaagacttccaactttgaattattgagg

SEQ ID NO: 2217 - DNA, 632 bp, unidentified
  source 1..632: mol_type = unassigned DNA; note = unclassified Bunyavirales sequence
agtagctgtttattgagtaagagtttgtagaggatggatgattaagagtgtgagtgagaggtgtagttgtgcgggtggtaaggttgagagtggtggtgtagaggaaaggtggaggtggagaccaaagtgatggggtatattcactgtgtacactttgctcaggttctgaaaacgtaaacctggataagaagagaaagaagtactgcatttgtgacaaggccttcttagaggagcacacctgcaattgctcagctggagtagtcaaggaggagttcctgagacccacctttaagcattggcatttgagtgagcctctaaataagtacagactatcttgcataaacgaggagctattgaagaagagctcatccaaagggccagtggttgaccctgactacagagtatcctctttgtcttttagactaggttggccactatcaccattcagtaagagctcacttccagtgcctcgttctggttctctcacaacaccagagaaacccaaggctgttaaaggcgccataaaggctgagccgaaatctgagccaaatccatctactagcagacccagtagagtagctcctcacacacaatcagaagggactgctaggaaggagctgtttaaatcagac

SEQ ID NO: 2218 - DNA, 632 bp, unidentified
  source 1..632: mol_type = unassigned DNA; note = unclassified Riboviria sequence
ttccgatctcgattttatatcgcatacactcaacaattacccctttatttggattatcttctgccttgctttcgagcaggtgcattagacttattccttataattcttccacaaaatttttcttacctccttttggagggatctttttgcgcgaattatatattggcaatgtataatttttaattgactaatcgtcttacccctttttgtttgcataaacttgctgtatctgttgtactgcaagctattgcatatgatggatttttgtgctgtatactgtaagctattgcacttatggttccagcgagtggtttgtataacatttccttaaccacgcgtaagccaacaaaataattagtcctattttgttaactttttatcaattgactattgatattttgatgagttggcactcattattattatcttttgccaaacccctcaatatttaccctagaacgtcatcttaggaggagtttttattttctaacggttctttttagacgcttgattataattataaccttcggtacagttcttagagtttttagtatgttttgtccaacaaaacatgcagcctgtattaggtttacaaatactagggaaacgccccgaaagagcgatttgtggta

SEQ ID NO: 2219 - DNA, 632 bp, unidentified
  source 1..632: mol_type = unassigned DNA; note = unclassified RNA viruses ShiM-2016 sequence
gcgaaatcgtctatggttaccaattatccttaaattggcgcaggcggcgttatcgtctttagtggaaactactatagtgtcaccaattgcttgtttacattcgacgtactatttgagagtgtgagtttcctttggtcgtagggtacttttgtaccgaaagcagatgtgttttcctgctgtttaaggtttttatgatgagtcctccgagaggggttttgtcggcacccagtcgacatcctttattctggatgacaccatacacggtacaggaaagtgcttgcaccagtaggttgttccaagagcgtggatcacggatactgagtttattttaaaacctagtgtgaagcgtggcggaagacccttcctactgtaggcgcatgtcgtggctagaacccgcaattgcgcttagcaacaagatagtgatgcccttgagtgatggcaacgttgttagtgtgttatgttatgacgaccgctttctttggcattttgccaacgggacggcccagcagagacacgattagttgtggcatcctatgtagtttggatgatctatcttgttgtgaataacccggtgattgcacaccacctgggtttgatttcccgactggccggtgtgtttgtcgttcggttta

SEQ ID NO: 2220 - DNA, 635 bp, unidentified
  source 1..635: mol_type = unassigned DNA; note = unclassified Narnaviridae sequence
aggaacccctacggggtcacataagagggctactgtgcacccagctaggcttaaagcccgctgtcgcagacgtcttcctatcaaggaagaagtctgagatcgaacgaatagaacaggagatccatggagtcttcgactccttactcttgttcgactggaaatcgtttaacgatgaacataactacaagatctatagatctgtggttgtgtctatcatcaagttaggttgtaccaaccttgacttggtgacaacgtattggaagcagtttacaaactggctcttcatacgtgtgtcccggtctattactcttgaagagcctagccgggataaacaaaacttcttcttcactttaagtgatattcgaagaattcgatcctatctggatagggattatcccatttccaaacgaggatggtcacggatagcccacctgatctctacgagacagctggtggccgggtccgtacggatagagcgacaatctgtcgatcgattccgagaggtgactacgtcaccctttattgccgaccccgatttccttaaggagatcggggacgtcgcttacgtcatcgggagacgcctcaggcgttctcacggcgactttccttcggatgccggacacatatctttaagt

SEQ ID NO: 2221 - DNA, 635 bp, unidentified
  source 1..635: mol_type = unassigned DNA; note = unclassified Alphachrysovirus sequence
tgataaaaatttaaaaatctctcagcctctaatacgacactgacatggacgagttgagagagcgggccaatctgatatgctcatgggagcatgtcatactcgatagagcgataggatatatcgtattgccaccgggccatgggaagagccacttacataacaggataccaggcctagtagaggcagacatggtattcgattgtagaggagacgatgagctgaaacgactgcgcggcaaagcgcgggagaccggggagtggtctacttacgatgaagaatggagtaatagactgtcggttcgtctaactaatcatcgttgggttgtaatggtaccatctcgcgagatagggaacaggataggcggtgtgtgtttgggggtggcccaactccacgacaagcagtggtcagctaacgtctcaagtcgtgggaagacgtctcgtgactatgaatacagcaggcaggttggtgtagatgtattgaggttcaagtgcaataaagacttagcagaatggttactcacagtggctaacatatggttagatgtgtgagcggcctgaggagtaccccccagggggacgaaacgctggtcgtagccgcgggcgcaagctaaccaacacatactaataagagacaac

SEQ ID NO: 2222 - DNA, 635 bp, unidentified
  source 1..635: mol_type = unassigned DNA; note = unclassified RNA viruses ShiM-2016 sequence
ccgagtgaggacggtgttcccacaaaattataaaaaccccaatgttagagaccagattctttacgcgacgtactattttagcgtcagattctttattatttctatttttagggttttatattggcccgattgtagtatgactacaattaaacagtatacgtcaaatataagtcgaaagacaacgaatgctttcattatcattattcaactataagatttacaaaacacacgttgttatgggcgtaacttacgaaggctatttagctgaggtgatccccggattagtagatgttttgtgatgatatattgttgccaccattccagagttttcattaattggtaggagacaagatttaagcaggttgtgacaaccacgaaaggatgaacctatgatatcataatgtttgattagtgggttgcaatgaagaatgcgtaatccaagtcatgtattcgtgtctgttacctccccctgttaaagatgtgacccgtggtcacatttccacttatgtggcgccgtaagctatattggcgtgtagctgaggtgacttgtttagtccccacgtatgattactcagagagtgtgagataaaacttgtttaaaagacaaaatctaaaaatatttctgtataatcaaa

SEQ ID NO: 2223 - DNA, 636 bp, unidentified
  source 1..636: mol_type = unassigned DNA; note = unclassified Picornavirales sequence
catgcttaattgctatataatagattgaacattctataacaaaaagtttcattggagttcaccagtgtcgaaaaaccgtaatgcagattcacgttaggagtcagccgtccgtggtccgagacgttaaatccgacaacgaaagcgatgtagtaaatacaaactaggaaatgtaatggctgaataacagtattgacaggcgttataaacaccttatggaaattatgtatttaatgcgtagccgtaggcagcttggatgtgatcggagtgaatgtgcgagtatgtgtgtgttttaacacattcgcttacgctatccaagtaatgaccgtagctatttagctttactgctcaggaccggtcggtggcagccccactaaagtccagaacattaaaataaatcaacaaattcttcaatacaccaatgatggtccaagtcagaattcttcaaccttttataataattccgaatttgatcagcaattcttgctttccgctacagacgggaggcaacatacaataattgattttttggaacgacctttccctctgacaaactttgaatggaatgtttcgagttctcagttttctacgctgtattctgcagaatttcctgatgccgttttagctcagccattgtat

SEQ ID NO: 2224 - DNA, 637 bp, unidentified
  source 1..637: mol_type = unassigned DNA; note = unclassified Tombusvirus sequence
gttctggggcgtcgtcgagagccttaagccgtggctgtgttgtgcccgtcaggatagtagtgaagttgtggagaacatccgttccgtcagagcccgcccgggtgaattggcggtggtataccttgactacacgcacgaccctaagcaccatcacgtcaccaaggggttcgaaagtcttgttgtggtggataatgaacaagatggcgcgacaggacgttacccgcccgctcctccgccgcctgctcctgctcctcaacgtgtacaagtatgtccagctcaaagttacttggcgcaactcaagggccgctacggggactataaggacgcgctactacgtagcaagtctaaggtccctcgaagagaccctgtcgcggttgcccgcaagaagaagctagacgtgctagtcagcaggaatgtgtgcctcgcagaggcagtgaaatccaagcagcaccactgtgagagtgctgatgttctcagagagatcgcgagtctcaatgtgggcaataggagcgcgcccaaggtctgggatgcagttgagaccttggtggccacgacggtggccgattgcgctctgggggtcgcttgggaccctccggtaccgacagtgacgagcccttctgggccgccactaaggtcc

SEQ ID NO: 2225 - DNA, 637 bp, unidentified
  source 1..637: mol_type = unassigned DNA; note = Brejeira virus strain AR800224 hypothetical protein 1, hypothetical1 sequence
aaaagggggaaaaaaacctaaaatttttgggggtttttttaaaaaacccaatttgttaagcttcaaatgaactgaaaaccggtattacgaccaaagtagtgcacgttggccaattttagaatacagtattttacagtatccaagattatgcttctccctaaagagaagcggacaagactttacggtagtatagtcttgtccgcttctctttagggagaagcataatcttggatactgtaaaatactgtattctaaattggccaacgtgcactactttggtcgtaataccggtttcagttcatctgaagctatactaattgggttgttaaaagcatcccgtaatacttacgagtttcatcgctcgtttaatatttctactctttctgagcagaataccacccctacaactcttaattggagttagtaaacttttcacaccttatcgtgtgaatacattgttttccagttagctgtgaaaactgtctttctgcttcctgttattcaggaagctcttctttgagactagctgtctctcttctattctctcgtaatcgagagaatcctgtctttggtcctcgcaagagaaccactactgtcttgaaggtttcttttgaagccgtcttatcttgatcttcaa

SEQ ID NO: 2226 - DNA, 638 bp, unidentified
  source 1..638: mol_type = unassigned DNA; note = unclassified RNA viruses ShiM-2016 sequence
cgcacgttttccttgtcattggtaaccaaatggcaagcttggattcgtccttgagcgagttaggttgaatatgcaactgacatgaaccatttcggtgggtgccgtaacgcaaggtgagtggctgaaaagaccacaccggtgttacttaccattgaatgttgggcatttgtagcgagagatgatagatgtgggaagcaggggccctgcttgcagaacaagtggatgcgaactgaactctagcgacagtaagggagtatctgcttgcaatgtgagtgtgcgaaacttgtgaaacacattgcgtaatcaagctggacttgggagtccggtagctttgttgctgccggagaggcgtggggaggccaccaccaagtaaccaacgatgtagcacttgcccggcatgcgccttctctgtccgagtgtaaagacaatacccttctgcggtaccttaacactggagtgatttatgtcatttgctgataatgcttgcaaatcgccttggggtaatgtccgctcttaggctggtgtacatcggtgtaaaccgcagtaggtccctcccgatgcaccagttgttgagcgaactgcgcctgggggtgtttttcaaattagggatgtgcttatgctgccctccttcatgaaat

SEQ ID NO: 2227 - DNA, 639 bp, unidentified
  source 1..639: mol_type = unassigned DNA; note = unclassified RNA viruses ShiM-2016 sequence
tcgacgtatcattttcccagacccgagcgcatgatgttcctctacgctgtgcttgttacctgtttcttggtgtgcatatggagactctgtgtgggcagaggtgccacagtgaatgctaacgcactggagcggtttgatcgtgccaccctcggcgatgagtcgagcgtcgatggtggtcacatgaccagccgccctgggtttgctgcagcaatggcgtgcaaggagaagctaggggagctgcgctacaataacgccaacaggatggtggtcggcgattttgtgcgcaactacctcagagagaactaccccgacatgaggaatgtcgatagggtgaggcacgctgccattggtgtggagttggcattggtgccgacagtcttcgcggtcgatgcagctggcttcgccagtgatgcggctgtgcggggccgtcgcgcaatggcaagtggacccaagtaggggtgccctgtcacatttcctgctcgggatacagctgttgaggttgaagctgtacctgatctcagggagcgggaagagtgtgataggggaggtcgggccaacggccctgatcgaacggtgcgctacctggctggctttgggactggagtcaactacggcgtgcatcgtaactcggctatcaac

SEQ ID NO: 2228 - DNA, 640 bp, unidentified
  source 1..640: mol_type = unassigned DNA; note = unclassified Tymovirales sequence
aggggctgaggcactcaagcactctccacacccaggagggggccgagtcgacgtcatcatcagctgaatcctgcgtggcgggagtgacgttcgatggctgctgtcggggagccgggagcaaatcaggaacgggggcggttggttgctgaaggaaaggaagcaagaagaagggttccagttcgtcgactttcatgacctgcgttctccattcaagatagaagcgcttcgggtgaaggtagttgtagtactgggctacttggcagttttgagtgtagcttcgagtggcgtaccagatggctgcggcgacgccagatccgacgcagaggagggcagcgtagttcttccaatgactacgaggagcaagctgcgggaaatggttcagcacccgagttgggatttgccgcttcatccagtcgataggttcaaatttggactcgcttcggatcacgctcgagctctggccggtaatccatcggggaagcccacgccaatacgcggtgaaggggttgattgagtcgttaatgaagttgtgcgagcgtatacgggctgacgctatcgtgactgccttgtgaattgccacatacgttactcacgttcaccgttatcgtacaaaccgtcatacgctccaaattttgccaac

SEQ ID NO: 2229 - DNA, 640 bp, unidentified
  source 1..640: mol_type = unassigned DNA; note = unclassified Luteovirus sequence
aaactcgagacccagatggcaatatcctctccctacaccctggcggtttgaatgccatgggccgtgacctacagcagttcgaaagggatgctgtttataagatgtgggtcgagggacaagcagaggatatacggcgaaaacagattgagactgatgccgcctcagcacgttctatttctgagaacgactaccgccagataaaccaggaaatacgagctgccgagctgcctaaccaaccgaactttgtataccgggacgaccctattgtgaagcaaaacagcacgtctgatttcattgctgcacgtagggctgatttcgatgaacaaagtgtatcggatttgaagtctaatgcatcaactcggacaatcactgggaatcttggtggtggcaaactgaagaagaaggcgaacgaccttgatgatgttgaggacaagatcttgaaggcattaccagaaattgattataaaccttcagaaatcctcggcgtcaaggcacggtatcatggaggatgtggcaagtggagagatacctttgattcttccatgaattgccgttgttggatgccaaccctcgagtggcaacaagttgattttcaatacaaggggaaagcatccaagaatgagggaaagtctattatttc

SEQ ID NO: 2230 - DNA, 641 bp, unidentified
  source 1..641: mol_type = unassigned DNA; note = Agaricus bisporus virus 14 isolate AbV14-003, partial sequence.1 sequence
attatttatcggttattcgtcgtcttggaccctaccagggcacggtgatcgactttggctcgatatagaatgcgcgggcttgatgcctactagtccaaaagactaggaagagcgacattttcttctgtacgatatttctatcgtctgtcttgattgacgcaagacactacgtgtattattagtttcttattctcttcagatttctcgttccctcacgggtaagactgaattacagggcgcgaccctggagaatcaattatccttccggagcttccgcccccactgctcctctcccctcctatttgtccgtttaatcgaaatggtccgcgtctacgtcagccagcgagcgttataaatgcaggccgcccccccatcactcttacacacaaagacaattacatcatatgctaaactccattgactagagctctggatgtgactcgcacttgcctcgtgattaaagatcgaaatagcaaccggtgaaatagtctagtacttaatgactcgtccgagaagggcgacgagagcctactagctatgggttatcctatattccgtgagtttcgacggcctgaccctaggctttgcagtatctgttgcgagctaccctcattctttggtaactcaagcaatcaaatcgc

SEQ ID NO: 2231 - DNA, 641 bp, unidentified
  source 1..641: mol_type = unassigned DNA; note = unclassified RNA viruses ShiM-2016 sequence
cctggcgaggtgatttttcttccttcattgttgcgcgtaaactctgcgcgtattcgatgaagggtcttttttgtgtagctttaagttttcccgctcaatcgggttgattatatgcatgttcctttggaggtcctgtaatatagactgcggattgtggctgagccgtcatttagatcgttccctactttctttatgccttgctggtagaagccagtattgaaaatattacggcgcttattgtattaatttaacctagcgaattgctttgttacacactagctggcatgcatgcctaaatgcaaactcttaatgttcgtgcgtaaccatagcgcacctgcccatgctcagatagtgtggtagctcctggctagatccaggaacagttgtagtatagaacctgctggcacacagattgtgccaaccaagtcaacaggtaggcatacctaaatgcaaacccgtgtagaaactttttggcataaagattgtgccaaccaagtaaacaggcctggctgacccaggactatgcgttaaaggtgttttcggttccgtggtcctgagtggcctacacgacgggcgcatagtagtcccctagggacgtgggtgcacactatggtgtgcatcaagacaataagccgaacccc

SEQ ID NO: 2232 - DNA, 642 bp, unidentified
  source 1..642: mol_type = unassigned DNA; note = unclassified dsRNA viruses sequence
gtcatccaccgaccggtgggtgtttggcttgcggggaaactcactgctatgcaggaatggaccaaccaaacacacaagacaaacacccactggcaccccgttggtgctcagtcggtgtatggccatcccccaactccatgcaaaattaagggcttgggggatgctaattagtatagcacacaacgcaagatgtcttgccacatgcgtcccacccgggggaggagttccactgcctacccctcagggtttatgaggacgtgcccaaaattcggatgcttggtacatcagccagatgtattgggcatgccggtgctaagtccaagccacgggcgaatgcgacctggaagcttggtaaatgccgagagactgcaacgggctagggggtgccatttggcactgcgttgagcaacctgaatgtggtgaggtacagtccaacagctaagcgagctgagatgatcacatctattgcgtttgcttctaggtgtgctcctgcgttttcatccctattaagggctgtgttctcctccgtcttcaaactgttccgcattcacttgattcagattttagtgatagcgctttatttgactcatttgtgtgcgtttcaatctgttttcaagacggaccgatcgcgtgaatctgggc

SEQ ID NO: 2233 - DNA, 642 bp, unidentified
  source 1..642: mol_type = unassigned DNA; note = unclassified RNA viruses ShiM-2016 sequence
gttttacctcactaaattaatagtttcaaacacgcaatacccaatctactagttatggcagcagcagcagcagctcttttaggtggctcctccattggagcagcctcacaattaggatctacagcaattagtgccaatgcacagcgtgaaatttctgctaatcaaattgaacaacaaaaatgggaaatgatgagaagagaaggagcatttacatcgcaagggctcccctctttcttagcttaccaaggtggcaatgcatatgtacctagaaccgttagccatttaggaggtacgaattatggtatatcggggttcaatggaaacaatctgccgtattcaccttcactcaccaggcagatgtatggcttttacaacgatcctttgcgatcaaggaccgaggcacctgccggtcccgttggtgatccgcagtttcctggacaaaccgacagaatgggattaggagctggaaggtatagtgcagttccaccaccaactcacatcggaactcaaacagaacgaacccatttccctagtagaacgtttgtaaacagtaaccgactttaatagatacctgactcattgagcttcatctatcgcaatacccaagtgattgcgaaatttggaattcgtgaatcattcaaa

SEQ ID NO: 2234 - DNA, 644 bp, unidentified
  source 1..644: mol_type = unassigned DNA; note = unclassified Cilevirus sequence
tttcatacatgagattggtatttgctcatatggattttgaattttatctttggttttatggatatgacgactcttaatcttcatcggcagttacagctgcgcctcggcccggactgtatttggtggtacctggaatgcccacacctttgaagacagaatactctatttcatatgtcgcaatgatatttattcatattttgtgtatcgctcagccgattttggtttgagcatttacacacacttagtttgagattatctgtacgtttatcacaatgttgattgacgttttagattctctcacgtatagtacgtgggctataatcggttaaaattttaaccgtattatttcctaacatattcgagatgacttgatctcccgtccttctcagtattgctataccgtttaacggtgttgagataaactggcgtcggtcgattctcagttttaccatcttgtttggtaactcttgtatatatgtaaataggtaagggttcttgcgtgccaagagtcttctgtattaatgtagtggactgctgcttcgatagagttgcagcagtacttgcattgatatgtaaatacacagagatacatatcaatgatccactccttattatggagacaaatcaaggtatgagttcacaca

SEQ ID NO: 2235 - DNA, 644 bp, unidentified
  source 1..644: mol_type = unassigned DNA; note = Raspberry mottle virus isolate HCRL Glen Clova, complete genome.2 sequence
gtcgttttcttaagtggggtagttacgtcttaactagtagtttccagcccaacacgcccgttcctctcggtgctttgttgtcgcctccatgcatcagcgagaccctatcgtcacttcgtcgatgttagtttcttgtcctcgatgctctagcttctacgcaaaatttttcgctctccgttagtttcagcgatcgatcgtctcattcttcatctctctccccttttgtttctgacggtctcttctttcaagcttccgagctcggtggttctttagttaccctttcgttgtcaaggtctctctctggtctgctcctttctcttcgcgcgtcgtccccctcagcctcaggtatacgcactcgcctcctagattctattgttgtgtcgagtttgtcccctgctatacacttttcgttgaagttacctaactcccgcggtgagtcactgtcgtctactgtgactttgggcgctcgggtactctttcttccgaagggtgtttataactccttcgcgatcggcacgtccttttcggtcgtttcttcgttgtcgcgtgtttttcaaaaacgaccagagtcgcgtttcgcttaccgtttctcctcccctgacgtgtctctgtcagaccagtttaggttttgtctaccgctaatc

SEQ ID NO: 2236 - DNA, 644 bp, unidentified
  source 1..644: mol_type = unassigned DNA; note = unclassified RNA viruses ShiM-2016 sequence
ggtagaaacccggttcccttttggtggttgtgacatgccaccagctcaagtgaaagaactccgagatctggtatatttccatttatgcgaatatttggttatgtacggattgattcttttgcacttgagttcaaacgtccatttgttcttccaaaaacaaatgtttatgttttagtgtcgtcttgtatgtatgtgtgtatgtttgagagtatgaatgttatgagttgaaaaagttacaaacacaagtcgtgttgttgttgttgaagttgttgttgttgttgaagattgttgactttgtgtatacaactttttgctcactgtatgtatttttgaactgactgtacggacgtcgatgttatgattaattctaagcgtacctaaagtagtgaactttaagatatatcttaatagctgatgagatgcctatgaaatcttggtaggatgattaagttcgatctatcgagttagtaagtggcggtcagtgatttagcgtagctctgtatcttattgtaagcgaaatgtgggaaagcatgctttgcatacttagttttatgattaacggagacagactttggacctgacctccagcccttgcgcagccgctggttgtattttgcgcacccccctgactaattgctttcaaa

SEQ ID NO: 2237 - DNA, 644 bp, unidentified
  source 1..644: mol_type = unassigned DNA; note = unclassified RNA viruses ShiM-2016 sequence
ccgaccattgcggtcgggtgtacagggggtgcgcggcgttcgggggcttcggctaccttccgcgcgtgttttagggggcacatggttgggacgaccatgtgagtagtgtgcggtgctcacgcgaacccaggcgttctggccgtgaggtggtcctacgtgaccacgcagttttggggcttgtgtagcttgttcatttgccattttggcgctgtcgggacggttcacgtcccgactgactcccgtagggtcactaaagccccgtgccactgtaaaatagggaggccggtccctgcacaccgaattaccttcctcatcccacttcccaggtggggtgtacgagccaattagcgggtgcgtgccagcgcactgaaggtgaaggccaggcggatgctgttacccgcagctatgcaccgctcacctgccgtcctatccggatgaaggcgacctccagcatgattgcccagtagtgctgttggaacccgaggcggcagtgtggatgactacggccctcagatccccggtttggccgctggggtgcggcgtgaatcaagtaacggtgggtgtgccgtcttgtagcgtcctgaggtgggtacacaccaatgggtgggtcgtgactggggtccgacctagggcaatttctgcgc

SEQ ID NO: 2238 - DNA, 645 bp, unidentified
  source 1..645: mol_type = unassigned DNA; note = unclassified Picornavirales sequence
cctagggatacagagattttggacaattatttatattacagcttatatttggactaacagctggttttgttacttggtaatacatttaacatctaaatccaactgttaggaccagatagagtgaggctttatacacgccatttgtgcagggcctcatgggactgtacaatctaagagaatgtataaatgccttagtcgtatttatgattgttcatcaaaaacttttgataaattttatatctattttaaaatttatttaatgcatttaaatatgaactaggagtaaagttctatagtgaatagcttatctggggtagcaacccgtataactatagaagtaatatgcctggttcctctatttctgactgtgtaggaatttttatggagaacgtccaactaacagtggcgcttatcctaagtttcgttagtaaacttgcctaaagcttttcgatcggtaagactcgcctagttgcgacgacagatcacaatgttttaaatttaagggagatagtcctcttatctagtgattcagtattactgtgattattactatatctattaagcgtaacgaccttagtacgtatagtaataagagttctaaatgatgaagatttgaagaaatatcccgtagtcgtattgttaaat

SEQ ID NO: 2239 - DNA, 645 bp, unidentified
  source 1..645: mol_type = unassigned DNA; note = unclassified RNA viruses ShiM-2016 sequence
ataaaattccgtacaacgattagtcgccgattaggtgctttgtgaggtattcacccaggcctagtttcgtgcgcgtgctaggttgctttggctataaaagttggagtagtataagcagcaaactcctatatttaaccctcattgaggggtacttgcaatggctgattgccttttatggagggtgcttgtaatggcctattgtgcgtgcactataggttcctaagggtataaaagtattacttgtatgttccattaaaaggttcagttcctcagggtataaaagtattgcctgtatgtctcatgagggagtgcgacaccccccttttaagtttcagtttaacttttaatttgatgatttaggttctggtgtctgaggtattacaggttgcgcgcctggacagcacatgttagtcatgtattatggtgtttaccaacacgtatctttgttcctaatgattcttttaggtcaagataaggaattgtgtgccccttatctgataagctgaacaccttgggatacggtcctggcgtttagttacagagacacatagccccgtggggttccctcgtatcaaatcgtataagtggcgaaatgaaagcttagtttctttgaaactagcaagtaagaatagccaaccctaagaa

SEQ ID NO: 2240 - DNA, 648 bp, unidentified
  source 1..648: mol_type = unassigned DNA; note = unclassified Ampelovirus sequence
atataaaaactaaaaaatttttaagaaaaaccaaaaacagagtgtttgtttgacttttcctttatttgtagtgagtcagttgtaatttcgctgtttccactatcttatttttatcgtgtttttccagtgtgtagttaaagtcaagtcgttgatttggtgatagtgtgtcgattgcgcaccttgtaccggatttcccgaattgacttattagagtcagtaggtttgtatcggtctcgtttgtttttctttgtaactgttcctgtctgcttctgtaatttttaatttcgggtttatacgcatttgtgtattcgtgtggtttgttcagtttccagttgtaacctgtattactatttgggtttgtcttattaccgtctacgttgttgtttggaagttcccggaaaccactttcttcccaatcaacacacgtcagttgttgttcattctccctgtttgtttcgctattcctgtcagtagtgcatccactgtcatcctcgaacactttagttttacagtttcccatttttacttcctaacactcttagtctttccgttcgtttaattcctttttgtgtttcaaaccgtctgtggttttaattttcctgagatataactttttgacgcagtaatctttctcttacaatcttcgaa

SEQ ID NO: 2241 - DNA, 648 bp, unidentified
  source 1..648: mol_type = unassigned DNA; note = unclassified Picornavirales sequence
aatcatcactcatcaaacgttaagtcccctgtttatacttctcgttatcattactaaattagaaactcatctttgcggtgatatataattgtcgtggttgtcgattatatattgtcgtgctgtaggatatttgtcttgattgttgagatattccaatcaagcgaccttctatctaagttgtcgagcatatgaatcgcatagtttattcttaattgataccgacttaccctcgccttcatgtctaaataagctatgtctcatatgtgacggattacagcactgttaacgttttgagacgatatataaggagacctaaaggggtcctcctggttttaaattgagtacatattgtaccgtaccaggcaaaggcctttaggagatctatatattgtttcgaaatgttgataagtaaatggtttctcaccccctccccgaaccttaacgtgattgcactcatacataagaatctcatgtcctatttgaatcatcaggattagactcttttgcatgtttaatgaactcggcgcttaaccacgtcgtttaatgaattagaacaacccaatattgtaggaaaaactttcggtgatataaagaaccgatgacaggtgtcaaagacactgaccgacggaaagacgtcacaacaaacta

SEQ ID NO: 2242 - DNA, 649 bp, unidentified
  source 1..649: mol_type = unassigned DNA; note = unclassified RNA viruses ShiM-2016 sequence
gcggggttttccccgcatcgtcttttcaaccttatcgaatatctgtgccattgtgtcatggctatttgatattgtatgcttcttttgtgctcgttcggcaatgacctttccgcacgatcactttggcagctttcttttcaccttccggtttctttttgttttatgttagtttgttttgtgctgttttgctgtatgcgttctctacctatgtaacgccagctaaatgtttactataaaaatacttttcataagttagttttaaatgcattccggtttcggttttagaagtctttttgttgctatcttaattatgtatgctcctagtgaaggattcgctctgctagtttaaacttagtatgacatatttaattattttagtggcatttagcaactccattaatgaacgtttgtaattaggtgagatacgtaggtctcctgtaatgtcctttgcgtaagttgcttggttagtcccttgcttcttagacacttcgtgtggtggacctcttgcactgactgttgaggttgctcataaattacgaattagtaaggttggttttaggactttttatcagctttttggcccctttattataaaagctgtaggtaatggcctcatccatacgcctaacattgtttaatcaatgtgaaa

SEQ ID NO: 2243 - DNA, 650 bp, unidentified
  source 1..650: mol_type = unassigned DNA; note = unclassified Picornavirales sequence
tacaaggcctatacagaccacctagatcagcggaacttaaagagaacgtataattatcaattattcaaacgctgatctaaatcaacttttaaacaattaaccctgacacgtccatcattgtaaaatataattcatattcacctttgcatgagcagttacgagtacgaagaaacgaagaagtttatagagcgagtttatgagaagtttaaaacgcacttgcgtcatcatccgttgtgcacttctcagttaccatcaattcgacagtgcctgacttgctcagagtacttcaccgcctatttggactatttggtacatattttgtcatctttaccaatatccagacgagaatacaagatccttcgtctcgtcgaaagcctacaattggaaattgcagatattgtagaggctggcggacttgctcctttcatgtttgtattttcttccccttctgttactcgtattgttggcgaagaccttcatgaagtttggtagatcacaatcattcattaatatatcattattcattgtatttaacctcattctcctgtatttatcaattagatatcgcaacgaacgtcgaaagaagctaaaacagaaggctgaggacattcttgaatcttcgcgcttgaatttgtttaaagacgatcacg

SEQ ID NO: 2244 - DNA, 650 bp, unidentified
  source 1..650: mol_type = unassigned DNA; note = unclassified RNA viruses ShiM-2016 sequence
ccgatctcgcctctcggcttggactaacctggttatcactaaccagtaccgtgtacaagtgactccacatgtggagactcctgtcttcacccgttaagtggcctttaactacacgctttgacttgttctacgaacgaatcaggcctgtagttggggttgccatcctggagtagcattcttccttgtcttagcctgttcttgaacagaattagactaggaaggcattgctcccagatggcttcctcccgttcgctggagttctcattagaccccagcagacggataagcccacctaatagtggtcattcaccattgcattgtgcgtaagtgaatggttgtcagaagtgacgtgatcgtgtcctctctcgaaattgttcttgttcaagagagagctcatgctgtgactttacaaccaccggtgtcctatttaggacaggtaccggggggtgcagcccaccccaaaaccttaacaggataggactagtgcgattgggtaaccgcattatcctttaccaacggtaagggagtccgaaatacaactacctgctaacacgaaaacaaccccaggtattagggtcgttcccgtgtcgaggcgccgtactacttgtcctagcgaccgcaaggtcaatggaaagtcggacttgaaggct

SEQ ID NO: 2245 - DNA, 652 bp, unidentified
  source 1..652: mol_type = unassigned DNA; note = unclassified Picornavirales sequence
cctgggttgatacccagtggtcatttggacgctttggtaaggaggcgtaattatccttcccatgtggaacctagtgcttaggttcttttatatgttctttgtttgtcctgtatactttctatcgggcaatcttgtagcctaacacaatatgtgttttgggttgcctaagataatttcaattttaaccagtccctatcttggggttgtgcctttctttctttcttatatcttcttaagctgacttacttgctaatccgactcctcgtcaacgggagggtaaagcagtatcactagggtattgtgatgtaggagaaaaagtaagtaggaattatacatgtaacgaaagtaatttggtactttaaactctcttaatcccaaagtgtggtattggtcatgttggagtaggctacgggtgaaactccttcacatttagtaatgtgttcacacgctaacgctacggtagaagacagactaggtcttattctcaacgtagggggacgggtgtatgttcatgactagccacatattaaggttttgaggggctgaattatataagtatgtgtattaattcttggtactagtccctggggactagcccttttctaggttgatattagttttccccaattttaaaacatatgagatttacgac

SEQ ID NO: 2246 - DNA, 652 bp, unidentified
  source 1..652: mol_type = unassigned DNA; note = unclassified RNA viruses ShiM-2016 sequence
gggccacgtcggaaaaaggtaacaaacgctacgaagccatgtacgtcaatggtcaaaatgacgatcatggtgtagtgattaaaggcataagaggaagaatagtttatgctgaagaacaagaagactggatggacatctcaccaactccaaagaagaaggtgagatcgtttaccggagaatctctttcttcgaagaccacaactctcaccccgcagttcgaagaccaacctccttttttagaggaacgccaggcccagcaaaagctgagcctggaaacgctgactacagccactgccgaactcagtcagaaggacaagcagatccttctgaacgctctgatgatgaagactcagagctcggggccgagacagaatgctactgtcttggatacagcacaggaagaacctgcaccgagccaatctggctcgacgttccagccaccgagaacccaggaccgggttacgaggaaggcctctacgcgttaccacgcgtggactcctgcgcagaaaagaagagtttctgtacgcacgtccagatcaacgccaaatcgcacttaaatcacatcccccctactcaacacgaacaacaatatgtcgaagaaaacatcttaagacatctccgctcaatagctggtgtttactgctattccacc

SEQ ID NO: 2247 - DNA, 653 bp, unidentified
  source 1..653: mol_type = unassigned DNA; note = unclassified Picornavirales sequence
gatccacgaaattcaggattgtgctttggtcaggcaattctgaaggagagatctctgtatcctggtatgggatctcgttgacctgatgaggacggatataaagtgtttgcacctgtcacgtagtggggtcattgcagctattctattattgctctggctgccgcaaatgacctaggctcgtgtatgtgtttatgcattcacactctgagaatcaagacgtgctctgtaaccatcacaaattctcaccgtactatctcgacttgtcttgaatggacatgaaatggaacggaatggacatgaataagaaattcaattttggatatgcacgactggcgactgcgttgtactgtctttcctcttatagggctgacacagacgttgctttaaagcgtgaagaagtagtttccaattttgtcttaggaaaataatctcgagcgattcgcatcctgttagggaataggattgatgctccttttagttcttgtatactgatgactcttgtgaatggaatgattcagtaacgttagcatccgcttagccacgggtatcgattaaaactggctcccacactagtaacaaggccccatccatgttcaagagcatgtagttggatcgcctggtgtcagcgaacagtattcagtttttctgaatcg

SEQ ID NO: 2248 - DNA, 654 bp, Human orthopneumovirus
  source 1..654: mol_type = genomic DNA
actcaattatcaacattgaatgacaggttcacatatatcctcaactgcacactatatctaaacatcataaacatctacactacacacttcatcacacaaaccaatcccactcaaaatctaaaatcacttccagccattgtctgccagacctagagtgcgaataggtaaataaaacaagaatatggggtaaatagatatcagttagagttcaaccaatctcaacaaccatctataccgccaatccaatacatacattgcaaatcttaaaatgggaaacacatccatcacaatagaattcacaagcaaattttggccctattttacactaatacatatgatcttaactctaatctctttactaattataatcactattatgattgcaatactaaataagctaagtgaacataaaatattctgcaacaaaactcttgaacaaggacagatgtatcaaatcgacacatagtgttctcccattatgctgtatcaaatcacaatcctgtgtatataaataaacaaatccaatcttctcacagagtcatggcatcacaaaaccatgccaaccatcatggtagcatagagtagttattaaaaattaacataatgatgaattattagtatgggatcaaaaacaacattggggcaaatgcaaca

SEQ ID NO: 2249 - DNA, 654 bp, Menangle pararubulavirus
  source 1..654: mol_type = genomic DNA
caatcttgactggaaagtggataaaattctctctcagcagtctgttattacccaaatcaaacacgagcaacatgcaatcaaagcaggaatagccactttggaaggtcttatcaccaccatcaagatcatggaccctggagtaggtgatggcgccactgcggccaaatcaaagagattatttaaagaagcccctgtggttgtgagtggaccggtcattggagacaaccccattgttgatgctgacaccattcaactggacgagttggcccgcccatctcttcccaaaacaaaatctcagaagtccagcgctgcctcaccagcggccctatccggctataagatgacattattggctcttatcaaggaatgcattcccaatcaggcaaaacgccaaaagtttgaaatgcaagttggcggaatccgaaatgagcaagatttcaagaatctccgccgagagataatccgcagtgctgcccaataatcattttgtacgctactacatcctgccaattcagcacaatttgattaatcaccgcaattaattagcaactattaatctcttcttatgccaggctttgcttatctgcgactcttctttgagctttaagaaaaaataagtgagcccgaaccagttaagaagggcacactccgacc

SEQ ID NO: 2250 - DNA, 654 bp, unidentified
  source 1..654: mol_type = unassigned DNA; note = unclassified Aparavirus sequence
taaaattgtacgtagggacttttatgtccctacgtacaatttacgcagaaattagcgatataatttcaaaattgttttgtggcgcctgagcagcctttttaatggtaggagcgtcgatcccccgtatggagtggagaatataaggctcagctaggatgacacgcctgtacactgtcgacattagttaagttacaattacacgtcttttgccgaagaaaccattttagtcaattgattatgatttttgtataatgataaacagtgatgaactgtataactcatcgataacaaaacggattacgaacctatttgtaactatcttgatcgaagtctagtagatccccaatatagccctgaaaagcttgagggacgagatagctctataaatagacgtgaggctttaaatcctgataagtacattacctgagaattcctccttttggagtttgaatttatataagttagtaccaatagttaatatcatttaagtatgttattattgctgaagacatgtatttcggataataacctctacattgatatataaattatatgcaagtctcggtggatattgcattatggtcgcagttaacctgtagcttatatattcctgtgtcggagcagtggtaatggagccggataatttcgccaaaa

SEQ ID NO: 2251 - DNA, 654 bp, unidentified
  source 1..654: mol_type = unassigned DNA; note = unclassified RNA viruses ShiM-2016 sequence
gtacgtctttagacgtacagtcagacttcttgtttagttgtgttcagttcatgttcaggtttactttatgagaagtgacctacatgtatttgacgcagttaaatgcgatatgacgatattttcgggtgaagaaaacacctcccattttgttgggtaaaaaattacattcttgtttttatggcctattggcactgtagcaggttcgagccctgcaaggccagtagatgaagaccaaaaagagtcattttgtataggactctgaatttatttacggtgaagttagatagaacgcttgcttctgaaacttatagagtacgaacatttgcgccagttatggcactcctttggagaactggtttatattgatgtgtgagacttgaggactcgatcaatatagcaaatatcacgtacataatattggaaaagatgagcaaggccagtaatctattctgatccctttgatttatttagggtgtataatttgatgctgacatttggtaacgggatttaatttaatgtactgctagtcccatagcgtgaataacgtttagcatatttattactagtatcttgggtcaacagccctgggtagcgcagtctacggagcgttaaaagtttgttacgaacaaccaattttggtgtagggggagcaca

SEQ ID NO: 2252 - DNA, 657 bp, Berhavirus beihaiense
  source 1..657: mol_type = genomic DNA
gaatccctcataactcgataggctccgatttttaaagcgttgtttcctaagaggggtatgacgggtgagttacaaggacatgcctatggggtaacattttttggttttttggtttgtgtttgtatacgcttgcttatacaaaatacaaccaaaaaaacaaaaatgtcaccattagacacgatcttgtgactcactctgtcgtacccccattatcaaacagcgcgttaatgagcttaaaaaaacgaaaacacaactcaggaactttgcaaactcctaatcaccaatattcggttcttatcctaatataggttagacataatggcgaaaaatgtgacttttgttccaccagtgaggtccactgagacagaggatgagactcttgccactctctcagctatgagagatcagtggatcgcccaggacggtcttcccctttggagatctcaagcaggggtaagttagtcttcctagtgccatattatatcgatatgaggtcattaacattgctgaggtactaattcgtctcgtttatcctttcaggtaaaagtggcaagagagaaggggttgctcgcctacaactcgagtgccaagaagtaccagactgcaggagatctaggtcaggccaatgcctcgcagttcgcccaggccgctcacaag

SEQ ID NO: 2253 - DNA, 657 bp, unidentified
  source 1..657: mol_type = unassigned DNA; note = unclassified Picornavirales sequence
ctcttccgatcttgggggttcgcccccatgtctcatttcaactagccgtgtgtctagttaacgcaccgcctcaccctggtcgttatcgggtcggttcttgcgaccgttagatcgtgagcgtttctgaggatcagttcgtataagttctccggtgtggcgaccgtaaaatcgtcacgtcccatgcaatagatgacgttaaactcgtttgccagttacataaaggaatgttgttacttttaaattgtctgttacatttaacatcttgccagtatgatgctactgtacactacgggtgtaggaaccttgtagtgtgacgtatcactcatatgtggatgggtgctccagacctttatggaagctctcagttagtagtgatccttgacttcattgagccctggtaacagtggaagtcaagatgtatatgttgctcaacacacttcggtgctacgaagctgtttgtggaagtactggcgaggttcattctgaatcatatgtttgtcacatagtcagggagtgccgtcgcttacgacggaccctttttctttataattacaaatctgtgtctcaagtgttgttggctggttttcttcttctgttttcattgttcatatatatacgtcagagtgaaagactcggtatatacaaaactgatccaga

SEQ ID NO: 2254 - DNA, 658 bp, unidentified
  source 1..658: mol_type = unassigned DNA; note = unclassified RNA viruses ShiM-2016 sequence
agctgctccgccttgggcaggcgttgtatgcaccccgccttggacagcgtaaaggtccatttctgtccagggatgacgtaaaaagccccgcttgggacagcgaaacagtcctattccggacctatccgggatagcaaatgcatgagttgaaaataggtatgtacaacagattactgcatgtttaattatttatatgtttctttttcacatgttcagcattgtacatataggcacagccctcgcgctgtactggtattcaccagagagttagccactcaacaaaacatattgccacttggagtattaagcgaaacccttgtggtatgaacataaatagcttactgaaacaaacattaataataataattctaacaatccatcagttaatgatgggccttctttttctgtatctcagacgagtaatgagtcatcagcacaaaatgtacattttattgatggagactcgccatggacttatgaggtttcacacagcaccgattcgacatccaagcttacaggattcgatgacgcggacctcggatcattcttatctcgaccagttaagattaaagaatactcttggtcaccaactgttcagttgtttgaaacatttaacccttggactgagttttttaataatgcggatgttaaagataaa

SEQ ID NO: 2255 - DNA, 659 bp, unidentified
  source 1..659: mol_type = unassigned DNA; note = unclassified Picornavirales sequence
aggtcttaagtcctggaaggacattaaacttaacccgtcaggaaacttcttttcctgtttttccgtgttttacgttaaaaatatggagtcagtggaacttactcgcctcgaagatgtgatccgtaaatctctttcattctagtataaaatggagattctatcaggctatcattcgtgaaacggttgtgtttttacgcatagatcagtaaggcgccgtgctggcagccccagcaaagactaacgaaactagatatatcctaaagggcctgggtggaccgaatggacgaatataaccacctgctgaaaataatacaaatgcacagggacctgttgcccctattgcaaataataacaactaccctgtggcagttaccgctggtgaggatactcacactgcatctgccacaaccggtttcacaaccgatgctaacatcgcaaatgtagcaccacaagcacctgtaggagttgaccggctttttcttgcatcgagttcggacaattacgaacaggatatcaagaccttcttggccaaaccggttgcaatcaaatctggaaccatatcgacagccgatgttgttggtactcctttgtatgctgctaatttacctcatgatggtctctctgctagtaatatcttcttaaagaaaattgaaggtttt

SEQ ID NO: 2256 - DNA, 660 bp, unidentified
  source 1..660: mol_type = unassigned DNA; note = unclassified Picornavirales sequence
gcattagcccgacttatagttggcactttgagcagtgcccgctttcgaaataattgtgaagattcaccctccatcttcgaccccatatctacgcatatggcgttattatgaagcaaataccatgtccctatttctagctcatgtgtattttcacttttattatctcatttgacttattctaacgcacattcttccattttcttagtgtgttatttaattatcaaatacaatacaaccccccctatttctacatggacatttatgtccattttgaccgattttttgggagggacaatttatgcttttatagatttatcatgggatagtggggtacaacccactactttatgttaatcaattctattttaatagtacctaaacctataattctggatacgcgttattatacgcaagttataaagcgtctatccctgtttagaaccatgtttctatccaaatacgatgacatccagaattgcatactcatgaaccccagttttaaattgaatttgacgatcccgtaaatatacttcagaatctgttcgtcctgattttatacttatgtagggtggtttcatgataaaaactataaaagaacgtccataaattgttttcccggaatttattctttttaaattttcctgaccatttttaaaccaa

SEQ ID NO: 2257 - DNA, 660 bp, unidentified
  source 1..660: mol_type = unassigned DNA; note = unclassified RNA viruses ShiM-2016 sequence
cctatacgtcgaaagacgtataggtagcattgtattatttgtgttgattagtttactggttatcacaaactagtatactgctgagacatatttagtaatttttaacgggtgatttatgagaacacctctccaaaaggagtaaaaaatctcattctttcaagctgtattcagctatcaaaaaacgttgtttcttcaattttcttcaaaaactgtttgatgaagttagttagattcactgatctgtgtatttacaaatccggtttaccgggaaatttggtacatttaagaccacaatacgacctaatgaattttaattgtaaagtaggcaaataattataagtcctatttttgatttgaattgtggaattaacgttttagggtgaatgaagtctgatgatatcgtgtagtgataaaagagccctgagaagctcgctaccagtcacagatgtatatatgtcgtgtcggacatagtcgagagacacataaggcactattcggttagttatagttaaagactacgctataattgaggaagatgaccggagtaccagctcatgcgagtaaaggtacgcaatttcaaatacgatcttcccgtatgttgattggcaagttaacatactatatatattttttgctgctacaaacaacaataatattaca

SEQ ID NO: 2258 - DNA, 662 bp, unidentified
  source 1..662: mol_type = unassigned DNA; note = unclassified RNA viruses ShiM-2016 sequence
ctgcattaatttgcagcatacatatttgacccagatgagttcggcctgggataacaatagtcgacaaaacttttaacccttttttattttcagggctgaccaccctctttcaaacggttagtgattgtctaataccacttgattattgggcaaagtctttttagcgtctgtttatgatttatttcattgtgctaaaacactttttgactctgtgcattcaggtatatcgtgcattgaactttcatccttgcattgatagaacggatttcatcagattcattgagtatttcttgatacagctcagtatagatttgcttgacgtggatatcagcccacgatactgatgtgattgattagacgtagtctgtcattcgagaatattaatactctttgtttccaggtgtcttcttagtaagcttgtctaactcagatatcttagtgtttgttccaaggaacgaatttgagcctacactcttgctaaccactggagtgtacaaactttgaggactcgacaccttcgaagggcttgtgttttaggccatgggacgtctccgaaccttataattccttgattagttgaatatgtagctcaaggtggattaggcgccacccaactatgatttgaacagttcaaatgagacattaggccgatcatatatact

SEQ ID NO: 2259 - DNA, 663 bp, unidentified
  source 1..663: mol_type = unassigned DNA; note = unclassified Sopolycivirus sequence
ccttttgatgtttgaattctaattccgttctcgccggagatgagtaccggcttgagtttaattcccaggtagcgcgagccgtgagtcagcccagacaagcgcagtagccctacttggagaggttctccttgagcgaccagaagctggcattgaatcgagccacataatgctgagagtagagggatttgcattctattgtgaaagcaataatttgagagctaagcccatcacattgtgcactcggaatattgtgcagcgcgaaaggttagtaacattaagttggcgaaaggttagcgcagcaatgattggtggtaacgctggatcttattgtggaagcaatggatgaatatgaagttgaaatcaggatcaccacacccccgcagcatagcggtaccgtactgaatgtcacaatccagtgatgatttgaagcctataacgggcggacgtgtttaaatggtgttttatgtggatgttagttcgccggaatgtgcagctccggatatcgagtcgaagattcagtgaccagtggagcaagcaacataggtaactatttcgtatgattttactcacaaaattgcactgggcaggagcttccaaaggaaccttctgcttctcgtaactgcacacaaactagatttcttattttcgaagagcatatttaaa

SEQ ID NO: 2260 - DNA, 663 bp, unidentified
  source 1..663: mol_type = unassigned DNA; note = unclassified Picornavirales sequence
ctgcaagtcgtttagacttgtagagggaatgttagttaatagctgtgcacatgtcgtttagactgtgtattttctagtcaccttaattggtgcataataaaaatactgttttttgttattgtctgataggactttaaactatcaaacaaacctttcgtagatagggtcatttctctgaacttagatgagaaatgatatcaaactatttagtgaacgatggtaacgatgttgtgatacttatcacaacattttaatccatgtcgtctcttaattgagacggataactacgaaccgcactgtttaattatagtgtacgtgcactcgcacacttaccaaccattttagtattggttggctatattcttatgaatatattgtaatattgtagtataaattaaactttgagaccaagtgttgatatagttttaattttgtataattggaggccatagcaatgaggccgttgtatgctttgaacaaaatgtaaagcctagggcgaggaacttaatagttcggaccctggtatttggagtagaagatataaaccgccccgttcaaatgggtaaaccaatttttatgctgagcagaaggccgcctagcccgacctgcaagctactattcaattgacctttggaagctgagaagatagtcaatcaagaaaaa

SEQ ID NO: 2261 - DNA, 663 bp, unidentified
  source 1..663: mol_type = unassigned DNA; note = unclassified Riboviria sequence
aatctcaatcttctattgagaattggtttttagattcattttacgagggttagtcaatgagattattacgaaggagtcctaattgtgtattctgtagcaggattgtacccatcccgctcatactaataaacggaacacgccttacgggaaatccgtattgaagtacgataaaggctgagcccggccttatcaacgtgagatctgagaagtgaagcacttgcaatgtggatcttcaagagtgattgttatttgcacgccagttcaatccagattacggtgcaaatgattcataaaagtatgagtacagatatctgcgcaaacaccctagtattcctaaccctcccctcttaaagcgtctacgggcgttgcaggtctaattgaaaacagcggtctgctatagagggagaattagacactaactcttttctttctcgcctcggagctttatagcgatgtgggaacgcgaacggtcactctctaactacttgttggttttgagagagacttagtacctagatacctaaggtgagaatgaacattgttatcaaaattataaaaactgccgaagcgctaacaacgtgaggctgttgttttctaaactttcttgacccataaatcgtatttagtcgtcactaatacgtagcaacgtttgcagcgtccctt

SEQ ID NO: 2262 - DNA, 664 bp, unidentified
  source 1..664: mol_type = unassigned DNA; note = unclassified Mitovirus sequence
gatctctctcaccgaacctggccccgggcaaatgccctaatccagaggtgaatgtgtaaagtctcaggccaaatggggttggagaaggtatcaaagattagattaataaatgctttaaggcttttagttaaacttcttgcttgattccgtccctggtgtgcaaaagcacactacactcgagaagaataagagctagataaccttagggataaggggatctaactccgaaatacactctccaacacccgtgttctcctcctccttctccggcagctttgcggctgtcgagagggtaaggaacgagataggtgcggattgacacttccagtccagtataaaaactgaacaactgaagtctatctgacacatgtataatgttttctaatttagaaactcatcctaagtggaaattagcggcgaaaagtcagctatggggtaacccagatgctgtttcctaagctaaattcgactctccaatgttgaccttcttaacggacgacctcttaaatgtgaggaccctattaatctgactttgatcggattagaatgaagacaccaaagggtaaagagttggatacggggacagtgagacactgacctagtaccaaacgctctagcacctctggggtttaagggagtttaagcccttttaatagtagtaaaa

SEQ ID NO: 2263 - DNA, 664 bp, unidentified
  source 1..664: mol_type = unassigned DNA; note = unclassified Picornavirales sequence
accaaggcataatcacattggaatacggctctgagtcccttttgaacggttaagaactattcaactgggaaggcacccgctcccttgtggcgatgtccaaggatgacaaaacacaaaacccaactctatgtttttgtatacgtatgaaatcttggtgttgttaaatattagcagccaagtaacgtaagacagaataggttgagaaaaccagaaactaatcagtaggacctccgaaagttagaccttctggcactactctgaacttattaaacgggatctctagcatctaaattttagtcgctgacgtaagcatttgctagtaagatactgtgaacagttcatcccagatctatgacccgattgaaataagaccatcttatgaacgaataacggattatatgatttgacggatagtctcattgacatgcacatagcgagtttaatatgattgaagtagcaaaccctaggggaccgcaatgaatatcatattaaggttgaagcgcactcaacccttgtcacgagatagtaaggacgttttacatagtactatagttttctcaaaactgtgtataggtgcggataacattgaaaccgttcaccgacctcatgggatcgtcctaggaaagcccatgttgtatgataaactaggcctcaatgtagcaca

SEQ ID NO: 2264 - DNA, 665 bp, unidentified
  source 1..665: mol_type = unassigned DNA; note = unclassified Picornavirales sequence
tgcgggtaaactcccgcatgtgtgaatgaggcgatgtcccaggaactaactgccgatcctggttttaactacgatccgtatttgttactaatgcgatatccccccattgtttgcctccatgttgttttcaacgcttttggccttgagtgttatcaagtgttttagcgacatagtgggaagctacggctgcgtccccatttttgagtggcgacccagttttagtggccactctgtccctgaactgcgctataatgtgaatttatgttcacaaaaacggactgatgtaactgttaatgactaaggaatagtacctcactgaagtatcaagaccccgttcgagcggtgtacatatatggatggaaaccttgtctgagtcatctcgaatactaatcaatgagggatgtcgagtaagcatatcatgaaccacatagaatagtggggtttcggggttagaggctctctgcagcaatgtatctctaacaccatggccgaaatgagagatagagaccacgatgtttgtgtgtaagtaatgatgtgtggaaagaaaattctgaatgttggtatgatatcagtctaaggggagtggctcacctaagagctacccaaacatttcacagcagacaacataacgtactgagagtagttggaaggttccagaaatcagt

SEQ ID NO: 2265 - DNA, 665 bp, unidentified
  source 1..665: mol_type = unassigned DNA; note = unclassified RNA viruses ShiM-2016 sequence
cttccgatcttgcgtaagcatgccctaagtatttgtggtggtctttaaaaagacatgattaatatgtaatatctccctttttaaggttttccctaatcagtcaccaccataatgccaaatgcatattacaaatggctttttcaacgttcgtgaaacgaattcacatccactattctagcgaatcaatgctcagctagtctagctcattgtgaatgttagcatcactgcagagcacatgtgatcatttctttgagcagagcggacccagtggcaatctgtctttgccggtttaaaattgtaccttaacaatccgcctatggtaacggcgtacccaggaccgcaaatccattaatgggataacatttcccatgttcttttgatattatgtgaacatgtaaatcttcaacaaaatatcacaatggctctatcaatctttcagcctcgacagttgaaagagggctctctagggatttatgtctatggcccctgtggttaaaacccgcccatccggaagtgtattgggactagcaaaggaagaatttattcaaatacctcctagttcttggatctgaccgggagttgatcccccgggtacactaaaagatgggacaggatctccactaccgcctgcatttaatagactgctttcccgactttgatatact

SEQ ID NO: 2266 - DNA, 665 bp, unidentified
  source 1..665: mol_type = unassigned DNA; note = unclassified RNA viruses ShiM-2016 sequence
agtgttagtcacttgcatgaagagtagccgttgacagtatggcgatcatactggcgtattgggctttcacttgggtagcagtacctctgtgcctcgtctgtacgtctccctatctcgggagtctaaaaatagattcggtggttcgacagtttcgaccgagtgctgtgatggcacgctatctgaagtctgcggttgctgttggctgcaacagcgttgggcgcgataagtctaatatgtttgatgaatcacttttctttgttcgtatataaaaaacattaagttgctttttacccctatgtcttaggacagtaaaaattcatacacgcgccgtgtactaaagataggcgtattcatattctttcgttggcattttcgttaaatggccgacattcttcaaaataccaggtaagaaaccgcattgtgagctggaaattgcactgttacatttgaacctttttaggcgagctggattgctcatgtaactgttggaaacacacttcgcaaaaggtggatgatatggtataactggtcactattgaccgcaaggagcattatgtatagtgtgtgctctgtaggcagggaagtgctgctgtgttactatacacaagtcgtcctttggcgtggttgccattggatctgttataccacacacagttttaccactt

SEQ ID NO: 2267 - DNA, 666 bp, unidentified
  source 1..666: mol_type = unassigned DNA; note = unclassified RNA viruses ShiM-2016 sequence
cccggagccctgcgtacctacgcaggactttcttttaacgtcacctcgacgtgactgaggcatttacacaccctcttttgaggagcgccattaatttgacttgtaaatgaacacaaaaccggcccccaaaactcaatgacgacaatctttagaatttaacactacccgcttttaaagtaggctctgttatttctattgaggataccgcaaagtttatctttcaaaacaactcactacggaagataagtgaccacggacttcatacaataataaaaatccgtttaaaatgacgtgcacaagtaattatttagagactcttagtaggatatgccaagatgcgttctcgcatatccatagtattaggacaatctcacttaattaatcaccaatcttttaaacttgataataaaatttgtatgaatgatacattgaccctgcgaaataaccttttaaaatacgatttaataagataataaaaattgaattgggaactcaataataaaattcttatgtcggtgttggcgaaggaaatttcaaatctatgacaacgtgaacggaaatgaaacatcaggtttttcaactacccgcatttatgtaggctcttgaaaccaaaatcaacggttcttcggaaccaaaattttagaattaaggaaaacaaaaaccaca

SEQ ID NO: 2268 - DNA, 667 bp, unidentified
  source 1..667: mol_type = unassigned DNA; note = Solemoviridae sp. isolate ybw116shi01 genomic sequence.1 sequence
agacagtatctgtatggtgtcggggtcgccagtagatttccaactgacggtctttcctctttcaaattgacctaacaaccattctggtgatgactccagacgttgcttaaaatgcacgtgaatcaagttctgaacatagttggctgagaaaccaccattgacagcaccgcccatttgatgaatcccaaggagttcattgcctttcatgtacgcagccccactataacctggcagagtcatctatacaggtagtactctgcaaggttatagtggggctgcgtacatgaaaggcaatgaactccttgggattcatcaaagcagccccactataaccttgtagagtactacctgtatagataactctgccaaagctaacagcatcgtgcgaaacatttccaacagttcccttcccatcgggtccaacaatttggcctgttgtccgaatctcatccatatgcccgacgttagaattgctcaatcccaatcgggagaactccgcttcgtccaggacaatggcaaccagatcagcatccaaagggatgcggacttttccagctaacgaaagccagacgcccaacttgctccttgcgcacttaaccaaacaagctttgggattttaattaattcaattgcgagttagaccatttattacttaacattcgtaaca

SEQ ID NO: 2269 - DNA, 667 bp, unidentified
  source 1..667: mol_type = unassigned DNA; note = unclassified Picornavirales sequence
tggtgttctcgctaggactcttggggtgcgaacccccttttcaacaaatattgttgaattgcaagtgatgtaacgtattgcactaattatagtaagtgttataccctccacaaaaatattttgtggagtgttaaggtatggattgtatagggcattagcaattaagtctgtaggccgaaccggcatgcacggtacatttgaatggactggagttatggtttgaacaacttagaagtcactgtgtgtattccttttaggttgcacattggcccattgatgaacgcaatgttagcgtagagtagtcataactattttgttcttgccatgttttcatatcttgaaaaatgtctcttgtttgttggcgtatggtttggtgctatcgtaaagcacaattccccagaagtcgtaagactattccgaaaggatttgggttagccctgggggaggtaggtctccatgactcagacattggatcatggcattgcaaaaacacccatgttgaggtggtgcccaatagatcatgaacaatctctgtttaagaatgcttctacatgggggtctatggcgctgcgaggaatatggtcatgtaacaagtagggttcctcttctacaaatgttgtagttggtgtttagattacaatctttaggaccataccggcagcgttaa

SEQ ID NO: 2270 - DNA, 669 bp, unidentified
  source 1..669: mol_type = unassigned DNA; note = unclassified Picornavirales sequence
gatctctgtgggggagttttattctcccccataggtcattttaaagcacccaacatgttatgtgcttaataaacttgcatgcgcgtggtctggcgggtggtttcaccctccggggtgtcatcatcaacgacccggtttctgtttatcgacaaaagcaggggcttggtggatgcctgattcaccacatacatcgaaacatgaagatgtaaaatttatgtcgttggtaaattacgttaaagttacaaccaccaccatcaggcaggattagattatccttctacgctcggtagacaaaaccttgtattcgggacaatctaatttggttatgaagtactgttgtgaaacagtgtgggaactgcttggttaggttaattcgttgtggagaatgcaccgtggcaacacgttttccccagcatgaaaggtagtgcatgccctagaccttagcctctcatagtacctgctgcgtagtggctttatggattaattgaattgctcctggagtctaaggagactggcgtaacttaatacgctaccccccttctttaacaggcacaattgtacaggatactcacgtgcagtcaaagaaaacccccggagagttagaaattttgcgagagacagtttttggtttactttgttgcgacgagtagcttgtaagaggccggcaac

SEQ ID NO: 2271 - DNA, 669 bp, unidentified
  source 1..669: mol_type = unassigned DNA; note = unclassified RNA viruses ShiM-2016 sequence
gtcccaccaggttttcacctggtggactcccctatattgtatgatttcattgcacagtttagcacctgtgccgtgcttttatacgaaaattttattctcctttatatacctttcacagtaattttgtgttctattatgtcaatacctctacgaggttttgcaagaaccctcgtatgttgtgttgtctttgaactcctggtgagtttagaaataacctcatcagattactacctattttatacataaagcatttattctcgttggtagagaactaccattcccgctcgtctgtaacgcgttaagtgcacaccttttggtgtatttgagctgattatattgaaactttatattcagatcgtctgttttaagtatgttactttattgtgcgtaagtcccttcaagaaaacttgcgtagtcgtgtgagactagagaactcagactaacgaactttcgattctgtcataattggaaatgatttatatgaacttgtttacaccgccccggttgtcttaagttagatactatctaggacccatgagtggttaaccccacatagatactagtattaaaatcggccggcgaaagccttgtggatttgcactccactccgagcctccgtccctccttcatcggagagggggttaaaactttttagcttctatttctttt

SEQ ID NO: 2272 - DNA, 670 bp, unidentified
  source 1..670: mol_type = unassigned DNA; note = unclassified Alphacarmovirus sequence
gcggcgatatgaacactgccttaggaaattgcatcttagcctgccttatcaccaagcacatttgccgtgggttagacgcgagacttatcaacaatggtgacgattgtgttctcatatgcgaaactcgtgacgtggggcgtgtcgtggataagttaacgacagcgtggctccactttggttttacatgtatcgcagaggaaccagtctatgaaccagagaagattaggttttgtcagatggcccctgtatatgatggtgagaagtgggtgatggtgcgagatccgaaggtcagcctaagtaaggacgctttttctatggttcgttgggatacagtgaagaatgcacaacaatggtttaaagctgtggggcagtgcggtctatctatagccggaggggtgcctattgtgcaggagttctacaggatgtacgagcgcgcgggaggtcatgtcaaactcccagtgttgaaagaggttagcgctagtgggttgtttcatatgagtttcaattccaaccgggcctattctgagatttccgatgctgccagatttagcttttggaaagccttcgacatcttaccagatgttcaggaggccaccgaagctgaactgcgtcgcacctggattagtctcgattttggcccggctggtgaccttaacaaccctatcctaga

SEQ ID NO: 2273 - DNA, 671 bp, Pediavirus cirripedis
  source 1..671: mol_type = genomic DNA
ctctgcggtccacttctgtcccacaaggggccgtgcctgcccagcgagtacctcgctctgttcaaactcgggaaaagaagagcattgtgaggttacttcctaagcaactattttcttttaagttagttctccttgctttttgcgtgtttagtgctttgtaggtatgtgtggtcccctatattggattatgtccattcgcgccctgtggcgccttccaggcagggaccctagtagaagtgatgcgtcctctcaggtatctctcttgtcgttagaacgtgtcgttagtgtggagcccggctccattgcccgtctccccgcagctccgcttgaactatacagtgatggtcgaattcgcccgccacaagccagtagcaatgatctctctgctgaggaattagatcggaggctagacctccttgcattagaatcaggatgatcgatcccagattgcccctcctcccgaatacgatatgttagtacggaggagaggactccacggcatttctgccaaacctggggtagcaaacatagggtacaaatacacgtgtcgttctgggtttctgatttaaaaccaccgatgatcgggattccaccgaaatcactgtttattagccgggccagaggtcttctgtgttctgagctcctgcttccggaactgctcgaaagcactg

SEQ ID NO: 2274 - DNA, 672 bp, unidentified
  source 1..672: mol_type = unassigned DNA; note = unclassified Picornavirales sequence
atgtagcaatttgcaggtgcccgagacatggcgtgtatctgtattattgtttttatgtgaaagctcgccttgactaacccgatggctccttttaccgacggtaattatctttaagtaaggccggattagtacgtttcaagttgtggaatataaaaaacttctttaatttataaaagtggatgatgcaaaagttggattaagacaaagaactcttatacccaatgatcgcacgcaaagttagtatttatacgaaaggttagtgcgagtctgaaactcaacaaatgacagaagaaaattattttgtgatggatagcggaaagacggttctggaagaagagagaaaggttaaaagactagagcatgtatttgtttttgtggaaacaaatagatgagctagagaacaggttggtctatttaagcttagggccttacctttctaacgttacccgggagaatctgccaccattgtgctgggtggataacagtagtatctgagagtctaggcaaggaaaataggtattttcccctaaaacccttttccctttatgtaatacccatgtcatgttttaaaagagaagctttccttttgaaacacaagcacacaaatactaaataaatatattacttgtgaatttttatttctttttgatatctttaaatacaacgtttaat

SEQ ID NO: 2275 - DNA, 672 bp, unidentified
  source 1..672: mol_type = unassigned DNA; note = unclassified RNA viruses ShiM-2016 sequence
caacgttaatgattccgtttgtatctttgatacataaatcgtttcgatataacgatttgactcagtcaatagacgtattgccttaaccggtttccgcgagtggtacttcgcgatacgtgcctcgtatcacattgctattgatttgcagggtatgaactttagtcaagagctgggattttcctgtgccccgatttcagtcttcacacaccaagacacagcgagtacatacaacgccttggtaggtcttaatagttgcagtagttttagcccatgaatttggctctgattctaccagtacctaaccttcgccatggctaatgtcactggattttcgctatcggggagccgcatcggagcgggccctacctaatatccaattggattgcaaaatgatcacaactaaccaaaaaaaaacaaatcatccaaacaaccaacctcacatccaccatttattcaccacaatctggcaaatacataaagaccaatatcacagattttaaaattgttcatgcaaattgtttttatgataatattaaattcactaatgtacctttgctttcagttcaagattcagaatattatttgtttacaccaactattctagccactaaatttcataatataacaaatggatcagttacagataattttgtcagaaaactcaccacatta

SEQ ID NO: 2276 - DNA, 672 bp, unidentified
  source 1..672: mol_type = unassigned DNA; note = unclassified Riboviria sequence
cgggcattacccgtacatcacttattgaattatttggcattaaatatgcatagaaatcacaccctcgagtggcatctgagcattacgatgctcttatgtcactccgattgtgactctattaattctatttattctaggtttattcacacctccgtctctttcgagcgtgaaagttgaacccttgcctatgtatttgtgaaaatccagaacgaaggtaggtacacattgtagtgtatagtccttgtctaggttctcgttaggcacgagttcaccacctaggaataaaatctactggaatgccaccagtagttacgtagaaagttaaacgtatttattgacgtctattttaagatgttgaactagaacttggattctagtgttaggcgatttaatcgcttttgaaattgatttttcttagtgtatcatagcacagttagttaggttactccaatttcctactaaccccttttataggtaaaagataatgataaagtaattagagaaataacgtatgacacttcatatatatgtttacgtgttcgaccggcgcacatggtaagaccggaatcgagatcgtcaatgtatatgtgcttgtttgaaagcaatatgattaaaatttgacgtagggtatgagaaaacaccccgtccattcaattgtaataaaccacttct

SEQ ID NO: 2277 - DNA, 673 bp, unidentified
  source 1..673: mol_type = unassigned DNA; note = unclassified Botybirnavirus sequence
gcatgcctttgagatgcagttttgatttttgtacttaacaaaatgccatggatatgtatgatagctaatgactatctggaacaagaggcacgctgcccccggctaggggtccgaactgataaggttcttgcgattgatccggcgcaaggatttctcatttgagaaacagtcttgaattaacaagtttaaggacggaagcctcgacatgtccaatgttcacaatgaagctggtcttgtgaattcgccaaaatccagtgctttccctggaatcgtgtaccctctcattagagaggcgattggctggaacgggtgtaggtgtcagcaatgccctacgtgttgtccgtgcaaggaggagagctgcgtatccagcgtagtttgaatccgagtgtaacgactgcgaagcctttgtctgtagggtagtcctgtaaaagggggctatccgtccaggaacagtctgtttccctgtcctcccgtgaggtgttgttcgtgactacagttcaacagtaaaaaacagggcgatgtgtagatcggaaagatatctctaacaaagtattaagcgaaagctaaccgcgccgcctgccgaacgtgctgactagtacccgggcgtaaaactacaactacatatcacaaacctacgacttaactaaaacattccaaaatctacaaaacaaac

SEQ ID NO: 2278 - DNA, 673 bp, unidentified
  source 1..673: mol_type = unassigned DNA; note = unclassified Picornavirales sequence
atatgtgccctcacctgtcaattgggaccaccactttcagtgaccccatgcgaagtgctgagagaaaggaagccttcttacccttcatttgtgaacccactagtctaagccgcttggaatacgatgagtggaaatgttcattctaaatggagtgaaacatgacttaacttttctagtcagacgcatacttgtgtgtctgagcgccactgtcttggcgtaattcttcagagtgtcacgccgtgcttgcggatcttacgtggcacatgacaaggctctcgctggaactgtgagtctgaagcatgtgaagtaacagtgaagagtgcatgatcacacgtatgtgtgggctatgagcctgcggatcaacaactggtaacagttgcctcaggggccgaaagccacggtgttaacagcaccctcatagtttgatctaccccagggtagtgatgttgtgtacctagtaattgccaattttcatgttttggtatcacggcataccggagagttcgcgggtgaaggatgcccagaaggtacccgtaggtaaccttaagagactatggatctgatctggggccctgtctggagtgctatacacacagctcagggttaaaaaacgtctagcccgccaggacccgagggattcgggttttcccttaaaaaaacccgactagagctt

SEQ ID NO: 2279 - DNA, 674 bp, unidentified
  source 1..674: mol_type = unassigned DNA; note = unclassified Mononegavirales sequence
ttgtaaaagaaaaaggataaccggcactcctgttataaaaacccgatagtaacgctcaactcaaatcgctgaaccaatctcagagaggacaaggagtgagattttcctcaaggagagagcagaggagaaaaggtcaaggggaagaagaaagaaacaaggaacaaagagggtgaaaagagagagaaccagtggtaccaaaaatgacagattacgtcacatgcaccctctgtgggaccaaaatccctgtgattgttgtccccctcggcacactcgaaagagcggttcagtgtaacgtatgcgggcaaaactattcggtctctccaaagtgaactggtgtattgtagaagccaccttagacatgtacatatgtatacacatgtgtatgtgtctatatgcatacacacatctatatatatatatatatttttgatcaatttactcatttatttgtctatcatctttacaatctttcaaacagctcaagaagcatcagcgtatgtccatttggatacgcactacgccgggaagattgcatttttgtattgtgttttacaatgagtgttgcagctactttttggttggagtgttttcctggatcgggggttctttgttattaacacaccatccacctggtacttttcagatttagaaaaacccgatagttaccagtcaaa

SEQ ID NO: 2280 - DNA, 675 bp, unidentified
  source 1..675: mol_type = unassigned DNA; note = unclassified viruses sequence
ccattacggccgggggaaaataagggctatggcgtcatgccatagtttatatacaccacggattacgtgaaccttgttagtaataacgggtgccctttgttagggatgtgttttatgaattattaattatgttataactcttattttcaactacgggattaaaaccccactttaaaactatatagggaaatttagtttaaacctgtataggaaattaaggattgataattttattgaacgagcctactcgttgaatatttatagttagttgtgataactagccttgtatttagacatggataatctccagcccatgttcgacataccttaggaagtttatatgcggcacgtattcaattaaatgaagatgctataagtgcttgattagacattaaaactagaacaagttctctagttgtcgctggtagagcataacttatagtaggtggattttatttgatgacccaagtatttatgaaatttgtcggcctccaagttgatcagctaattatttatattttgcgagtaatagtagttcagactgtgctatccccttgacatgcattttttggttactccagattgtgatattagggctctaatattgcaagactgcccaccaagtaaggaacttatgtaaacttgcttgggaaacacattactcaaaaaattatt

SEQ ID NO: 2281 - DNA, 675 bp, unidentified
  source 1..675: mol_type = unassigned DNA; note = unclassified RNA viruses ShiM-2016 sequence
gtggtttacacaccacgcacggtatatagttaaaagtcctcccaattgcaaccccggcttaacccgctcttttaagagttcgttacagcctcgcttgcatgacagctggttctatattctttatttttctttttgtttaaatgtgtacgtcttttgttagtgacgacgttaaaagtaactaactgagttttattagcgacctcattaaaagtaacttttatagtggatatctatctcttatcccgagtgaagattcgttaaatcactggacttgatttctttcattgtatgaagattcagatgcctatagtacgttcgaggtgtaaaaacctcttcgcggaaataggatatacatctgtttttgattactttgttagattgatagtgacggcttgtatcctactacacgtttgacgtgatatcgtataatcactaggtggcttgacaaccgcccaaatctcttgacctctcatgacgaagcataaacactaaactgacctcaccacagtagaattgtggccagggaactggttagtggtggatagaccttatgtcgaatccgcagtgttatcattgatgttttgagaattgtttaggtcggctagttgagaagctatagccctcccatgttgtcaacacattaggttctcaccttttacctcttttctctccttt

SEQ ID NO: 2282 - DNA, 676 bp, unidentified
  source 1..676: mol_type = unassigned DNA; note = unclassified Iflaviridae sequence
ccccccacccgttcaaccaccgctaacatgtcggcccagtactacggcgctgtgtcgtcccctgttatgtgctccatcatcaattcggcctcgtactacggcgcgttgtcgtcttacccaagatgaggatattgttgacggaagggagaaaacccccgctgttttgaaaaccccaacttttatgtaaaatgtaatgtgttgtccacgttgtatgtttacgcggtggcatatataacaagaaccgcctgcagactaacactcacttcgtagatttgaggttaaagtttggaactgaacagttgatcattttctggtgtccccccagttggtttaagtactgtaaaaatgtgatatgtagtaagtgccagacctcttaacagttagttcttcggaatgttgattcaggtgacactgatgatcatttgtaggtatggacttggtatgtcgtaggggcctgtcaacgcaggtgcagccgcgcaaccccttgcagcaaaggactagatagtcgcaagattagatgtctgatgaatataccagacacagataatcgcttccaggtaaataactcactgtctcttcggagatataggacggtacctcggatagtcgcgcgccttaaccggtatctaggactcgttcgatcggagaacggcaagggctcccggattattttgca

SEQ ID NO: 2283 - DNA, 677 bp, Odonate arlivirus
  source 1..677: mol_type = genomic DNA
ttgatgaagttcaactactctttaaggtcatacaaaatatataatgtatcttatatataacaatatacacattatgatgtctcattaaacaattcgtacaaacagaatttcatgagaagacatgtaattgagtaatcatggttctttgttgtcaatgccaattggtatctgcttagtggccagaatctcgatatatattcatatcactcaacttgccatagtatccaattgattgtggtaacgtggtttgaagccatgtagaatgagaaactcattcttgagagatctctttgatttccattatatcaagtctctaattagttacatcaattcttttgagtctttaatttgttagaatcagttgatccttagcaagatcccatgcttcctacgagaatgagtaacttaacgttcgatatggaggagcaaacaatgaataaaaagacaagacttccacaggattatgcaaacatgagatgtttaccatcaattattttacccattgttagattccagtctttagaattatttttcaaattcttagcaactgaaaagtgatctataatataagtaattaaccaaaatacgatcaatcaatatctacactttatcactgtgtgttacattgttttagggctgtaagattcctaatgaaaagtagcagtttctgatgttgc

SEQ ID NO: 2284 - DNA, 678 bp, unidentified
  source 1..678: mol_type = unassigned DNA; note = unclassified Picornavirales sequence
tcgaccaagttggaggacacgttggaaagtacattgatggaaaaaataatttagaccttcaaaatttaaaggggagaaatttattagaccttcaaaatttaatcggtgatcagaaaaaagatgtcaccggtatggagatagctggaaataaagatttgcagaagaatcaacttgacaaccaggataagtggatcaatgcaggacgtgactcgttcactaaagcaggcctcccggaattttcattctgggatcggggtcgcggtggaccactcaatgtcggttcgacgagaagttcaatcggtggtaacaactttgtgaactcctttggaggcccaaacacaaacttaccgtcaaccggttcctcgccatacgcagacttgaatggattatcccgcccgttctgatcagggttgtcataaactttcttcatcatttcttgcattcttaagcgttttgtcatgagtcgcaggttgctgttactcatggggtactggtttgcgcacaacaaagtgttcttactggaaaagcgtttcattatgcacaaaaaaattagaattcctaaggagcttaactcccgtcattctagctatcgtgtaaactaaattagtttagtagtctttcttaaaaagataaattaaaatttaatttgggttaaacataacatcatacacatggatc

SEQ ID NO: 2285 - DNA, 678 bp, unidentified
  source 1..678: mol_type = unassigned DNA; note = unclassified Picornavirales sequence
tgaaccgttacgcaccactcagttggtgtttggtggcaccaatgatggaacaaaaggctacaccacttgggctacggcccgcgccaccttgtggcgcaaagacattagaagaatagcataccgcccactagggccctgcagccagcagggtaacgggcaagcacttctgtctccccggtagaacggtataggctgtacccacggccgaaaactgaactatcgttacccgactccgtacttcgcaaagcttagtaggaaactggaaagttcgagttattgacccggagtgttccccccactccagaaacgcgtgatgagggttgccaccccgaccatggcgacatggtgggcatccctgcgctggcacgcggcctctaagaggataactcgctcctactggtaaccgaagagccccgtgagctacggtttattcctccgcctccctgaatgcggctaatcctaacccatgagcagttgccatagatccatatggtggactgtcgtaacgcgtaagttgtgggcggaaccgactactttgggatggcgtgtttccttgttttctccatttgttgttgtatggtgacaagttatagatctcgatctatagcgtttcttgagagatttccaaacatttattcaagtcgtacaattcttgtgtttaagcagtacagtgtaagg

SEQ ID NO: 2286 - DNA, 681 bp, unidentified
  source 1..681: mol_type = unassigned DNA; note = unclassified Picornavirales sequence
acaataaaatttatgaattactacaattattatatgtttagaataagtgcttttgatggttcgctctagcaaagcgggtcacacgagggaggaacagattttggaatctcgtggcttattttattctcaagtatttatatagatgggatattatcgatgatttttggtgcagccgtaagcagcagagaggtaagaagtttaggcgaacataccattccgaaaggagcacaaaccgcacacaatggtttgtgaacagcaataatggtactttcactcgttttgcattatttgagtgtgctggcagggtcgaatctgtcacaattaggatgtcggcttaatgaaccgagtccctaattgcagatgcattactttagagtgaatagttttcaccgacgatacttaaactgtggtgactccacacccacctaatttctaaataaatatgagacaagtctcttatttgagcatttattttattgttggttgggggggcaaatccaatgatgaatcccaacacttctctcatatttattttccgaattagcaccaaatctctttattgattttatcaggagtatctcggactgcgttctatcgtcgtttgtccgggtgactgtcgtgaaagacgaatatttggagagaactccagtagctgattctgaatttttacaatattgccct

SEQ ID NO: 2287 - DNA, 682 bp, unidentified
  source 1..682: mol_type = unassigned DNA; note = unclassified dsRNA viruses sequence
cacgggggcacacaacgatttaacgttgcatgatgtgatcttatcgtttcatcatgtatatatcgaaggatatataatgtaagttattttatgttatattgcttgagggggtatctcaggcacttgggtatgctttatgccgctatagcgttgtcccttaccgacacctatgttgtttataggtgcagtcagtcatgggaggaaatgcctatgccatcagacttagaacaagtcatttagaatgtcatcgtttcggccaaccacatacgaagtgggtggcggtccattcaggcaactggatgcggctagttacgtgtaactcgataccacaaagctcgcagcaacgaggccaggctttaacaattctagcagtccatgttagaaattgcgaaagataaagcaaggtgacccaagaccaagggtaagcaagggtcgacgtttacgttcgacgaccgcacaatctggggagtaagtgattgtatggccctgttcttgcagccagcaggaatatccatgtgtggcattgatacatgggaagcgtcaaaggactgtctagccatgccacagacaagtacatttgggtacttctagttaatcaagaaagcgattagtttcgcgaccaaaggtagaccgcctagatctagcctaaatgccgatgcacaagcggaggtaatctagcact

SEQ ID NO: 2288 - DNA, 682 bp, unidentified
  source 1..682: mol_type = unassigned DNA; note = unclassified Picornavirales sequence
acatattttcgcccggtgcagtgtcatagcaccagctggatttacttctgcaagtggacgcatttgcagccatatctccagccgtacctgagcttcctaatttctgcacgacccgtgtgattaggccacttacgtacaacccctcacccttctatttctttcacagctatttagtattacatccgtggcgttaggcccgcccaacatctaggcctctctatagcgtgtgagatctatttagaatttggttgagttattgtccctcaaccaccatccgtttgctactcacttgaccttgacagagcattctgttagtgcatagtagtcgattccatccagtaccccttgatcccgggtatctggcccgtagactgattgacttcagcttattgcgaagcctacccaccatagtaggagatagtagcgagaactgtcgatggtcagagcctgctaaagattattatgtacagtgatcaccaccttctggtattgtctacaccaacgtccattcggtcttaatcgagcctacagaacgcgccacgttctggtgctgaattggataaacaaacgtttagctatggtatagcttgtaattgtgacttcccgacgagggaccacatcgtttgctctggctatggtaaatagctaagccctagtaaggacttccacaggagcctccagc

SEQ ID NO: 2289 - DNA, 682 bp, unidentified
  source 1..682: mol_type = unassigned DNA; note = unclassified RNA viruses ShiM-2016 sequence
tgagggccttcagccctccagccgtattttgataatagcttagtttatataagactaatatatagaacagattaattcgaactatatatatgcaattaaattttgctattatcaaatgtggaagtatttcatctttatataagtctaacgtattttcaacagataaattcgagaatttacgtatgcatttgctttcacatttgtttttgatttcaaagtcattaaacaattatgtttgtttcattatcattttattaatgttaatttatatacttatacatctttcgtttaatttcttcgatttagctagctgacattcattatgaaacgcacataagatatattacgccggatacaggtaatatatagagaatcgtgtgctgcctgagtaaatatgtgtacttaagaatatcttgcgcctccatcgttagcgtgactaacgtatatatttggattgtataaagagcattagatttctttatgttttatgggcctcttttcaccttttggtcattagagtctacagcatatttatgtaggtatggcgttgttggcttcccagcttgacaagaaattatccacataaagacatataagtatttgttttcatttcccatattaatttaagtttatgggttttagctctcctagttttccctaatataactaggagatccgcaaa

SEQ ID NO: 2290 - DNA, 684 bp, unidentified
  source 1..684: mol_type = unassigned DNA; note = unclassified Picornavirales sequence
tggccatagtattgcgggttagcgtcccattaagattttaatatagctattcacaaccttaatttctttctttgattgaattaagccgctgtgtttccctttccgcacaaccactttgtcttcttttgttgatattgtgccgctgtgcccccttcttttcccctgctctttttatgacggtttagttagtaacaacttgaggaatagggattcaggctccagcccctggaatctatcgcactgttaccttgggagagaccactaccattaatatggtggcagaggtttcggtctcagtgttattcaaatacagttgttattagcggcgttcttttcggatgtctcttggtgatctcttacactagcaaagattgtaggaacgatgcctttggattgagctcttttgcatttacggattcacataagtcacatacctttaaatgtccctctaggcatgttaattagagggaaggtatgtatcagaatgtgtctatggtaccctgtatgtcaatggttagacatacacattagggatacggttatggcccaggaaacgttggtttgcctgggttatacataacacaaacgctcattgcgagcttcccttcttatgatttttctcctttggcgaatggaacgcgcgtcttcggaccgtaagtactaatagccaatcccacaattgaa

SEQ ID NO: 2291 - DNA, 685 bp, unidentified
  source 1..685: mol_type = unassigned DNA; note = unclassified Totiviridae sequence
tcccaagctctccttctctacggcgaaagggcggggtgacatcaatttcggatatcgcccgttgatgacttcacctctaaccctctggaatgcacttaaatggcgtagcctgacggtcccttctagccaaagggtgaaacggaagaaggctacagtttctgtgtctgcattgaagtgaccttgtgatctaacaccctgaatacttgttagttcaattgtcttatttctggctcaataggttcggctaacgcgggttgttcctaagcctatacatagtcgtggctgtcttgtcgatcgtaaacagtgacagcgtgactcatcgtgatcatttaaagtattttattgctggcagtaggttgttgctattaagtctgaattgttccgtttgctgtgctttcaacatttaagcttacccacttattgcttgtggtatttgtagtacgtattgtggattgtcaggtgagtttttggtgcgtgtgccttaacacagtcttagtgcagactacctcactgatcgtaaagtggttggtagtgtcactcgagctagtttagtatcactccttctattagtggttgctgtgtcagtttttgtgttttcataatatttaacttcagactacttcactgatcgtaaagtggtagtagtatccaagcccgttgggatctttaactttaaaccttaaca

SEQ ID NO: 2292 - DNA, 685 bp, unidentified
  source 1..685: mol_type = unassigned DNA; note = unclassified RNA viruses ShiM-2016 sequence
cacgggaattcccgtgtgcagtgtaagttagattacttggcagtttttgccctaatagaccatagacgtcatcctgggcatattatgcccattgtgaccactacgtctattagtttttctaacacaaccaatgttttgttctaagtattgatcgtgctaaactagcgatccccattttctttgagttgagttatattattacttgactctttactctattttaagtagggtttttagttagcctgccagctagctatttgtttgtcactattgtgacacttgattcttcagattgaagatgtagaactatacctggtttctgagttcaggcgatttaatgttctaatttattgtgatttgtagtgaatacagcacactaatagaagttccgtcaatcttactattagttctccaatattattatttggagatatcagatcattttagatttttacaaataacgtacgaactctcgttagtgtatgtgtgtgtaggccggtaccgtatggataaatccgaaatcctgatcacatatgcactagcgcttgtagaacgctatatgaagcaatctgaagaatagggttaagcgagaaccccgttcatcaaatttcaagaccaccactcctgtatgaaaagaaagtttattagtatattatatcgtttcaagtggtgaaaaattgacaat

SEQ ID NO: 2293 - DNA, 686 bp, Tremovirus B
  source 1..686: mol_type = genomic DNA
cgggattacccgtgcggcgcttttggacgctctagcttggaggcgtaatatccagctatcgtttgccgtgatttacggctattttaattaataaaattcaaaaacattgtgcccttcccccaatacgacctggatcttggtcgtggctttagactcaccatcagtgtatggtagtactttgcgatattatgtcgcaatggcccagattgtttgtcatactattgggccctctcttgtggcccaatcttttctttatgtttgtttcttagggtagtctgtgttaccaagccgagtgctcgcgtgtggcatgattagcactatcactagggtggtgtgagtaggcgaaacatacagagtggttgtcattctcatgtggtaatgttctgcatttcaacccttacaagtattaaggtggtgtatgtgtgtccgtagtaggctacgggtgaaactacggggctaacaatttagtcagcaatgtgaatagtggcggccaattgtgcaaatcaaattgataatcgttgctcaattcaacgcctgggaactacactaaagctgcatacttgccactggaggatttgttaaggggtggttcattatatcacatgaggattataccgccccttctacgggcgcttcagacacgtattagttttcccattataaaacaaatatgatatagaggttat

SEQ ID NO: 2294 - DNA, 687 bp, unidentified
  source 1..687: mol_type = unassigned DNA; note = unclassified RNA viruses ShiM-2016 sequence
gttttttattattgtttatatgtaattgtatttgtttatatgtattatgtgtagtgtttcgtggtaacattgttattgttacctgtaaaaatattaaaataacaatataagttggtatacttgttaactgaagttttgtagaatactgggttaatctggatttttgtatgaagcaattgccgagtaagatgtcgtcctatagcttatcaaaatgttcttcggaatagtttagtttcataaccttctgtaattcatatcactgagagaagcttttaaagactttcaaatacatgttacggggaaactttactgggtcgtgccgttgtttaagctagatagatatatcattggaccttacttggactgaacttttgtggattcttcttggtaggttagcaaccggttttattaattactacctttcgtttcgagaaatcctcctttggaccgccaaaggatcgtcgattctatgaactgagtgtacatacgttgagacgtttcgaaatgttctaattaatatgacatctgcattatggaagttttcaagtggttaatcccaagtttccatggttctgccgccgaataactgggggttctcatcccttaagtgatgacgctggaaagacagcggactgatggaaagacatcatttttcagatttaaagcttttatgactagtacaactta

SEQ ID NO: 2295 - DNA, 688 bp, unidentified
  source 1..688: mol_type = unassigned DNA; note = unclassified RNA viruses ShiM-2016 sequence
acacaaatacgcacatcactaactcaaatagtgaagcacgggaaagtgtgatgtggacagggtgtcgcctttaaacctagcttttcagctttactactcaggcggagccagagaggtgcttctattgcagtgcgtgggaccgcactgcaatgtaattagtcccgctagttctacagcgaataccgatcagttggatcgagactcagtcactgtttgtgatcaagtggattctcttgccattaataatggacccgagaccactggtgtcaccgagtttgtacaggaggcttgctctcagattgacgtgctaggtgcacatcacgtgcccgcgccgttatctggtcagagccagtttcaggacttgaaggcctatttctcccgaccacgtctcgttactaatggtaacgtcacaagtgtggggaggattgcggccatcaatgtcacgccgggcatcctgttggctacgctttttcccgatggggttaagcggttgacaggtgtgtatggcatccgtttcactttggtgtttacgctgcaggttgcggctacaccattccaccaaggtttgttagcattgaactggcagtatgaggttagttctaacactaacgaagcttatgtgcgcagtgtcaatagtgagactgccaccaatcttccccatgttagacttgacctcagtgtggacacg

SEQ ID NO: 2296 - DNA, 688 bp, unidentified
  source 1..688: mol_type = unassigned DNA; note = unclassified RNA viruses ShiM-2016 sequence
gctcttccgatctccctggagaggtgtaattgtatctcttcagagtattttttggtgcgtgttcccgtagggtagtatactgtgaggttgctattcgtaggggcatgttaagaataatatatatattatcatgaggagttgtttaagccgtgtgttatcgggcttctttgaagtagtatattttctttgatttgatatgttacattttgaaagcgatcttttcgaatagtgatgtgcaaatatacagcaacgataatttacacctattttaattcttgtacgaagattttatcttcaattaagatggagtcagttaaacccaacagcctctaaagtttgaggaaaaagaacaaacgttggtgactgtgtcccatataattgtatttgattaatttaggaataatttggattgctagccttgtctgtggtacgttattggttttagcagcggccatgcagttttgaaaacacagatagtctaggcatctattagctgtagaatcttttgattcgagttgtattggcaatttttggttgacagccccctatcgtcctgggtaattgttcaatatgacgtgcaagtgtatgcaaagagccgattctatataagctcagctatgttaccccaagttgtacgcgatggtatcaaatccttgggagtaaaggaacagagagatagacttagttc

SEQ ID NO: 2297 - DNA, 690 bp, unidentified
  source 1..690: mol_type = unassigned DNA; note = Astroviridae sp. isolate coa196ast2nc genomic sequence.1 sequence
atcaaggtatacccttgatgaggagggttgatagtgtaccagactatattgaggcttatttgagagcccatgctgctgttgaagtgcgtctgcgtgacgctcttaaggaagtatctcacctgaaaatgcagctgatgattgctgataggaagaaagatcgggctgagaggaaagtagcaaatcttgaaacctggcgcagaataagaaatgctactttcctctcagcccgatctttcttcctatcagcaatcatcagctgcattttcaggtgagatacttccttaagagcgtcacgcagacgcacttcaacagcagcatgggctctcaaataagcctcaatatagtctggtacactatcaaccctcctcatcaagggtataccttgagagacaatcctgacttgaaaaaactcctcacctttcatggcataagccactgtgaggttctggagaaaaaccttgtcagttctcagcaattctttccagacattagtagtgccaatagcactcctccaaagagtaaagagattctgggttgctacgccagatatgacctttgaaaggccagctggtgtggaacgatccatctcctcttacgctttggaggagtgctattggcactactaatgtctggaaagaattgctgagaactgacaaggtttttctccagaacctcacagtggcttatgcc

SEQ ID NO: 2298 - DNA, 691 bp, unidentified
  source 1..691: mol_type = unassigned DNA; note = unclassified Dicistroviridae sequence
tagatacacgtcctacttatgtggctactcgtggtgcaggttgtttatcctgcaccacgagtagccacataagtaggacgtgtatctacggcactgacggactaattatgtgttgaggatatcgacggatagatttatgaaataatatatttctgacggcgatattgtcatacgaaatcccccataggcgttatctacggcactggcgaatatggactaaaaatgtttaccaaactgatcacttagagatccccaaccacacataaatacacttataaacgattgataacactataacaatttgtaggcaatattttattagaatttaagcataatgatgttagtaacctcatagtaacctagatatatttgtttgacaaatatcccacagttgagtgaaatcaacaatgggccgtttaggcaatgttatgagaactgaggcgttaaattttgacaaatacaatacctgacaagtcccttttggattgactaaatataagaatagtatcaatagtttttgaatttaaataagttattgtagatgaagacatgtatttcttgcaataacctctgtatttcttaaactatatgcaattactcggtggtacttgcatcttgatcgaagttaacctttattcttatattgctgtgtcggagcagtggtattggcgccggactaattaacataaac

SEQ ID NO: 2299 - DNA, 691 bp, unidentified
  source 1..691: mol_type = unassigned DNA; note = unclassified RNA viruses ShiM-2016 sequence
tccctagggatgtatgaaaattatccttagggcttcaagccaaatcgaattggatgattatcgtcatcctctttgctttgtttaaagctataaaattctacgttaaaacatttgattctcatttttaaacgttttgagtttctacacactttattttactgccgtgcacagtataaaagcatgtttcagaccttagtaatgtggtctgtgtaatttacgacattgcatatcgtttcggatcaagtacgttaaatctctgttatgctaggtaccagagacaatatttgatcctttcttaaatcttaacatacgctagaatgttagatttgagttctaaatacaatagttttcagtgcggaacggaatccccctgaatgttatatcacgtccagaatagataaacccagcagtatggaagagtatcttagacctctgattataacagacagaacaattggtccaccccgagctgtattaacgcaacgtaccgcggctatgattgttacaataccgaatttatattccacgtttaggcattttaccaggatgtcaaggtagctgactgcacctaacttttttcgtggaccctatgttttcgtgaggtagaatctcatttttgacacatattttagactatttatagagatagtagataaacccttgacttagcacccaacgcttgttcctaatt

SEQ ID NO: 2300 - DNA, 692 bp, unidentified
  source 1..692: mol_type = unassigned DNA; note = unclassified Picornavirales sequence
tttgaaaggggctgggggatgtatccccatcccccagtgtgtatgccatactgcatagctcgcctatgccctatggattcacaaccctttcatataccctccctacccaaccccgtaaccacatgctttactccgcttggggttttgcggccccatgttgtgacgaaatggctacgcaatcaatgcggctaatggggcctgccgcttttaagtggccccagttagaagtttatgcacacccgcccattaggaggccaccagccaggtggtcagagggcaagcacttctgtttccccggtgaagtttgataagctgtgcccacggctgaagcagacagatccgttacccgcctcactactacgagacggctagtagtgtgtaatatccgaatttcattgatccgggtgttccccccacccagaaacgtgtgatgaggagcggcacccctcctatggcaacatagggcctctcctgcgctggcacacgggctctatgagcatgaaatcaggagaaagtcacacgaagaccttattgtgctagtgttgattcctccgcccccctgaatgcggctaatcccaactccggagcgcccgctggcaaacccgccagaagagcgtcgtaatgcgtaagtctggagcggaaccgactactttgggtgtggcgtgtttcctttatttcctttgtatttgtat

SEQ ID NO: 2301 - DNA, 692 bp, unidentified
  source 1..692: mol_type = unassigned DNA; note = unclassified RNA viruses ShiM-2016 sequence
ggtgtagggcctaaaaaccctacacctaattttatcatcatgtcgttgttatttatggacgcctgttgagagaagtattttatacgatggactcccgttgcgagaagataacccatgattttgtttcagatgtttggtttttagaccatacatttaattattttatgtgttttgtttttaatatgtgaaaagccccttagtattaaattgcaattaacaacataattcggcctttgggcttcttttatataaaataaataaaaatactcgttaccgaacggggtctttaaatagattgacaaactattttaagatgtataaaatcctactaacattgtgtagatacacgtacctattcgagagttgaagcagtgctattagatatgcagataaaagtgagggttgcgagctaataactcgtcctcatggccaaaagcatgcctctatcttttagcaatactgtgtatagtacttcagtataatgtgggcaagtgtattctgtcaaaacggtttaaacatatttgttccgtaacacaacaaatacaatttatgacgttggaaagcgttagtttccgagtttttctggaagcaagtttacttacaatcataaactgctaccattcaaaaatttttatttcatttatggtcacaatttaagattttagaaaagcgttcatatatttacatacaaa

SEQ ID NO: 2302 - DNA, 692 bp, unidentified
  source 1..692: mol_type = unassigned DNA; note = unclassified RNA viruses ShiM-2016 sequence
aggctggatcaattaattaacaataatggttgctgctatgaaaactgctaacacaactagacgtatcgtacgtcgtactattcccgtcggtaaacctcgcagttcaccgactcgacccacggtacctgtcgttaatagtgttaaaaaacgagcgaccgaaccaattattccagtcacctcacttagttttagttcgttaaattcatatttttcatatgcttcaggtgttttgttaaacaccgaatttttattatattttattgtggctatgtttgctatttttaactatcattcaatgcctgaaaattcctacgttactaaaattgttagtaatatcttttctaaggccagtgcttatgataagtgtacgtataccacgtttattatggcttttataccatttattcctgtcattttaagcgtttctagtaatatgcgtattttatcggctattttatgcttcgcattttataaatttttccctgaaaaaacttattatgaatatttagtttttgctacgtgcatttatttagctgtaaaaacgaagaataaagtatatagatttatttctattatcttattagcatttttgtattttatacaatttgctttaccattccctacggacaatacacttacgtgtagagctcctgcatcgaaaccaaattagaatgtaagataatagttaagtt

SEQ ID NO: 2303 - DNA, 693 bp, unidentified
  source 1..693: mol_type = unassigned DNA; note = unclassified Riboviria sequence
tttaacggtccgacagaccgatatgtatcgcagctcttttacaaactggaaaactgctcttttgcatactaggatgaaactgtggatcacgtttgtcaaggttacggccccatacactcctgatttccgagcctcttatgcagaatcaagtcccttttgtagaacctgacgtacaatgtcaaccccaaaacccaaactttttgtttttgttttgtcctctttataaagaagattgttgtggcttataaaccgcaggttttcttttagatgacagaatacgctgagaaaacatagacttttggtagtaggacctccgaaccctttatgtttatgcactactctgaataacgtattaatattttgttaatcatctaacacactgatctcgtgtagatccttgcgcatttggttagtaaattattgatacctattcaccccataagcgtatgccccgaatgaatttagaccagaattttaacgactattggaatatatgaattgacggataccagataatgattattgtcagcgagaccttgtagcagaacgcgactgctaatatgaatctggagtacggatgtttttatgactcaaacagttttctcaaaactgagagtaggatggatttccgacctcggcaggtaaagcttctaggcctgaccgttgcatcactgaagcagccaatgtatcaca

SEQ ID NO: 2304 - DNA, 695 bp, unidentified
  source 1..695: mol_type = unassigned DNA; note = unclassified RNA viruses ShiM-2016 sequence
ctcccggtaaatatatatacacagttaatagaactaactgtgtattatgtttgcctggaacgagggcagtatcccaagtagtgtggtaaccatttagcggtcccagcccacgctgtctcgtggtagaaaatgggtaactttttagggaagggtaaatccatccggtcatataattcacgcctttcaatgacatttgccaggtcacgctgattacagaagaccggtttaagaatagtttattgaggacatccatcattcaatgttcagtactataacctctcctctgaagacagagcgaaagttatggattgtttattgtatagtaaagttttgcgtgagtttgcatgcaaagcgtccccgtattattattcacaatcccagtggagggattgttagtcatcacttccacccatgcgattcgtgtgtggaaggtccaggagagtgcatcgtagacagctggtggcaatatacgtaagaccaccatgtcgcacgctgtagtggcgtgatcatccttagttaattgatgctttcatcttaacttccggtatgggccacttaccgttcatccattcataggtttcccgatataacatagtttgaacgccttttcaacacgatctactagcatcttcagtgggtaacaccctggagggaaaactagagaagccgttaacaattgaaaagattagtagact

SEQ ID NO: 2305 - DNA, 696 bp, unidentified
  source 1..696: mol_type = unassigned DNA; note = unclassified RNA viruses ShiM-2016 sequence
atatttaaacgaaacgtaattaatgcgacaaacattagttaaaacgttgaaattctttcctttgtcactcgtcattgaaccccttaattctttgttattacttttaaatcatcatttcacccctctaaattttcaggttgaacgcgtttaggtaagtctggacaaccgattatgtgagacgtaactgccctcatgtaatttgtgcttgtcttcggcccctatcctgcaactacctttatcttattatcaaagtctttagtcaattcctgcgtacacctccaaagggtgccttagtgcagacgagatctgtttacgttcgagaacaaccatgtacttgggattttccgcctaataacgtaacaagagatcgctaaagatagagaaataaggtataaatgagatagtaataatatatgaaattaagcttagtaaatggataccgcgagatgcctatatctataaataggagaagcttagtggaaaacggcttataatagttttctgacaccccaatagaattggtgttaaaataattctatacactttttggatatagtgttaaaacaatcctctcattccacactgaaagtggaattcaaatactttcagacactgtttttataatttcgtgtaaaacaaaaattataacactttgtgaagtagtgttaaaataattctcaaaaacccaatgacaaa

SEQ ID NO: 2306 - DNA, 698 bp, unidentified
  source 1..698: mol_type = unassigned DNA; note = unclassified RNA viruses ShiM-2016 sequence
cgccaatatttcgtcgcctgtcttgcgttaagatgatgcttcagttgttggtctgcttgagtgtcgttggtctaactgcttggctgtgtgattatttgtttcaggtttatgatggggtacgcaggtggattcgggtacgacgtcgtgtcgccaatgttgtccgtaaggtcaacaatgacgttctcgaggttatagctaccgtggaagctgacattgcggctgatatcgatgcgtctactgctagtgctgtagatgatgaggtaattgaccgcactgtagttaaaaagcggaaggttaacaataaacaccgcgcatcccatttccgttcgtggttggttcgtatggcaaaagcaaaattcggacgggtccatgagactgaggctaacagactttgtgttcggaaatatttgtatgatctttgtgttgagcacggcgtggttgtgcgtcatatagcagagaatatagatttcgcgaccgcattagtttttgtcccaatgtcttatgagattgaagctctggcagttaaacacaccactgaggtgatggatcttaaagcgattgctgagcggttgcagccgctcggtcgatgtgcttgatggggccccgagaaaagggaggggatagacactaagccttctgtttatcccggcatcactcccaaattttcggggaaggcccgtccacgcaaatatctgact

SEQ ID NO: 2307 - DNA, 699 bp, unidentified
  source 1..699: mol_type = unassigned DNA; note = unclassified Picornavirales sequence
gttttgtgggttatcccccactttatgaatgtcactgattttgtattttatgatttcatagattagaatatcttgtacagacactcatatttatttatctacttcccgcgttctgcggttgctcttaaataaattaaattgagcagttttatatattgatatgatgaattgttaggttccccatgtggaataaacaagaatttgtattctaaagatttagtatttcgaaagattgaagcgtcctaatattttaaagtgctcgctattacacaagcgttgttatggtgtaaatagtaaacggtatagttgatgtagcccggtttgcagccgccctataatttgctatatgtcagacaaacgcgatcgtattgtataacctcctttgatgatattaacgattgaacatttcgtatgaagctggacttaccaccagaacttggatttcagaatgattaacgactttcggcttttgctgggagttgctccaaggaagagttcttccgatttgaacatgcccgagaataaatcattggcgttgtgcattatttggcgattctaataacggtttactgaacgatgtaggaatttagttgttgtaatgttgaacgtattattcacttacacctatttctgggcatcctttatggaaaacggagtcaatacccgacttgtattagaacaggggaggcacttgctaat

SEQ ID NO: 2308 - DNA, 699 bp, unidentified
  source 1..699: mol_type = unassigned DNA; note = unclassified Picornavirales sequence
tgtggttaacaccacatgcttgatttgtttggccggaagccagacttgatttcaatttgcgttcattcgcacctggatgccatttgatgacaataacttgcgtgcgtttacgggcgtacgtatagacattaacatcgaaacatcttgtggctcataaccacactgaaattcaattctaacctgacaagatgaaagtatctatccccccctttttgttttgtatatgtacctgatggggcgatgtagccccatttatatttcattgatcgaggaataaataccaaaatatcatcactcgacaaaaaaggagtttggtcactgcccctttagtttcaatccgttctggtaataaactattgataatactccacaaagaaaatacaagaaaaagaaaagtgttttgagaagatgctagtaatttacccttgattaagatcattagtgtgtggtgttaagcacccactagataagcagagtcattctctgtaatcgttttgaacccttcgtcatcgattttgactagtaaaactatcaattcaggtcgtaaactcgactaggtctgtaccgccattccgaagaatatggcgggtatgccccacaacagagggatgaacaaaatatctaaccacaaaccagacacaacctacgatagactcaccaaacgcgcacacaacgatttgccccatatcagcacatatc

SEQ ID NO: 2309 - DNA, 701 bp, unidentified
  source 1..701: mol_type = unassigned DNA; note = unclassified RNA viruses ShiM-2016 sequence
ttcacggacattcttttattcttcgctgcttgtgagaaaggagcagcaagtcttatggttacttctcatttgtcaatggctaaatgccatgagtgtcatttgtataagtagaaactttatatttatatgtttataagagaacgattacccaggtttgcaaaagctatcaaaccccctctcgttgggagagggtcttcagttaagcgatttctatgaatttgcgatcgtcctgaagaggaagtgaccttcaataacatttgtcagtgtaaaagtaaacatctttttagtgcgtgtgcgttcacaacgtatgggcaagtagaccttgcgttttgacagcaaccttattgtggattgcctactagattacatatgtttacctattgaaatgcctctttggaatatacgagaccattggattacaatgagtttctctgaatgagtgcggaggatggaagagtgagtattgaactacaatgtacgaaatcatggtactataggatttccgatcagtcaatatgtcactaatggacctgctgaacacagggtataaaatgttctgagtggtgtaaagctgcaaccacgaaaaaccatgtcgggtttgtactaaaacagcagtagtaggaaagcactgaccggtgcagttcccccggagggtaacaccccggagacacctcgagtaatgtcgagagtgtgccgacctt

SEQ ID NO: 2310 - DNA, 704 bp, unidentified
  source 1..704: mol_type = unassigned DNA; note = unclassified Picornavirales sequence
tggcccttcccttcccctttcatgattcccttggatttgactcggattgtttgactacccttcttcttaccacattggccctagcggccaccggactgacctactcccatggcaagctgaacgccttcgcagcggaggtcccttcttcggatacggttgaccactgcataagtcgcgggcccaagtgagcttttggactgacccattttgttttctggactgccaccgccaagaattgcggagcagctctgtgtagagagatccttcctttaggccgaccccgtgtcccagcacggtagtaggactattggagtgctttgcacatctgcgcctagtgtcagatgagccagtggtgtcacaggaaaacgggacgcgattcgctatccctaagcatccctcttcggaggtaaagcgcctgtggcatacggtgggatcgtgccttcactcgagggccgggaaacccaccctggactggtgcagcttgacagagtgtcggccggcactctggcactagtagccggttgttctgggatatgctgttctcttacctctcctccttcaaatcctcctctcataccttcccccaggctttttcaaaagccccctcccacagagtcctctcttggattctctctcaaggagcccctcaccaccgtggctcctacctgcatgcaaccctgccctataacatttatgagcaggac

SEQ ID NO: 2311 - DNA, 705 bp, unidentified
  source 1..705: mol_type = unassigned DNA; note = unclassified Mitovirus sequence
gtaacaacggaaaacgaactcaaaatcttgagttcagctcttgtgagcactaatttggtatttatactaggttacgcttatgggagttcccacaagtaaagtagcgtcgacgattacactgttgacgggacccgtctctggcgttgagagggcccgggggcaacctcgggggaaaccgaagtcactttctcttgaatgagaatgatagaggcatttcaacatccagaacgtaagtccgatggcaagcgccatcagtcctacgaaatgctgcggccccctgctttgcaggggaaaccgaagtttaattttaaacttaccgtataaaacggtagtttgtacgtttgtcaagttgaaattaagtaggatcaatatatatctcctagaacttgatatttatgttcccgcaagtatggcgcttagtttcctttgtaggaaagtaattcctattcccagaccatttggtcttcgaggttataggttatccgtagggactaagttaaagtcataccaggggtatcaagatggagttttaataaaaggctgagacgccgcttcccgtgagggatgacgcatcaggaatgcccgtgagtagaccccggaccggtgtaatacggtaccgtagtggctgaaagagccatatctacgaatctcctctcgaaagaggggagaaacggaaactatctgagtgctccttatatatataac

SEQ ID NO: 2312 - DNA, 705 bp, unidentified
  source 1..705: mol_type = unassigned DNA; note = unclassified Carlavirus sequence
ttagtgtagcttaggtattgctattgtattgaatatttatggatgtgattgtagatttgttgtataaatacaagtttgagcgtttaagtaataagttagtgtgccctatagtcgttcactgtgtgcctggggctggcaagagtagcttaattcgcgagttgttagaattagatagtcgcttctgtgcatacacagctggtgtagaggaccagccaaggttgagcgggaattggatcaggaagtagagcgggcaacaaccggaaggcaaatttgtggttctggacgagtacactctgttgactgaagtgcccccggtatttgcattgttcggtgaccccatacaatcgaacacaagcgccgttcagcgtgctgactttgtgtgctcagtgagtagaagattcggcagtgccacgtgcgggctgttgcgagagttgggctggaacgttcgaagtgaaaaggctgacctggtgcaagtatctgacatatacacaaaagaacccctgggcaaagttgtgttcttcgaggaggaagtgggttgcttgctgagatcacacggggtggaagcattgagcttgcaggaaataacaggccaaactttcgaggtggtaacgttcgtgacttcagagaattctccagtgatcaatcgagcggctgcctatcagtgcatgacaaggcatcgaacggctctgcacatcttgtgtcctg

SEQ ID NO: 2313 - DNA, 705 bp, unidentified
  source 1..705: mol_type = unassigned DNA; note = unclassified RNA viruses ShiM-2016 sequence
aggggcgagcagatccattctgtggatctgcaccccaatatactctcttcaggtcatctgactcatgtcacaaagtcagagctgacctgggagggtgatcagctggtcgacagcgaggggcgcaaatcacaacagctaacaatacacacaagaacaacaacagacacaagcggtgaggtgacaattaaacaggaagatgcaggatttgaagacgtgagtgtgctccaagcggtagcgaccacgctggacaacaatggtgacgatgggagcgatgacatcatcagcattgaagaagccagtcccagcagtgacactgaggacaggccagtagaaccacaggctgaggaagaggaagatcaggatgtggtcgttggagttgaagaagaggaagagcctgtggcagaagactgggcagcagaggtagaggcagctgaagaagaagaactaatagagctggcagtcgaggcagaaagtggccttgccagtaagacagtattcaacacagagggcatcaagaaagttgacaaactcactgtgttgaacactgtctccacattctaccacctcaacagagacggccacacatacccagcagcacaagtgacatttagctttaaggatttcagcagatttcctgacaagaactacactgaggtgaaggctaagggcttgcctacattgacagtggctgtgcttccagcagaa

SEQ ID NO: 2314 - DNA, 706 bp, unidentified
  source 1..706: mol_type = unassigned DNA; note = unclassified Iflavirus sequence
ggaccgtactttgtcgacgttttgaacgatgacgaatcggtatacgcttcggtacctattgttgcaagttcgttccctattttcgatttgcctgcccgaatttgactcaaacaattgtgacatactatgtctctgtttgaaagcactacacgagtttgcgcccagcatgtatgttttcaagtcttttgtataagtctgcctctatagtggttttctttgaccttaaagccttgtcaaccatcctatatgctgcatcgagacttgatgtcaatctgcctctactacgcaaatgtctagtaattagttataaggttttactattttccctcatttccaattttagtttgtagtgtatgtgagtatcattcttactccgactgttaagagaaaccaatttatagtcgttaaatatgataaatggaatgaatgatggtgtcattttaaaaacactcttctctataggcgtaagcattctcgctcttagagtcgtaaagaagaaatgccgtgtctatcagtatgttatgcgatttattttctgccacgcgcttctagtgcaatctagttgacatacagacattgcctaccactcgcgagggtcgaccggtagtgtaaggagtaagtgatgatttccgcttattctgtaccctttgcctggtgaggacagatcctgactaattttaaatataaatgaacactagcttccaag

SEQ ID NO: 2315 - DNA, 706 bp, unidentified
  source 1..706: mol_type = unassigned DNA; note = unclassified RNA viruses ShiM-2016 sequence
atgcatgtatatttttattcatatgtagcattatagaatgtaacacatatgcttatgaatcgagtaaaatcggtcacggcgtcactgtggtaaaattttaataatgttgcaaaaattttttagattacatgcgaccaaattaatatatggttttttacaataggttgacctcctattgtatgacgaatttttacaaaattcatttggtttaataatagataaattaaattaggaacgcgatttttaaaatggtatgtttaatcgaaagactaacacgtgagtaccgaaaggaaagactcatctgaacctaatcgattaaacgcttaatgaaatatatttaactcagttgttgttaccacaatgcaacaattgttataatcaacaaatacatcactaccgtggtttttaggtagtaaagcagtttcgattgcagactgtattgttttctttaggttaagagagtttatacactctcaaaacttggatggtttctttttgaagaaacgaatccaatccttaaaagatgtcatagccgtagtaagctaacgcacgatatttatatcctgttagattataccatcggctttatatgataagtacctgaagttagttaccgtgtaactaacgtccagactagtatcatataaaggcctgtataagcatgctgaagcgcttataagtgaatattttaagatcaatgtgaaat

SEQ ID NO: 2316 - DNA, 707 bp, Xincheng anphevirus
  source 1..707: mol_type = genomic DNA
acctattttactcatcattttacagcggtgtttataggtcgcttaatcaaaacttattcaatcaactttttgattaatttctttctttcattttctttaataaaacccgccggtcatggaacaaaataacttgagcgcattggagacattttataaatatattgaagaagtctttgtgctatctgggattcaaggatttgtgacagctgttttaggctatattcaagataattggcaaaggggaggtctgattgcaggttctgattctgattcctgcaatccattttggatctcccccgtaattagaaatcaagacgagtcaagagtgactgaaattgttagtgaatattcgagtcccggaagaaatctggtcgccatgctggttaaaaggaccgtgacaaaggaaattgatagtgttagttttatattaggatttttggctgctgtagtcttggtaatcgcctacattctgataaggatggcaatccaaaagatatgtgacaaaattaagggtaaggctagggatttcattaatagttgtataaggagtcatagggcaaatgttttagcccaatatgcagttgaaaaaggagatcaacaggatctttagaaaaaccctccggtcaaacaacaagtgatttgatagcagttagcagagatttagcaaacgacagatcaaaagttacttcaacagaagaagagttaat

SEQ ID NO: 2317 - DNA, 707 bp, unidentified
  source 1..707: mol_type = unassigned DNA; note = unclassified RNA viruses ShiM-2016 sequence
acaaaatgccccctcacttccggccgatatttggcgaatagtctcatgactactgcataggtcttcgtacctggaggattcgtgtagacagccctattattttcctacgggactatagtcgggtgttcgccggtatgggttatgagtttcaataaaccctatttaactgtctcttaaagactttatcttttcattctgaaatcccttaaggatttattgcaacacctgcatcatttgttttggacggacgccgaaagaaacaaaatgttgctgtcgcatggcaaaggactctgatagtcgtttgaagggcttctccggtatgaagccttcgaagtagccaacagcattgtggaagtttggggtcgcgcccaggtggaagcagttgcaagtcctacgatgacgtcctctctcacttgtaaatattgaggcatgtcttcttacgacttgttcgtctaccataagctactgcgtaatcggtttgtgatgggggtcacttactgtagcaggataaacgtgtgatatataatttaccgtatgttttgatctttccttggcggaagcggttaacccgtcattgtatgtaaccacgacttaacaaaatttcacttaagaaagaaagtcgtaccggaaaacgcacccccttgtttttgtgtagccctgccgaacgccgccatttgtggtatcgtcagtggcaaaataagaagaaa

SEQ ID NO: 2318 - DNA, 708 bp, unidentified
  source 1..708: mol_type = unassigned DNA; note = Bat Paramyxovirus Eid_hel/GH-M74a/GHA/2009, complete genome.3 sequence
caaagatcagtatggtcacctgagcccatcctccacacattcccacgactcctgagtctcgaccccgaagggcagaaatcacaactgacacgaaccccaaaagacaaaaaaagcaacctagctcacatctcaacccgctcactaaacaatctcaattgactgaacgctacatctccaatagattgcgataagccttgctaaccagtttatcaaacagctttgggaattttactctaaatctgaacttttggtcaactaaccgaatattaatctctcaaactatcatattaagggttaatcttgactaaacaaaacttaggaaatcagggcttatccgaaaaagacaaccaacagacgccgaaaatcaacacacacaaggaccaaccacagagaaaagaagaagcaacaaacacaggagagacccccaagccaccaccagaaacaccacatccaaggcacccccaccccccaacaccccacgccacagcccgtccacagaaagctccgacggcccggagacccccaggaacccggaaaccacacaaagaaacaggaccatcggcactcccagagagaccgaaaagaagatcggcgaccaagttcgaaggaaaagcgagacatccaaagaacccgagaaacaaaacaattcgactcacagcaagctcagtcagcaagcaatatcccaggaaacaaccctggtacagcaca

SEQ ID NO: 2319 - DNA, 708 bp, unidentified
  source 1..708: mol_type = unassigned DNA; note = unclassified RNA viruses ShiM-2016 sequence
gaaacacctagggtgcttccctaggtgttgtttttgctttctttatagctttgacgttatggatatcctacttgtacgtatccatatcctcttagtatctttctttcggcaaagacactcttttacccgttgctttttccttctttgtaagaaattagtttgcggagttattactaccagaatctgattttggctctgtagctctgtaaccttttatgcttacccttacgaacttggactagtcttctgattatgagcttgcctatcgattaattaagacgatcttatattctctttagaaactgacttgtcttcggtcagtggaactatcaacctctaaaagaaccattcatggaccctttctatgttttgctccccttaggtatctccgaggagtgctgggaaatcttcataggaaatgctaacagaatgtctagtaactgaacaaatactactctaactttattgttcaacaaactctatataaggaagtggttattatatagttttatgtcggtggctccaccggaaaaccatgtacgcgcttagacttagaaatctacttgattcgtcatttagatagtatagacttaagaaatgcgggctgatatgcgctgaagtcatatcgctcaaagtgttcaccgagcatagtagtgaacacgggtgctgctttccctgtaagcaggttttcaaaacccctctatttat

SEQ ID NO: 2320 - DNA, 708 bp, unidentified
  source 1..708: mol_type = unassigned DNA; note = unclassified RNA viruses ShiM-2016 sequence
atgaccgtaaactgcacatcctaactcatggcgattcaacaacttgtacaggcgacttttgtcgttggtattgctcaatcgtgcatcatcaaaccgtttctggcttggaggcgtcgcagaagggctctgattctggatgccaaggatgatttgaacgtgttgaattcaccatccacccttaagactcccttgaatgccttcactgaggtgcattcgcattccatccgtcgtggtgttgcacctgaggtgtcggagatgacgacaatcaggagacggcagcacaaaaccttttgtgcgaagtgggcccgggccgccaaggttcggttcctctttgtacagatgtgtcaggacactccccttaacaggggggctgttcacaggtggttgttgggacagtggcgcgagacgtatcggacgcagattggtagtgatctgcacaagatggatgtgttccttcgggacactatagagatggcgttcttgcccactgatgaatgcgtggcccaggacaagaagtccagtagggaggtgaagaagcaggcacgcatggagttttataatgagaggaagtttgtggagggatggaaatagggatgcctggtgcaagttcctggttatgatagcagacccgttatagataacataccaggggtaagggtgcgagcactggatgatgataagggtcagaagaaggagcggttcgttgtc

SEQ ID NO: 2321 - DNA, 708 bp, unidentified
  source 1..708: mol_type = unassigned DNA; note = unclassified RNA viruses ShiM-2016 sequence
ccgcgcccggcatgtttatggctttgacgaagatgagttcgagtccaatggccgaaccattatagtccacgacagtaagatctcaggcgatcgcgctctgcgccgccaggagaatgagcgtatggctgacatcgccgcacaacggaaagctctgctgcgcactcgtgatcagattgcgagtgagcgccgtgagcttgaacgtcaaactcgctcatatagggaaaatctccaacggaaacgggaggcgcttaaagaggctcaaattgaagcccaacggcgcctcaaagaactgaaggaggccaagactgctttcctcaaagagcatgaggccaaagcagccgagctggaccgagctattaatgccatgtccagctcactccctagtgaaagcaaagaccatacgcatgaggattttcggcggaggctgtcaccgggccagcccgagccagaaagtccggtgaagggaaagaaagttacatttcaatcccagggccagcacgatacgaagaactcgaaacctatcgaaactactcaggaatccactggctcgaaagcaccccccagctcatcggaaccgaaacgccctccgttgaagcaccactcacctgggtcggaaactggaaaactaccgcgccgccggaaaaggcgccgcgcggcttcgaaccggaagaagcaataaaagtccttccgggactttccggttatgtc

SEQ ID NO: 2322 - DNA, 711 bp, unidentified
  source 1..711: mol_type = unassigned DNA; note = unclassified Endornaviridae sequence
accccaccaataggcgctgaaggccaactaaagcatcaaacattaatcgcatactatctgagaaggctcaaatctaaggctaaaggagaaccaaggctcgaagaaataatttctaaatatgaatttgagcaaaaacaaaatttgacacatacaataacaacaagtggaaaatataacttaagtggaattatacctattaaaaacaattatggaatattactagataaaggcacaattataacttacatacgggaacaagaatgttgggtattaacgcataaaccagtaacaacccactttattggcgataacgatggaaatatagccaaccaatcgagacaaggtagttatgaattaagaaataaggataaatcaaaataccaacatattccagctgaacctgtcattaagaacaccttgacaaaagataaattaagacaactattagaaaaaaaatatacctataaaacaaaaatagccccacacaaattagattacactactttaacagatggacatataaatgaagaatggaaaaaatttttattggatgcttatgatgactgttcgtttatacctgacaatgggaaaatagccgtgtatgggatcataccaggccagttagatagggacccaggtgatgaagattactcaatatggatatgtggtgccaaaccagatggaagacacaaccgaatcaatgacatagtt

SEQ ID NO: 2323 - DNA, 711 bp, unidentified
  source 1..711: mol_type = unassigned DNA; note = unclassified Umbravirus sequence
atgtgcggtggcaattttccctgtcgtgcgctacgacattaaagacgcgtatggagagaccagttgtgccaaggcaaaatgtctgtaaactttggtaacttggacgtgaatcccctaattaacgatacaaagctggggcgtccacacaccatggggcggagccgttcattcggaaagatggtagagggccaattccctcgcatgcagcgcccatgttcaaacggcgtggtggcggttggccaacaccccttcatcgggatgttggtgcccccaacatatggctaagggggggccaacgtgctaatcccagcggtaaattctcgggattgactagggagagaccaagactgatggaaagacatcaaacgaggtgattgaacctgaccgggagagagttcccatgactggccaagcgcgcgtgggcgggacaaccacgcgtacaatattgtcccacgcttatgaggcgtctaataagtgtgtaaggtaagacgagtttcgaggtcgttggcgacccgagatttatgcttaagacgtgtttcgaggtcgttagcggccttgagtacccgctctggttggaattgcctggagggtaaatacgcattcctggctctggaaagacagaatcttgactgctggaaagacagcggcgttgtctggcgcttaaggggcagccccccacagggtgtggtggacgacaccagatgatttagt

SEQ ID NO: 2324 - DNA, 711 bp, unidentified
  source 1..711: mol_type = unassigned DNA; note = unclassified Marnavirus sequence
aagtgtgtacaatcggtttgttaaccaattatacatacattattactaggggtggtaaaacaccctagcatggttatagccgaccatgtgccctctccttccaattagtgtaggatgaagcggacctactgttaaatcaacaacggactggtggctctttggactgtataagtaagcgacagcatgcaacgtgcagtggacaaagatccatgtaacacgttgtcataccggtgagcttagaaagaggatattggcaatcccgcgggacgcgcggaaataaattcgttccaccccaacccacgttttgcatattgttagtgttgtgagtaaaccagaaaactctcttatatgggagcatcgcttatagagcgactccggaaacttaaaacaaacagattgcggccaaaacttaaataacttgtatattcaagccaataagatctggaatagtgggcaaagccattaactttggaaatgatctctaggagtaacagcatggtacctatccgaatcgtacaggtagtgccgacgttaaaccatgtttggtcggagtaatgaaccgatctcctttagtgattgtccttagtgaaaactttgtgctaggctgtaactcagctagccggaacccccccggtgaacgaaataggggtgggaaagggacgcaggaaccctgaaaagaaactgcacacgaatcagatacaaacgaataca

SEQ ID NO: 2325 - DNA, 712 bp, unidentified
  source 1..712: mol_type = unassigned DNA; note = unclassified Picornavirales sequence
tattggagcagccgcaactttgggagcatcattgggagcagcgtctatacaatccaacacagctaaagagaccaataccactaatttaaatttccagcgagatgtcattagtcagggtgagaagtcttttacggatgctggactaccaaaattcatgtattatggaggacaatcagcaactcagccaaacaccctcttgcaccttggtggatctaatttctatgaacaatcgggtgttaacgcgaatttgccacatttcactacgggaggttattctcaatggaaccatactggaacaactcagcaacttggtaaaaactcagctagaactaactcagtacttgacggtgcgcctcacctctacaacagctttgtcagggaaggagagactgggcccccacgccttggatatggtgattggacagttgtcccacacccgacagcgtactctgatcagtcgattcagacggatagagcgatcacgtctaacttctctggcggccccgctaagccgacaagaaatacaggcacaaattttacgtcaactccaatgtctcaacgttcaagctataatagccctggaaggtcttcagaaccgccaatgtctgaagcagatatcgttaaaggattgtatgctatgagaataaggtaacgtacctcggctttcgccttcacgttcgcaaatgcattagccatagaaaattatatagtc

SEQ ID NO: 2326 - DNA, 714 bp, unidentified
  source 1..714: mol_type = unassigned DNA; note = unclassified RNA viruses ShiM-2016 sequence
gcggctagttgccgcacgctttgtagtagtatttgtacgttataattatcaggttagaagagtactaatactactctctaatctcacatttaactatagatgattacactcaaaaattatatttcatacgtccaagcacgatacgcttacacatacgctttaggttaagaccgtaccatcttaacctttatttcttttggtacttggttactatgtacccgtaattcactagacaatggtctagcacataacaaatcgtcaacttagagagcgttacgtttgctcatgctgatcacataagcatccactctcaagtttttatttaccacgtcatcaataagattgacatcgattcttttctaaacgactgttttgtattgcgaaaagtcatcccaccaacttataaaccctgaatttatagatcacacccgcagtagggttgaacgtgatctttttcattttatttgttggaacaatcgggacttttcggttgcattaatccgacgaactggaacaagttaacaatatatcgtttttgcaagtataatttcaggtagtctacaccgggctactagggttgttcgcagcacccgtcctttaaatacctctgactaacgattgagatagactagaactatgtccataatttggtaactgacttgttgaataataaaatcttttgatcaaacccccagacttgttttcaaaataatc

SEQ ID NO: 2327 - DNA, 715 bp, unidentified
  source 1..715: mol_type = unassigned DNA; note = unclassified environmental samples sequence
ccgggccccggcttatcttcccacaacgctctcgcatagtgatactataggttagctatgcgggagtgacaggcttgcaaacgtggggttacgcaagttgggcctaggtaccccttggggtgcctaggtctgggcgggagccaagccacggcagtaatgtcgtggcgcgattttctaggagattcctagagtctcctagaactgacttacatctttttataaacttcttgatggcaataccccattaatctcccaatattataaactctatagagtttctttgagagtttgcgtatgtataacgcaaggtttctctctaatgcgttgggtttggtcggtattgcgtcaataagtttataataactggtctgtcagcccgttctgattttgtcctgtgttcttcctactctttgctttgtgtgttttatttaaagccgactgtatgaatgtaagcttatttctaagcttgcaggccaaaatcgtcagcaaggggttgatagccttgcgatagggcgtgctaagtgtgggaaaccactaaatgccgagagactgcaacggccgtaattcatatggtgcacagtcctcacctactggcgggtagctccggcttataacaccagttctgtgctatctttggatatttggaagtattttggaagtgattcgatttgtgaaagtaaaagtttggaagttctttggaagttttcgaaagcgt

SEQ ID NO: 2328 - DNA, 716 bp, unidentified
  source 1..716: mol_type = unassigned DNA; note = unclassified Mitovirus sequence
ggggtagactctcgtaaagagagcctatcacgtccaaagactaggacgtagatgatcagattcatcgtaatgtgacatcgccgtaacgcaaggctacggaaaggaatgccgagagaataacttactctctgcaacccttagtgtaaggagtgtgtcgttgggtgttttctgaatacctaagagtagaactcttatgttaagatctcagccagggttagtaacctggtgagcaatcgaagcataagtgttcccacttatagtactcctgttctcctccataattgccgtcaaaagcaagaaagagtgcaaaacagaaccgtactagacgtccccgcactgcctacgcgatctgtagaaggtaccattggaggtccttccggggcggaatttcaccgctagtgaacgaaacgatttcgatcgttctctgaaactgtgtgcgatttccattaaaatcagtaaacaacgtataattattaacgatacttgctgatggacggataatccactgtaaaccttaaaggtaccttatggtatatcaggttaaaaactgatgaaggggtaaagcaattcaccccaatccataaggaggtctacctgactctcctagagtagctgcggccccttgaagtgatgtagaaatatataacttcttaaccttcgtgagggaaaccgactttgacacgaccaaacttgaggcaacctacaattttaaattt

SEQ ID NO: 2329 - DNA, 716 bp, unidentified
  source 1..716: mol_type = unassigned DNA; note = unclassified Riboviria sequence
tagaatatacaaaatatcttcccttagctgtagtaacaagatatgctgagcctataagggtaacaacatttgctgctagagaagtgcacaaacaagtggagaggagtgtagggctcaggttaagagccttcaacagattagctgtgaaagcatccccaacctgggctataaccccagttgagggtccagcttttgattgtaccggcatattgccgaaaatacaaaagcacaaaaacgataacgatacacgtaatacgtatattcgtttttgtgcttttctcaaaagtacagcttgtttacgcgattttctcaaaatcgcattgttttcgcgcttttctcaaaagtgcatctgtttattcgattttctcaaaatcgaatttgtttatacttttctcaaaagtaattttattttatagatttcttcaaaatctatatttgttttatcacttttatcaaaagtgaatccgtttattagattttctcaaaatctaacattctatcatatttataaaatatttaaattttcctggcttcttcaaaaccaggaacttttgttggatattttgtccaacacattattattaaattattttaacacaagtattaggttttacctgatatatgtaaatattttagcgctttttataaaagcacacagtttacatacttggactattcgcataaggatttgccaagtattaagtattttcggcaat

SEQ ID NO: 2330 - DNA, 716 bp, unidentified
  source 1..716: mol_type = unassigned DNA; note = unclassified RNA viruses ShiM-2016 sequence
gggaaaacccctccgtgcaaagtaacgctcctcaaggttcgtctgcgactaagcccaatgaactgtataaacccttgaagttactttgtgcaacatagtgtatttctcacgtgctttatttaacttcaactcttctgtattatcagacgcaagcgtagattgataatacttatcgagttgtcgaacacctctgatttatgaacgatctcagttgtaatagagagaacatttattgtattagaggccatatttattgtgatgctagtaataatcacttcattttgaatgtgtaaagactgctgctgcttctaatttatttgctctataggggtcatcccatcctatagcataaattatttgtggaaattgagttagtaataacacagccgctctgctagtatcactctatctatggtcctattacaatacttgctatcttagttcaacctctacattccggcagagtgtagttgtaactcaatccagcggctcgaccccgttggatgccactttataggcgacgcctagtaaaacctgtgaagaccttgggtcgatcagagctcccaatgtggatacattttaacagaccaagcaattcaagcaaagggctcacttatgtgaaaatacctccttgttttgtggctccaagtggatcatgagcccccactagaatgtagatcataagtagtgtactgatcactgaccctgtctgagga

SEQ ID NO: 2331 - DNA, 717 bp, Goosefish actinovirus
  source 1..717: mol_type = genomic DNA
cccagaaaactaattgcaaactcaaaacctcaatctacatgaagccgacagtgacactcttaaactggttgtcaaaagctaaacttggggcaaacgcagcaagcaacgaagaattctttgttgtcctctgcttttggcacggttacaaggcgattgggaacgaaagtgttgttagctggtggagaggtgcagttaacgaagggaggccacaagaggagaaagtgagcgaagcagagtttgacgaagcgattgaggctgagagtccattaaggaacatacagataaccagaggcggaccaagtggtgaaatcctgtaccttgcgacatctgaagagacagttttgtttaatcagcaactgtctgatcaggggtttgattgtgcaagttgatggaacagattttgacttgggctgagaacaagggtgtaggataccatacattaggagaaaaagagaacaaagtgttcttgtgttgctggacagcatataataatcgcggctccaggtcaacttgtgaacattggataagagaaggttgcggaaaccaaacagagactgaattccaaaggattagaactaagttctcttggtgtcacagtctcgctacttggtggccacatcatctctctgggacaaaagtcatcatttgggagaaagccgttcccggcacggtattcgtaagcccacttaagaagcacgagacaacaagtcgatagtc

SEQ ID NO: 2332 - DNA, 717 bp, unidentified
  source 1..717: mol_type = unassigned DNA; note = unclassified RNA viruses ShiM-2016 sequence
cgtggattaacacccacgcaatgatgcattcctcaggaattcctcggaagctattgatgattgaactggctttctacggattccccagaaattcctcggatatagtgaatgattgaactgagcatccatcgtttgcaacgcattttatttctaacgccggagacggctttaaacatctacccctttatgtattgtctataccgcgtgcgcaagctgcacgtgagtgagttgtccggccccagggctatgtgattcgtctaagttaataatacctctcgacgacgaattcacaaccttggtaggtcggttgcggcttatgccgctctcttataaacaaataaaagaaataaaaattagaaaataccgctaaaacaaaacaaaaaactttaattcgaacgtacattttgtacaacgcttatatatttctattttctgcggtatacgtaatgaaagtcatggttgatgactgtatagatcgatgtcatattggattatggaaatccactcactgacaaaggatcaaagcctctcagatttgacgctttgacatgtacacgaatcctagtttactagtatggaagctatgatctttcgttcatcctatatgtgaaaaccagatagggtaccctcgatgtactgaaactcagatagagggatgggacctcgataaaagaccctattaaatgaaagttacttacgatataacgatataaaacg

SEQ ID NO: 2333 - DNA, 717 bp, unidentified
  source 1..717: mol_type = unassigned DNA; note = unclassified RNA viruses ShiM-2016 sequence
gcctgacacgcagacctagccctctttgcctgccgtacacagtattgtacgaccattcagcagggaactcttagagtgcgagaaatcgcggagaacaacgtttatcctgaaaccctaaacctgcgacaaccatcatgggttacgtttttttttgagtctgagagtaataacatgtacccgaactctgagtcagtctaaaaacacgcggtggagtggcatgtcaaccgttgtgtctgtggggtgccacccgtgtaataggacaagataacgaggggagagagtgggacttaccggtaggacgttgagtataaaccttcagttaaagtaaataacggcataaatatggaatcgaactttaatcaaactgataatagggatgtactagtcaacgaaaattcagttgatatagtggacgagacgtcaaggttagttacagatgtgttgtgcgtgaacacattgtacgctaaagtggaacgccactggatttggaccattggaattaacgtggttctgttgtgtgtagtagtcatattgggaatatggattggactattatacattcagcaacaggaacacgtttctgaaatcaaaaaaatgaattacggaattggaatgatgaaaaaatcagcaaatgaatcggaacgtttgctgttggaagtgtgcaaggctgagttcggccagacagcttccatttgtgaactcaactggctctagtta

SEQ ID NO: 2334 - DNA, 718 bp, unidentified
  source 1..718: mol_type = unassigned DNA; note = unclassified Iflavirus sequence
ccagcgtgcgcatctacctcagggaagaggtccgatttcatatctcagtttcttgggatatgttgtaattcggatagtagatcctacctttggaatatgggtaaaagttatatttccaaaaattcaataaatatatttataagttagttcacagggctataacctaccccttattagtaacaaaataaataaaatactcggtactgaccggggtatattattgtatttatagagatcaaatttagtagttcgtgggaaaactatggtcgttttatgaattatcgttctttggaggtatccatttactggcttggtcagtcaggctcgattattcattttatattttgctctctactcttacaatgtatatgtataaatatagttttaaggcaaggcatagataataaagatatgttagtaagtaaacaagagtacgcgacgttatgttgtatgaaaatagtcattgacttaccagtagccctggcgtaaccagtaacatagctattggctcttgtcggaagcaaccgctactttattatcgtatgtgacagatttatctacaatacgtgttaacctttgtgttagaacctcgatgatatgtgtatccatagacttcgggtatatgctttctaaaagcatgcacgtacttctgaaccgtcattatgagcgttagacgacgaaggaatatcgactcatttccctttttaaaatcttactt

SEQ ID NO: 2335 - DNA, 718 bp, unidentified
  source 1..718: mol_type = unassigned DNA; note = unclassified RNA viruses ShiM-2016 sequence
cctggcgttggcataggattagttagactaacttcacacctccctcctcatcccgattagttagttttgcactataccggtttttggagttccagttctgcctgttggtgtgtaaacgttttgagccaggttcaatatgtgtgaaaccgagcggggtcctgcactttgatcaccagtaattcttcctgagaagtttccgtcgctctatgggagatggcagcattgtgcaactgtacaacggacgtacagtggatctgacaggggcgtcgccacgcgtttgagagacgtgttaataaatatggcggccgggcctcttaagcgcgcctacgaggagcgtccaaccaagcgatggataggtggaggtgttccggagccccagcggtagcttccaccgaaacatagtctctctaggggtccgagcatatcaacgggtaacgggctgtcactcctttccttgtggaatctgtaccattctgatgcgaacgcggtacctagtacctcggtccagtcagacttctttttggacgtgtatgccaatggactgccattcatcggcacgcacacatgttatgctgtccctccccctcctgccgctgctcctccggcacttccacctccggtgtggtcgtgcaccaggtcagcggtgacaatagcatactttttagtccataggaagcttctcccctccccaccaattcgggacctcaccgttcccgga

SEQ ID NO: 2336 - DNA, 721 bp, unidentified
  source 1..721: mol_type = unassigned DNA; note = unclassified Picornavirales sequence
tttcacaacgaaaatggccgctgctgcacttgctggtgccgctctttcaggaggttctaatataatcgcatctttaggttcaacaggattacagtcttatacatcattaaagttacaaactggcgaacaaaaatacaatcaaaatgttatggacactgccacaaaagcttttactgatgttggtttacctaagtatatggcctatacaggaaattcaggttctcttcatttacctggccaacagtaccacgtttctggctccaacttttattcagctggccttgttggtcaatcagttccttttttatctactccgtatcaagcttttactcatacaggaagacctaatactaccgtaaatcaaccctctgaaagaagagcaggattaggtgtgtattcacaggtacgtccctggaatgagcctcaaaatgtaaatgagctaggaaatacttcttaccaaaatttgccgataaatagggctctaatggcaagtatggctcggaatgagaaccctaccggaaacatgcaaactttgccgaaaacaaattttacaagaagtagttttcctactgccactccattacaaaattttgtaggtagaaatactgaactgcatcaacaggcagcccgacttctacaatgacctgcttagtctagttgacgtctggtctattttctttccaatcacttagtgtagcgcttgtattggttaatcttaatt

SEQ ID NO: 2337 - DNA, 722 bp, unidentified
  source 1..722: mol_type = unassigned DNA; note = unclassified Orthorubulavirus sequence
tcaacaaagttattctgtaatataaactaatcttatgagtgaaaagatacccacacaaggtggtcgatagacaaacagcaagagcagcaactgcaacaaaacttcaagggaaaaataattcgagaaatataataaattgacctcagagcaaacacaacatcgatccacaatagtcaacacaatcaacaatactccatgaggcttcacccatcaacagcaaaaagcacagtccattaagcagagcccaactcgcctcatcctcaaccatccactgaaagaaaaaatacatgaaagacctttggccaccagatccaaacaatccagcacaaaaattcaaacaaccgcaacactccattcggcctcaacaaacaatccgccaatctgtccatcattcccacactgacacacaaccatcccattcctcaccagcaacttaatccgcaagtcaaggaagattctccatatatttagccagtccgtcaatccgacacatcatcgtattttttaagaaaaaagagagatgagcaattgatacattctattttccatacgtatagtaaacattaaatcatggattcaccatagaccaagaccagaaattgaaagatcagaatgatcttgaacagcgatggataagcattgagaaacaaaaaagatagattatctccaacaacgaatggcacaaagcatccaacaacaggggggaagagagcacccccaag

SEQ ID NO: 2338 - DNA, 722 bp, unidentified
  source 1..722: mol_type = unassigned DNA; note = unclassified RNA viruses ShiM-2016 sequence
ctctcttacaaaattttgaaggatctatcttcgatccatagaatacattattgatttgtattttatctatgtaaggaaaacagcactttcgttttgccggattatggaaattaattcggttatagtacgaaatggcaaaaacgacggtaaccaatcagagaatttcattattcttttgattgaccccgtggctttaaacatatgcgtgatagtatatgttaagcaaacaaaacattttgggtaaaaccaaaaggttccatctgttaagaggaataaaaatatttaccacttttatagtggcggttttcactaggtatttagtgttgctcgtgaagcaatcctagaatattaaacgaacatcttttacgaagcacattgctcgcttgtcgaagggttttataatttactgaaaaacgagagaagacgcatgctagaagtatgtagttgctccgtgcacaccaccgcgcgtccgcagtttaacgttctctcatatctttgcacgagatatgtttgacgaattagaaaaacaggttttcgaaggagaccgttttgatttacaggtacgtgaaaagtaacctatagggattaggtacggcattcagactctcatctggacgtaagtccgctaatactataggccaagatctcaatcggattggctaaatttaagactattagttttttaattttagtaccaaaacaacaagagcccaaccaacatc

SEQ ID NO: 2339 - DNA, 723 bp, Phyllomonavirus phyllospherae
  source 1..723: mol_type = genomic DNA
ccccagacatacagccagcccagcatcctccttgagatttcacatactgtctcctgtcccccatccctatcacgagtccggatggagaaatataaagatccgagaagagacacaatgtatccttccgagatcaaaagttctgctggtaaaagagtagctttctttgtaatgcctaccggacatggaaagacgcatcagcacagtcctgaaagagggatatacgatgccgccaccatagttcctccgagcggaactgccttcctccgttttgcgcgcgatcatgggaagaagacggggaaatgggacacttatgaccgagagtggactcgtcttcttgtagaatatgtggagagtacaataggtaatatagtcgttatgattcctcattacgcaaatggtattcgtgcagggtgggtagatatgggaggagctatcctgaccaggaaagcccttgaacataactttagagagaggaaagacaaccttgagtcatatgaatattatagaatggttgaaaagaggcgcggtgctcctgagtttgaatctaacaaagaacttgaaaagtgtttgctattgaccgcagaaaggtggattgttcgaggaatagacgagccttccaggattccctatctccttgactactaatcagtacgtctgtaataactattaagaaaaaattcgagaatagactctcaaattgaaaatttctaccaagattacatc

SEQ ID NO: 2340 - DNA, 724 bp, unidentified
  source 1..724: mol_type = unassigned DNA; note = unclassified Lagovirus sequence
ttgtgagcaaactgaactcacaaaaagtgtcgttctgaccttgaagtcgcaccctatgactattcttgacgcaatgatcattcaaaccaaaagaggacttccaagtggcatgcccttcacatcagttataaattccatatgtcattggttactttggtcagcagcagtttataaagcatgtgcagagataggtctccactgttcaaacctgtatgaagatgcccctttttacacgtacggtgatgatggagtttatgccatgacgcccatgatggttagtttactgcctgccattatagaaaacctccgtgattatggtttgtctccaactgctgccgataaaactgagtacattgacgtgtgcccattaaaagatgtggcattcttgaaaaggcatttcaaaatgacagacattggttgggtgtctttgctcgacagatccagcatcctcaggcaacttgagtggtgcaaaaccagcaaacggcacatgacactggaagagactcatgaccttgcaaaggaggaacgcggtgtacagcttgaggaactccaagtggtggctgctgctcatggtaaggaattctttgacttcatcaagccagagttgatgcgccaacaagcttacacgaagttcaacgtgtacgactatgacgcagcttggaaaattcttgcagatcgcaagagggtcgtctcggtagtacctgacgacaattttgtgaatgtt

SEQ ID NO: 2341 - DNA, 724 bp, unidentified
  source 1..724: mol_type = unassigned DNA; note = unclassified RNA viruses ShiM-2016 sequence
ggggggaggggtaaaaccctcctctccttttggcacgaacagagattcctccttgttaggttaagtcctggtggtggatcactctcccattaggttaagtcctgactttgactgtccctctgtgctatgtcgagattccttgtgattaagtagtaagtcctgaccttgggttaccccactgttaggttgtaagtcttggtcccaactaaccctcggcgtggctgtgtcgaactgagaacctttatttgtttagattaggacaagcgattttctttgtcgctataagttcgtcaggcattgcttattgcctgtccctttctatctgtcccagagtcctgtgactattcttgtcccaaaacattgtagctgctagtaccatcgtgtgttgattattacaggtaacagcgtagatcttcactggcaacagtaaagcacgacagcggaacgcagagcactatggtgtactaaggcacttatagtttctaactctatctttttcgacaaccggatgcgcatgacgggattccttctttaggaatgaaagggtaattattgcgtagtcgggtttaccggctattgtctactcgttgtgtgttaatgttcgcttccagaacagtccgaaagtgcactctatttctttcttcagtgtgtactgccacgtgttgtcttcttagtggcatctctttaacccgctagggatcttttatttttgcaattttaatat

SEQ ID NO: 2342 - DNA, 724 bp, unidentified
  source 1..724: mol_type = unassigned DNA; note = unclassified RNA viruses ShiM-2016 sequence
gtaaacttttagtttacatcagcctttaaggattcctcatgggattctttatttcaattggattgaatagttactttaagtactttttgatcgaagaatttattcgacggtcttaatttattttccactgttctttacattttgtcttatgcaagatttttatttatctatcaccggatgaccggagtgaatattaatttacatgatctttctcactatgataaaagtgtcgttttattcattttacgttaaaatgtttcccctttaattatattaattatttccgtatagttacctgagctataattcaggagtttgtgcaatacttgcagttaacactgtaagattgataaagattttgataaatcacatactgtccccaatctgtacacaaggatgtatttatagtcgtagtttttattctatgaagtagaacttacatgaatattattaacgaaagtgtgaacaggatttatttctattataggcgcgagaaaccatatcaattatgatagtggtaggacgtggttagaaagaatcagtttccaacacatattagtttttattacatagaacacgatgcacaataacgaaaaatacttattaaatacgtgcaccatacttgtgatgctgatagaatttcccaattagacaatgactcaacattattgatcgacgtggattacgtattctaaaaagctggtgctgttaacctaaagagaat

SEQ ID NO: 2343 - DNA, 728 bp, unidentified
  source 1..728: mol_type = unassigned DNA; note = unclassified Iflaviridae sequence
gtggggggaaaccccacgttctgcaaagtgtaataacccttaagcccgtttcatacgtacctcactaaattgttatgaccactggaggatgctttgtgttatcggtctaaccacggccgagagcaattcatttcgtagatagtgttagtaacatgctggttgacacatacctgacgtcaataagtaaaagactttgtagaatgtagttcgaacccattacctttaaaacccaaaaccaaaactttcttatcaattatgaagaggattaaacccctaatataattgttcgtgtcattgcgttcaatgacttaaaaccatgcactaaagcaagtttaattttacgagcttttaaaatttggcaaatttttgtaagtgtagctactcaaagttttcgcagactttgttttaaactgtaatctttagatataattcagcgactgatatttgcgagatatcggaacgttttatattctattgaccagtgatattaccttaattggttgtatcgagacatagtaaggactataaccttctctcaaacggtgtgtttattagtatttcagaagcacaaacgttttcatattttatatgttggtacttgagtataagtatccctattttgaaacccttaatggaactgggaaccattattgtataaaccccttaccaagttatgatcgtagtttcttggtggaccgttaaatcgatcactactcgtgggaacaatt

SEQ ID NO: 2344 - DNA, 728 bp, unidentified
  source 1..728: mol_type = unassigned DNA; note = unclassified Picornavirales sequence
ccacgtgtgtatgccaacctacatggactcgtgcatgtaggttggattcacaaccctttcataaccccccccttttaacccaacccttcgtaaccgtacgcttcactcgcctttgggtatagcggcccaatgtgctgaagaaaaggatacgctataaggggccaacgggtggtggcccttaagaccacccaacctagaagcttgtacactcgggcaatagtgaggcccacatccagtgggtcaagcccaaagcattcttgttccccggtatgatctcataagctgtacccacggctgaaagagtgattatcgttatcccactcagtacttcggagagcctagtacaccacttggaaatggaagtctgtgatccggggttgaccctgaaccccagaaactcatgatgaggctaaccttcccgaacacggcgacgtgtggttagcctgcgctggcatgaggcctctttgtaggcagactgaaatggaagggtgacgaagagccgactgagctactgttttattcctccggccccctgaatgcggctaatcctaactcctggtccagtacttgtaacccaacaggtggctggtcgtaatgcgtaagccgggagcggaaccgactactttggggcgtccgtgtttctcaatattattcatttctagcttatggtgacaatttatgattgcagagattgtgctgtatttgtgtctgagagaagaagtaacaat

SEQ ID NO: 2345 - DNA, 729 bp, unidentified
  source 1..729: mol_type = unassigned DNA; note = unclassified Hypovirus sequence
tgcctgtaaaatccttcaggtgtttccttttggaaactaggagtgagaacaccacgctttcagtggtcagtatttgtatcgtttgtgttcgaatactactggctgttatcttttgttctcgtgagctttcgctcgtggcctttggccggaaactctattgagttttgtgggatttcctcccgtgggctttgcccgtggcacttgtgccgtttactccgaaatgagtgaaaactatttcaaatgcatgttaagacctcaccgcaaagtgtataaactaacagaaggcataaaacctgatgaatggagtagaccattcacggagaaccttattaggctgcctgtataaccgttcttcccacgactttatcaatcacgtagactgcggtccataatcgtgtttaagttgagactcgtcagcggagtcaagaacagaacgttaaaataacgctgattaacatgctttcaacatcttccggtggacgtttactggttaactgtatttggtttaaatttgaggtgtgacccctaccttcaagctaatttgacacgaccataccctgcgtaactagaaacctaacaagtcgagttcgaacttgagggttgtgttatgatatggtggaatcgtcaataatgaaccttgttaaagagccaattagcacaccgtgatgctcggttttaaaattttagaatggctgacccggcctagatgggtgtgtcacgtccaagaac

SEQ ID NO: 2346 - DNA, 731 bp, unidentified
  source 1..731: mol_type = unassigned DNA; note = unclassified Caliciviridae sequence
tcccgtataagggaatggacatattgagttaacaatatgccattcccttatacgggagtgagcccacgaccgttggggtttttaccccaccgttcgtggacctcatttctgcttattacttcccccactttcatcggggacgttccttttgccgcacacccagtgcggcaggaggtaacgagtttattttgtatagttgttattagtcacaccggagggcgtgctttacgctcttaagggcttaacccactccgttgtgcctgtcacttgtcgcttgacggcggctggtctagtacgggtctagttagtaccactcagtggtcagggtgtgccgcccgttgaaggctggtattcccgcgtgagggggctaccgtggtaacacggtccttgcgtgtgtgtgagccagtatgctctctggagctgccattgtttgggaaagctcttccccgaacaactaagtgcctgatggcctcatttggctgattggtgctctcaagacatgtgccggaggcaagcttgttggaaccaccagcaagccctgaccggtagctaattagtcccttgacggcatcgaatttttcctttttccttttctttttgtgaactgaatatagtgatttgtgtttagtgcttttgtgcctttgtcacttttactttgtcaaatattagtgtttgtgcatttgttttaaactgcaacttgttgttaatttttggacaatttgaacttagac

SEQ ID NO: 2347 - DNA, 731 bp, unidentified
  source 1..731: mol_type = unassigned DNA; note = unclassified Picornavirales sequence
tttgaaagggccctggatataatagggttaaacccctattatatccaggaattgccaacccataatccattgtccatcaatgttttatgggggggaccctttctcccctccccctccaaataccttttacccctctgtaaccaagagtgtgcaaaatctatttactagcccagaattgcggcttctggggaggtttattcctcatgcctaacaagatgttacgcaaactccgggctacggccctgggcttttgccctaaagatttagaagtttacactatcgtccaacaggaggacaacaaaccagttgttctaaggacaagcacttctgtttccccggtgagactggatagactgtacccacggttgaaactggttgatccgttacccgactcactacttcgagaagattagtaggaaactgtgaaactgattccattgatccggatactttccccgtatccagaaactactgatgagggttgacttcccgactacggcgacgtagtgtcatccctgcgctggcagtaggcctctttgaggatggaagatgtggatcggtaaccgaaggtcctattgagctagtgtttatacctccggcctcctgaatgcggctaatcctaacccatgatctagtgctcacaaaccagtgagtagctagtcgtaacgcgtaagtcgtgggcggaaccgactactttggagtgaccgtgtttcctattttacttttgtttg

SEQ ID NO: 2348 - DNA, 732 bp, Synodus synodonvirus
  source 1..732: mol_type = genomic DNA
accctaagtgatatcactaactgattaagcaaaacttaggatgaagcagttggaaaacagtttctcaacatttaaattgtgcatacgtatctactttgaaaacaaccacctggggaagagatggatgattatacaccaatcaaagatattatatcagcagaggccctttctgacctgacagcaataataattatcattttacagatccacacggagctcggaatcaggccttatcctttcagtccagatattcatgatagatttcgagtattgtctatcagagctagtgatttcaccagacttagcataagaaggagggatctccttaactacgggatagactcgttacttggaaaggctgaaccgaatccgcagattgcttttgagcttgctagagttaggctgctcttagatctcctaagaaaatacacccacccttatatagagcctgacacaaagaaaacaaaccagaaatgaattaagatctctaacgatccgatatcagatgagttcggataacatacagatgattaacacctataaccttcttaatattgcatttgaacaaaaagaaattgatatcaatctgagtttaacaatactgtaagagatcatatactatgattttggataattaagaaaaacttaggattacacattatatacatcattctgtgtgacaacattcatcaaactagcttcaaaggcgttagcctctcaaaaagtgtcagt

SEQ ID NO: 2349 - DNA, 732 bp, unidentified
  source 1..732: mol_type = unassigned DNA; note = unclassified Iflavirus sequence
cgatctcgggtttaacccgtgcagtgcttttaatagattttcaatattctatcgtttatctccgactttattgattagtagcgtctcttgttcatttttcagctcgatttttatcgttcgtgattttatgttcgttgagacgttttctgaactttgttagtcggagattttgttagaatatctttttctattaatgcattagtagtttaggtttcttttgcttagttttgtttattctggttttatctccagtacaattggaatattggaaaactttgccttcgtttcaaagagccgggctactttcccgtgcatgttttatttcctgcttactgagtgtaaagcttggttaccgtagatgtattaagttatgtaatgtaatttatgcatcgttaaattctctttacgtattatcgatttatcctccggatagataatgaattaacggattgaattttcggtaattgagtgtgtaatttcaggacccaccgtgagcagcgggtgtagagcgcatatcttggtattagttgttaattttgaatactaaagttaattgatttcttgaacttagtgtagtcatgtcttaccaatgttcaagttacggcaattaattaggtatctattttaacttgacaagcccttcatgcggaagaaccgaagttgtggtagttggctagtattaacagaaaatggggtgcgtgagctacattagtggtgtaactttaattaaat

SEQ ID NO: 2350 - DNA, 732 bp, unidentified
  source 1..732: mol_type = unassigned DNA; note = Robinvale bee virus 9 isolate VN3-31 polyprotein gene, complete1 sequence
ggtatcagacccgtcatcaccttagcatacgtaataggtatctttagatcattctaaaagcattctttctactggagtacactctcctatatcaaaagtgaccagtgtatatggttggtgaaccattgtaaacaatcaccgtagctcttttaacgttataaagatggaattttaagctactaaatctctaaaactctgtactcaagccatgttaaggcgaagtaccaagataggggttttaccctcatcttgctcgtattgtgatgcgttggtgcctgatctgggctaacccaatacgtgatacatatacatatatagcactatgtgctactgcattaagaatttactctatgggtataaaaaacataaattacaaactccccatatagatccattttagtgttggatttctaatacactatgatagcattttactatgttagtaagcggataatagcagccgctggtcctacgttacatataatatatactaacctctccgtgaagcaaccttccgacgttactatagaaaactctaggataccctagtaacctctccgctccgagaaaggacgacgttaatactaatcaactgattttgtgtaataaggcgttcgctgaacactagtttaattactaatcatgtaaaagtcaagattgaaggaatcacaaccttaaatagtgatagtctagctagacgataaactcaattaagaaccagagtacaacaat

SEQ ID NO: 2351 - DNA, 733 bp, Kimberley ephemerovirus
  source 1..733: mol_type = genomic DNA
ctaattaaaccgtgtacctcaatattatatataatccattgcatgagtaatgaaaaaaatgcgagcgacctttaaactcaatatgaatttttgatataaattaatcccaatttaacaggcatcatggagttttccagatgcaaactgagtcttcaaataatcaattttaaacccattgagattgaaagaagagcactactaggcttgcttgctgttaagagtataaagaccttgcacagaggtaaccaaatgattacaaggctttctgagatcttgataccaagtgcaattgtgaatggagaatttgttgttcgaaatgataaaaagaatggttactgaatctttgtgggggaggcttatggagctatagattcagatgatttaagaggagtcagagaaaaggtgatgaaaattagcagaaccataccattgattatcacaggagaggaatatggggctattgatttggacataacgctagaagattccgaaataatattcttaaaaagaaagaatgagcttgacatctgtgacttacctcgaaaaatgagatttctgcattgagcacaggcatcaaataatacttttattcacgctccaataaatggacaagtaaataaaggaaccaaataaatccttaaacagatgaaaaccttataaacatgaaaaaaatcaaattctcaagctgagacccactgtccttacgataggtaacttaagatcaacaggcatc

SEQ ID NO: 2352 - DNA, 734 bp, unidentified
  source 1..734: mol_type = unassigned DNA; note = unclassified Bunyavirales sequence
atgatggtgataaacattgaaactgaaacaaagagctttgctgcgcagctgggcaactctgacaagaaattacagcttaaggaaattttcaaaagaaaattctgtggagacttcgcaagtcaaaaatatatttccttcgggagccagccatgtttggatttaggtggtgaaggtgattgtttctacagatgcatgtactactcattgcctcactcatttcaagcaagttatgcagaattttatagcaatttttctgatggccagtgggttgatgaagctaagatcatcaggttttgtgaaaccttccctgtgaagatttttgtgcattacggtgatgaaaagggtgtgatcaaacaatttggtgtaccataccttctggtggtgcatttgcttctctccaagggtcattacacattgatggggtacaaagaaacggggccttttatgcaaaaactactgatgtcaaataactaccatgcttctgcactgtctgaggatgtttatgactctattagcagcctcggcgtaggcttcatggaggattttgaaattctttgcaaaatttataggtcttgtccgggtttagttaccatgccaaacacaaatgtggaagttgtttcaaaatgcaaagatatgttgttgaacaatcattaccatgaaagaaacaacacagatatggtagcacacatccaagttatgatcaattcacttctttgtactaatccgggcggcag

SEQ ID NO: 2353 - DNA, 734 bp, unidentified
  source 1..734: mol_type = unassigned DNA; note = unclassified Sopolycivirus sequence
tcgctttagcggattgtgtttccttaggttaagaacagtaagctttttgctgagtagtaagtaatgcgtaactcaagaaatcccgcaaggtttgaattcttgagaccactgccctgctgagtcatggtctagtaattgtagtgcaatacttatataacagtcaggccactaagaagtaatctcttagtttgctaaagtcctgaagaaacgatggaactagcaattccggactttccatagaggaacctgctaaatgtggatgccaccccagagagctccatttagtatgtcagatataagtatgaatgcaatgaatgatagtggcgaccccctatgggacccctcataggtaagcttggtatgtcaagaacactctcatcctaaagttagaacgatctgttcagctggagtttaaacattatgcttacatgtttaagttgtgcttcagttaaatcttaagccggtttcgtactgggacacacaaaccgttaatcttccattcgtggctagattgtgagtacccaattttattttgtacttaatgctgtttattttgctgtctattgctgcccttgctgttttattatttgctaatttttgcttatataatttgctatttactgctgctataattgatactttaggaatcaatccaatcgtaaaatattgcgttataactctaacttctgttttgcttatttttgctattatttacgaattaataaagattaaac

SEQ ID NO: 2354 - DNA, 734 bp, unidentified
  source 1..734: mol_type = unassigned DNA; note = unclassified RNA viruses ShiM-2016 sequence
tagacgtatgtctatgcacactttgttaacataacccggggcttgccgcctgcggggccttgtaaaaaggatactccaataacggtttgactggatagcctccagtcagggttttcccgccggctatgtagcttgccgctcatagttaaattggactccaatttacttggtgttcaggagaagatgaagaagtttgggagttttaagtctgcctgactgtaaaaggcaaccccctccttagccagtgagccatgtcgcaactaaataagtgcctcgctcggccccagtgggaaactggataaaaagactttccccgttttgttagtgaacgaaatcacacctatatcgtttgatagtaagcaaacgcatgtttggcagcgtgccctttgccactggatacgtatgtagacgtagcgatggaggacctgctccagcaggtatcaacgcaagggatttgaagaccttgtagcgaaatcgcatttaaatagaatcgtggcggattctagcctatctactaaggcctcattttgtatgcaagtactcttgtgatatgcgacgaacacggtaggatgagttcagtaccgcccctaggatgatctccttcggtgacgggaacaaactcgtttatcctgctgctagtaagcaatttgaacgacagaacgtgtgcaaagtgggattccccgctagtcgtgcctagactttaaattggcatttctttttctctttccctcatc

SEQ ID NO: 2355 - DNA, 734 bp, unidentified
  source 1..734: mol_type = unassigned DNA; note = unclassified RNA viruses ShiM-2016 sequence
ggcacatgcattaattcgtctgcggacgggaaaggatcacagatagcatgcaccggtggcttttgaataccaccatgggaagtcggggaggcagtttggaaactgtcgagatgtgggagcatgggttacctatacctggcacattcgttcacatgtgcgatccatgcgcggttgtagcagaccgttctaccacgggcttattcttccgtgccgggcagaatgccaatgtcccggtcggagcctgccgcgagcctacagggggccgctgaggtgaaggctcttcagatttccgcatcccgggcggttggggaccagccatccccgtaaaatctgaggattgtactctcgtgctgctaccggaagcttgactgcaagggagtgggcccgaatccggaaggtgaagggacagtcaggtgaccagccaactgtgtgtgaaagggaatttccagcccggggatcacatggaaggtcggagggtacacaaaatgactacggccgagcgccctgcgatagtgggttgacttgtccggggggggacgctccatgccattttggctcgcttttcgtgcaatggatgacttcctcagcgcggggactgttgcccgcgccgccgcggttgctgcggtgttattttcaatggcatcatttgaataattaggcaaaagtgatcctcgacttgaaccgaaaagctcacatataaacattgttgtttaagtgcacgtgacatttcgctt

SEQ ID NO: 2356 - DNA, 736 bp, unidentified
  source 1..736: mol_type = unassigned DNA; note = unclassified Mitovirus sequence
ggggccgtgaggctccttatgagtaatcgaaatctcgattaccagcgataaatcgcacattacattgttttgtgtagttcgtcgttccccaacagtaacgaaggggatcactggaggacttgtcgtagctcatacggccggtgttaaggtggtctcggcagaccaaaacctcgttgcgagggggttccctaccagaaatggtgttaaagggaactgagaaagttgctctcccaagagtaaccgtattgcgatataggttatcgtctgccagtcgtctaaggcgcaagccttagaagacgcagtcttctctgctgctgcggcccctgcgaaagcggggaaaccgaagttttatagagcttattaagattattaggccctagggacagtataccaggcactggtcagtagaccaggcgttagtacctgaaccctgtgcgaagaaaccttaagttcaccctaccagcgagagcgtagtacgactcctggaaagagaatttaagaatgtattcacccgaatcggattcaaatctttttggatctgaaggcggtcactggataccatgcatggtgctaaggggaacccgctttggaaagctggttatccaagagctacctagggacgtgaggaataccaagtagtaatacttgagatcctcgccttttacgtgtgggagcaacctcgtagcagttcggctgacgagggacccatgacggaggcaccacctttttccaaaaa

SEQ ID NO: 2357 - DNA, 736 bp, unidentified
  source 1..736: mol_type = unassigned DNA; note = unclassified Picornavirales sequence
gtgtccccaaatacgcaccgcgtagcgcttaaactacggtggcccgtcgtaagttgcgcggtggacaggggggacacaggtcagtcccgggttttttaaccgtactactcaggcgggactataaaatatccagagaggaggccaccacccacacgttttatagcggtaagcgtgtggtgtacattccgctgctaataacgataataataccgcttctgcgggatatgtacagcctcgggaaactgaagttgtgtgcgaggagtttgagggccttagcgtcgacgccgatccttctgccacgggcgctactgaatttattcaggaagcgtgcgcggcagtagatgttcttggcaagtactacgcgggcagctccatccacgcaaagcagcaagatttgcagggcctgcgacagtacttttctcggccccggcttgtgggccgaggtactatcaccactggctttaggggtcgcattgcggtcctgaacgtcaacgcctccaacctttttaccactttgttcccgaacggccttgcgcggctcactggtgtctatggggtgcggtttaagatctgctttaagttgcaggttgcctctacccctttccatcagggccttctgtcacttagttggcagtatggctctttgtcaaccagtaccacggtttatcagcgtgcttcgcgcgctgagactgccaccaacattcctcatgtcaggctggatttgtcagaactcact

SEQ ID NO: 2358 - DNA, 736 bp, unidentified
  source 1..736: mol_type = unassigned DNA; note = unclassified Riboviria sequence
atctaccaacaaagccatgcttgggaatctcaaaacgtaaccaaagattgagtgatttttctttgcattatactccttctcttttgtgttgtgatggataggcacctactaagtttggcctaaatactcactattccgtccagttttgtaatttcagctccataatctcatattattccacgagggtatgtggcattgtaattgctcatacaaacaagttcctatttttctcttatatcgattttgctgatttaaaatcactatgggcctagagccaacttgctaagatgtccgatccatcagaagatttgcccttagccggtccatcaggagttctccaaggacccgggagattccctagaccattgacccgtcatcatgaatcttttgaagaagaaacaaggcgccgtcttacctccattgaattaagaatcaaaggcctggaggatagagtctccgctcaatccacaatcttgggtgagataaaaagcatgctggaaacactcaccattgcagccaatgtgccgactcactcagtaacatcctatagccaaatccgcagaggccgatcggcgcgcaaaaattagacagccaaaaatttgttcgtaagaactgtcatgatatttggatgtttgctgtattaaaacttccagtcgcatgcacgaagaatggattataccctcctccttccttattatagtgacagttttaacggacaaaaacgagcagagccatt

SEQ ID NO: 2359 - DNA, 737 bp, unidentified
  source 1..737: mol_type = unassigned DNA; note = unclassified Picornavirales sequence
cacggattttgtccgtgtacgtctcgcttgatagttgagcttcgctcagctcagagttctccatttgattggaggcattcagggattcgtccctgtacgatctgtatcattacctttactgagtaaccagagaaattagactactctctacctttatgttttagtagattttaaaacctaaacgactgtgccgcccctgtggggttagtcagtgtccttgaactgttgttcgagggagtattaggcgatcttgtatcgccatttttgtaaattattatacagacttataatgtctataaacttagaaaacaaacaaaaatacatatgtaaacatagagtcacatacggctgtgttcggcctatagaaccttactgaacttatcataataaagaaacgcgagttttataaaagaatacattcattaatacctgccttaccaggttctttgtgaatatctcaacgccagagagaagtaaagtatgacaacacaagttaatcatgaccaatgatgaggttatcgattacgccctggtgcagggtagtacagataaattgctgtgggagcaccaagtccactccgtgagatcgaccggaaacagttgctgtcttttattcatagtctaacaaaatgaattaaacaacgtatacactcctaacccgtttctatgcactaataaatatcaaatgaattcaatcaaatgatattactggtgctaactaacacaactgtcttaat

SEQ ID NO: 2360 - DNA, 738 bp, unidentified
  source 1..738: mol_type = unassigned DNA; note = unclassified Marnavirus sequence
ttattgctaggtacccctttaggggggaactaggacattatggtttttgtctgatagcttgagttttctcttgctagtttattcgtaggcatacatggaaatgctcgttagtatctgatctaaccccaccatagtatcgcggcttacgtgtattatgctggcaagtggactgctaaagcgaccaaattcttatgtttacgaatttacgaatgaaccaaattttgttgatcacgtccttttataaagtgacaacggttttcgtaataagggctttaccgtttgtaagtaaaaagctactgttgtttgacacactatgttagggtgtgccgtagaacagtttgcgctttgcgcaattgcatattgaagaaaaaataatcaaataaaaagtttatatttacatttatgttttataccggttgatgaccaaccttcacaatatatcctttaaagaagctaatctttgtgtgttatgttatgaaaaccttgttgatggcgccgttttggcttacagtcactgcaagttattctgttcacactgacatcacatggacagccagatgttttcatttggtatgcaccctcggtctttgttttcataataatatgctttaacggtgtattgtgaggtacctcctcagatagaagtgcagagggctgaacctaacagtaaatttttggtatccttgaccgggagaaataatacgtcatccaagaaccagagaattacgattttacacg

SEQ ID NO: 2361 - DNA, 741 bp, unidentified
  source 1..741: mol_type = unassigned DNA; note = unclassified environmental samples sequence
ctgaaacctttttctaaccggtcgaaaccctcaaccgcctcggaaacgttgaggttgagtacaggggcgtaaccgtctaggttacgtctccccccagctcttaggttggttagtctgttagcgcaatgccttacttccgcctttgagttacggcagccctaccgggggatacagggttgcttagcccgcgagggtcagtgcttcggcagtcttatgtgggtccctgagtcacataaggcaacgtacaaaagggacatatggagttctcttcgggggtctctatatgttcttatgtactccctatatgaaccttacaacgccaacggttttcattgcccgctttctccccctggagagagatgactatcgaagacggtgtaatggttgctataattagaataagctatacattaaggacttagtattaaacactagggggacgcctctaggagtctccgttcgggcgtgggatgtggtatagcatttcactcggagaggccaaaacagggatcgcctgtgctaacacaaatgtcaactgactgcaacggccatgcttaattgctctcctaggtgggtacagtcgggcccgtcttcaggtgggtcgcctgtccgctattagtatctgaagttacgaagttataattcaaatcgaaaatctttattgcaattcttatttacgaaagcggacgtctagtaaactatcttgggaagcctacgtctggtggtagttgaaaccaaata

SEQ ID NO: 2362 - DNA, 741 bp, unidentified
  source 1..741: mol_type = unassigned DNA; note = unclassified Partitiviridae sequence
aggtgttgtcgaagctggccaccagcttcgcagccaagtgtggagggtaccccgttatgctacatacctcctcgaagaccatttgcatgctcctggtcgagtgctgggagttgaagtcgtcgtagtccagcataacgttgtacccctggccgtgtctcaaagctacgaccttctcgcacataccgagcgtgccgtactgccctgggtcgaggaccaccctcctgttcctccacgccttggcaaccagcgacaataggctacgaatgtgtcgagtacccggggcgcggttgctgtggatggttgccctcgcctccacttcgatttggagggtagtcgtgtgggtaggaggggccgcccacgcgcgaaggtaagtgccctgggctaaggcgttccccagtagaacgctcgggcgcggtggcgcccgcggtacctacaagcccgcacacgcgtctgacggattcggcctagtattgccaactaagtcgtcctccccgtagcgcgtgtggcggttaatcgggagagccaggtggagggttatggcgcgcaaacaacacgtcccaggttttaacgttctgggtgcggccttgccacctccttaaccatttaagagactggtgcatggtggtgttcccgtgtcgagcgggcggtcagacacgagctcaggggagtcgaatccccctgagtaacgtggtttatgcgtagcatagctgatacggccgcaggcccactgttactgaatgc

SEQ ID NO: 2363 - DNA, 742 bp, unidentified
  source 1..742: mol_type = unassigned DNA; note = unclassified Orthorubulavirus sequence
aatacttcgaggccttgatctcagaatgcaatctctggaagggaaagtggataagattcttgcaacctcggcaaccataacagccttaaagaatgaagtgacaagtctaaaagcaaatgtggccacagttgagggcatgatgactactatgaaaattatggacccaagcactccaactaatgtaccagttgaaaagataagaaagaacctgaaagatactcctgttataatctcagggcccctgagtgagagccacatcactgaagggagtgatatgattgtgcttgatgaattagccaggccttctctaagttccacaaagaagattgtgaggagacctgaacccaagaaggatttaacaggtatgaaattaatgttgatccaactagctaatgactgtatggggaagcctgatcaaaaggcagaaatcgtggcaaaaattcatgcggctactcgtgaggctcagctgttagatatcaagcgcagcatcatcaagtctgcaatataagaaatcttagttgagtacatacctaagacacaacaataattccactacatatatattgaatcgaagtgagcactagggtggataggtcaagggacacatctaggcatcagaaatccgagtcaatctgcactgtccgggtttaagaaaaaaccaagtgtcaagagcatcagataggcacgaacctaacacaccccgagacacaccagccacacacatccgggccgaccagcagcc

SEQ ID NO: 2364 - DNA, 743 bp, unidentified
  source 1..743: mol_type = unassigned DNA; note = unclassified RNA viruses ShiM-2016 sequence
gtgggtggcttaggccacgcatagagtttttctagtcatcatttgatgccagtagtagcacttatagtccttaggggctatttagtgtgtttactgagaagtgttacatgtcatgtataatgttgctaaagatgatattgttttaagcacttcgaaattttattgggtatagtagtgcaacgtctactatatcctttctctctaattagagagataaaatcaatatgtccaccttgtactcatttttgagtacatgttaattagtcagtggaggaagaactaaactttgcagagaagaattagtgtttgcaaactaaggaatagctctgcaatttatgcttttaaaaagatgatcggttaattcgccgtcatttcacttcctatatggaagtgttttataagggattgctgtcgtgaaagatatcttgcgtaagaagaacgtgtctaaggggaagaaaaattcatcccctatagttagtaaggaagaaattcgtcagaggaaggctctggaaaaggagcggaaaactaggatagaaagagataaaaccagattgaatgatctggataccgttgtgcataaaaagaaaagtaagaagattgttccctatgagggagatcataataatatcttggatatcccagtgaagcaagatcatgaattcgatgattttctggacaatataccagattcagaattctttgatgagagtgatattccacctgttcataacaacaatgtggat

SEQ ID NO: 2365 - DNA, 744 bp, unidentified
  source 1..744: mol_type = unassigned DNA; note = unclassified RNA viruses ShiM-2016 sequence
ccacggtcctaatcgaccgtgtatccttttgaccccgtgtaggttgcgggtgaacgcctcattttgttaattcgaagttctcgggttttcaactgaggtgttgccagtgtggacttttgtcgcttatgtttcctatacatcgacttgtgtgtataggtacaacaacctccaactttaaccttaacctttatttgagtgtttattttaagatgtctctaactcagctctcttgctgtcatggctaatgactcgtgtgtagattgtattggatgtgcccatcgtgtaacgggccatcacttaccacctaaatattagttactcgtcgtggaggctaatagcatttgggagtgatggttatgatttcgatgggtaactggctgcccgctagtggttccggtcaggcccgattgtagatctatgcatgccttattagtaacaaaatccttgagtggtatcatagggtggagccccagggctccggtgtgaacactgcttgaggtggtcccctaggacatgcaccggggagaggctcctcgaggaaccggtggcgaaggctacaggtgttccaactgtagtcggcgtgagacctagaatttcccttggtggagggcccacattaaaaaccccgtggggcagaaaggcaccatttacaaaccatatgaaaattacaactagtgatatagacgattttgttggtacagagagacctgcgattataattgttgatacaagagttattacaag

SEQ ID NO: 2366 - DNA, 745 bp, unidentified
  source 1..745: mol_type = unassigned DNA; note = unclassified Picornavirales sequence
ccgtataggcattttgcctatacggagattattgagttgtgtggtttaccccacaccggttcattcatttatggactgcagcacatgttgtgagagtatagcatctctcattgacaatatgtgcggatttaacttgtccttaaatggacttctttgtgcgcttttgattgttttagctataaacaatacaaacctttgtaaaagaattgaaaataaaattataaaaataaatttcaatcaatgttgcaagcgaatacttgcgttctttatgtaaaagtttacactgatcagaccaaactaaaattttgacacgatctaagctgtaatctacagcatgtaaagagttcagtttactgctctttatgattattttaatgctattcctgtatagctgtttttatgacaaataggaacttccgaattatacgagaattcacatctcttggtaacgccttcgggtagggaccaaacccctgacgagactctgtagaaagcgtttctctcagtgatgggaagatattgctcttcaatgaattttgaatttgagcgtcttcttgcatctgttgaaactaacttttgcattgaaagtggccgtttttgaccgcggaataacactttatgatttgcatgactaaatctggccttttattacgccagacaaaaagttgcagtgtcgactgttgagaaattttctctgcaggtcaactgcttggaaagttcttcaactcgtcgatgttaacaacat

SEQ ID NO: 2367 - DNA, 746 bp, unidentified
  source 1..746: mol_type = unassigned DNA; note = unclassified Picobirnavirus sequence
tctaattctatttttattcttagtgttcttctaccttattcaaggcgaaacacccaaactaattagattggtcaaatttacacgtagcacacttcgtttgagtgtgaatatgtgtagaatgatcaagctacagtaacacacaaacatccaaccaatgtcacaactaaggaggtgaatctctagtgacacacaatcagctactctactggcagaacgtagagacaaacagagctaacgtggctcgagagactgaaacgcatcgagcgaacgtcgcacaagagactgagactaatcggtctaacttagcacgagaagctgagacaaatcggtctaacttagcgcgcgaagcggaaacaaatcggcataacaaagtgtccgagcgtgagactgaaaggagtaaccggcagagagagtttctcacaacactgcagcgtcagcaggactggcagctggggctcttaaacgagcagtatcggcgtgacgccttagcggaaacgaaacgatcgaacaaggctaacgaagagctgaaccgactacgaacgtatattgatgagtcgatccggagcgaaacaaaccggattcagtcgttagcgaacactcaagctaactcgatacgtcaggcaactctatctgaaacagtaagatccaatcagaaacaagaagcgttatcagcacagcgcaacgctgaaagtgaacgcgctaacttagcgtctgagtcaattcgagaagcgcagaacgctatcgct

SEQ ID NO: 2368 - DNA, 746 bp, unidentified
  source 1..746: mol_type = unassigned DNA; note = unclassified Riboviria sequence
ccctgcacacgcgtacgattatttagatctatatctataatatagttacttttaaatgtgaatgtttcattgcaaatttgagagtgacaactcttaaacattgtgatgtaatttgcatattctaagaattatttagtatatatttatttattcgatatttgtgttcggtttgaagagccgtcaacattatatatttttctggaaattcgacacttttatgacttatggtagtaagttgaagatactgtttacagtactaccacgtgaccagcgatggtcttaaaatatatctctttttctacttatcagaatttttcttgaagaaaattcagatatgatgatcataatgattactcagatgcatggcttgccctgtctgttttaccgaatattgataaattattctaccctcatcgactatgaattttacaacgttgccgcttttattaggtaacctcttggttaggttagcgatttgaggatgaagaaattgattatttgaagatgtctttggtattttgatgtattattaacgaaaatgccaccaagcccacccgggtcgaaacggactattgtccttattagacacggggaaccgcagagtcaagggtgatgacactttgaaggagcttgctcctaggtggtcaccatacgtttggaatttattccttattaaaacttgtctcgttagttgaacttataaccctaaaacactcttgtttttggtttatttgttcactcggttc

SEQ ID NO: 2369 - DNA, 746 bp, unidentified
  source 1..746: mol_type = unassigned DNA; note = unclassified RNA viruses ShiM-2016 sequence
cttagagggaaatcctgattcatcactgaatcagttccgtgcaacattagttgattccgattaactagcgctgtgctgaacgttaatcgtcgtgtgatctggagagagttaaaatttagactctttggaactaaattctctcttgctgcgacgttatctaaggtaggtgtcctatttaggacaggtacctagggaggcagccccttccaaaaccttaaagagtctagcctgacaactactgagtcatagttgtgacaaagactaagttctttgaaggcgaaaatacctgacttggcaatcacaaaagaataaaccgatcagatccatcggaaggatctaatggttctttcaaatgtgatcgggaagccatccaaacccgtcctgccggtagtaataccaaaggaaaggtggaccttaaaatttcaaaggtgcttgaatcctatgctggttgcataagaatttggcatcagattaattttaaagggtgtttttctttttcagaaaaggcacagatcgcacactttagaaaagtgttcttagggattgagacgagtaagtacccaaaggtatttaaaggtctcctagccgatcgtttttcaattgaattgaatcaggatcgtccagaggtccctatctctggtcatagactattctatccatcttatgatcggaagctattccgatatttaagtggaatttcgaatggtcagagaccaaagacccaacttagactcttctgggactta

SEQ ID NO: 2370 - DNA, 747 bp, unidentified
  source 1..747: mol_type = unassigned DNA; note = unclassified RNA viruses ShiM-2016 sequence
actgcgtaggcaaaacctacgcagtttcttttgactcctctcagaggagagggatcaagtaagtcgatgtatcgcattgataaagggtgggctgacatgtaagtcgatgctgtcattacatgtccatcgctttgtttattagttttaagattttcttcgtctccaatttatttttcgaaatatcttcaacaagaaaaattattgttttaattgactgagttcttataagactatgagtttattgtgtatttctctcttatttgaaccctcgtattttatatagatgcattatgtgtatttggattgtctttcttgacgcttttgaaagggtacaggatatttactttctccagttctcgttggaaaggctctttgaatgattgatatatgctgtttcacattgtttcttgcatagtattgtagacataggctcggcacgcattggcacttccgtacagcaactactctacaacgaatatgtatagcgacaatgtaacgttaaccttggtgatgagttggtgataccctcttggttatgtttcagtatatgtttttctttttaaagatgtgtcccgaggccattctttggtttgatggattgatgaaaagaatacagacattttgttgacatttattatatgagcatattatacacacgacgatgtgaaagaacattgacaatatgaaagcatattgactacaggaaagactgttgacaataggaaagactatacatatgactttaca

SEQ ID NO: 2371 - DNA, 748 bp, unidentified
  source 1..748: mol_type = unassigned DNA; note = unclassified Totiviridae sequence
caaaagtggcgaggcttttgcccgggcacaccgactctacgattgggagttgggtgtgtccggtctctgcactctggactgctcgcaagtctaaacttaattttgggtaggatggcgaaagcgtgtagcctgaaatccgaaactaccctcatattacatctggattacgcaattgtgcacctgagagactataacatgtacccgaacgcgtaagaatactaaaaaccatgtgggagtggcatgtcatgcgaagcatctatcgttggccctctggttggacgtgtttgaagcggggcgagagtgggttagtccggtagggtttagatttcattttttggactggagagtcagtactcacccgaaacaaacatggaaaacttaacaatcaacacacaaagtagggacgcactagtcaacgaagtaagtgttgacttagaggatgagacatcaaggttagttatagatacacttggtgtaagtgtattatacgataaggttgacaccaataggaaaatactttatggaattgggatgattttggtggcgtgcggagcaatttttgggattatggctgggctcctatacgttcaacaccaggatctgacctcttatgcctctcatatggaaacaaaatggattggattgaataacaggataagggaatcggagtccttattagctacagtatgcaagtctgagttcggacagtcatctgtagtatgttcgcggaattcttcttcttttaata

SEQ ID NO: 2372 - DNA, 748 bp, unidentified
  source 1..748: mol_type = unassigned DNA; note = unclassified Tymovirales sequence
gccctgtagtcccttataatctagtaagtaggtaatttagctatagatatatgtttcttccttgtttgaacatgagtatatcagcagttattgacatagtaaataaatcacactttgtaccctgctacccctgcacacaactgccccccgtcattaacggagtaccgggatcagggaagagcacactcctcaaggaattgcttaatctgcataacgtccgcatctacacagccggcataccctacggatgatcccttaagactgaaggcgtactcccactgagtgagttcacaagccgagctaaccatctgtgcatcctcgacgagtaccaacttgccactgataaagaatttgagccattccaggtattggtgggcgaccccttccaaggagctacacaccgtagacctcacttcattgccaccaccagcttcagagtgcccaaagcaatctgcgaacacctcagaagcagagatttccagattgagagtgacaaagaaggtgatctaatcaagggatctccattcaccacagctgttgaaggagagttactgcacttgggccaagtcagcaaggaccttgcacactcacacaacgcttgctcgaaaggtcccacggaagttcaagggcttgaatttgacacagtgaccttgctttaccactcatctgaactatccaatagaatcggattctacgttgcctgcactagagcttgcaagagattgctgttgctctctgatgagcacgt

SEQ ID NO: 2373 - DNA, 750 bp, unidentified
  source 1..750: mol_type = unassigned DNA; note = unclassified Sopolycivirus sequence
atggactccctaccaccgcaactcaatttactaattggtacagtgagaactttgcttcttctgggatatctttccttgcaagtggcggcgcaaattgagtccctggcagtagcagtgtttcgtcctctgttacgccgagtcgggtacaacctgctagactcaatcaggactatgccagcttcgcacagtcatctcccgctaacaatcaaggatttgacccatggggagtgaaggactcgccaattattgatgatgacgaacgtgttcaatctaatttggaaactgagacagaaataccgaatgaagctgaggaagggttatcagagactgttgaggcagttggtgaggttacgactggagttgaggcagctgaggcgaccgctgcggtgtccactccttggaccttgctggctatagccaatcaacaactaggccaagcagttagtacagcacatgtgtcaggattgcaacagcaatcctcggcggattacacggccaatatgcagtctcacggcttgaatgtaggtcttaatgcagatcttattcgtgaacagcagagccagaccatttcgaggcagcaggcaggaggttctattgggtctttgcttgggccccttggaacgttgatcggacaggccattgccggatataactctgtgaaccaagaggatttgaaaacagccgcttctttcaacggctatgttaatccccaaatgagtaacatcgttgcttcgcagacaacatctggtg

SEQ ID NO: 2374 - DNA, 750 bp, unidentified
  source 1..750: mol_type = unassigned DNA; note = unclassified Picornavirales sequence
gaaatatgtatggagtgtcttctttaagacacttcatatgtatgagtaacgattaatttcggttacgacgacctaatggaaggcgtccctttgagaatcatggcgggatgtcaacccccgcgaagcgatagaatgagtcgcgtgattgaaatgagggagaataaaattcttcggtaggttgttgtaatctctatggtctgggaccatattctaagtttttactgcttttttaagaaaaagtttatcgagagcataactcgtgtgaaagcaacatggtgagtctaacatcagtagaaaaatgacaacccctcccctatatgttatgtaagtatatggcagtgtgccattaaaacaaaaataaaaatctgtatattttatatttcgacaaacagtttgtaagacgttagtcttcaaaaattaagaacgcccctgtgtttattcacttgtagacgcaaaattgtttgatctccattttgtcatcagatatgacaagaaaaagacaaagtgctcaacattagtacgtcttgtaatggttttcaccgtcagaaagatattagcaattcgattttccaacctctacgctcctaaaaggactacgttaaaaggaagacgatggtatgttacagctgcagttgcagccgaggacagcctggcaatctagtaagaacaagagagaaaatgatgagtaggttgtaaactcaactagcatatggtagagggcgaagatagctttaccaatccggggctcca

SEQ ID NO: 2375 - DNA, 751 bp, unidentified
  source 1..751: mol_type = unassigned DNA; note = unclassified dsRNA viruses sequence
ctgaccagttgtttctccactccggactgcgatctagtcattaagtcctttcacaagccgccgaatcaagtattaggggagctggtgactgggttgactcagggtgcagtgtgccttgcctggtgagatggacacacaagatgtgaccgccactatagggtccatgaggagttaaatcgatttggtgaacccgtgctaaggttcaccgaccttttaattcaggggatgccgaagggtgaaacttggttactatctgtcttgagtggctgcataaccgcatcaagcgagaaactattcaatgggtagatagttttagcatttggattaaccactaaatgcttatgggccggcaaccggaactgccacattagtatcatccttcgggatgggcgcgttggataccgcgcttgaaatggaaacactgcgctcacattagaggtgagcaactacagtcaagctgggtttttagccaattctcggacactgtagtgggagaccacggtggttaagcatcttcggatgcgttcgtgtggataacctgaatggcatcagggtgtgatcaagtctgagcttcctctttgagatgctttaaccttactcaggggacttgtgagctaacgtaggcgagtatagagtagatgcaaactcgtcgaacgtgctttttggttttagaacaccaaggagtggagagactacacccatacgaattcgggaaaccgagttaacgaatagtccagcccaaagggagcct

SEQ ID NO: 2376 - DNA, 751 bp, unidentified
  source 1..751: mol_type = unassigned DNA; note = unclassified Picornavirales sequence
gattcaatctaatacagccaaacagaccaatcagaccaatcttgattttcagaaaagtttaattgataggggagaaaaatcatttacagataaaggattaccgtcttttctttattgggggggatcaagcgcacaaactccaaattctttaatacagttaggaggacaaaatttctatgaacaatccggtgttaattcgaatctcccatattttacaggaactccatacgctcagtggaaccatgttggcacacctaagatccagcaacaaaaaccttcaccctctagctctcaggcacatgcaggagtgtcagctcagtctggaaagtctccagcctttgtatcttcaactagttcaggaagcgtatcttccggagggacagttagtatcaatgttggaaagcataatttcagcggtcagacagatacgacaggacttggaaatggccgttactctgcagttcctccaccaaccttaacgtacaatagcgttggaatccagaatgctgcaaggactcatgattttgccacgcaatctaatccatctgtgagaagtgcctcccaacagacttgggcccggtttgactcttcaaagtccactcaaacaagtttaacgggctcccagtttatggtcgacaaaggtacccaagccaatcctttcaggtactatgccaaccgttgagttcctaggcaatgccgtcactcacgctaatgcacacaaaatcgagttcttatacgataacgcagaaat

SEQ ID NO: 2377 - DNA, 753 bp, unidentified
  source 1..753: mol_type = unassigned DNA; note = unclassified Marburgvirus sequence
cccggatactacagcacgattacccacccatccacttcgatatgattcaccctcagatcacagcaatcaaccctatttgaatatccaaaccactatttagtatcctattacttgtcactattgtgtgagacaacataagctatcaaataacaatcacgggcaagaactgggcatacgatggtgatttgagagtattgttcagtgctacaaattcttttttcaattgctataatgatacaactacaaatctccgtacacttgccgcaatactgtaattaacactgctgtatctcttcctcaagccatctgatttaactcaataaacatgacttgattcagagaatatgctgaaaatgttattgattgaacttctcaaatggtgcactatcctactgttttactcaacttggtatattgtaacatatcagcggactctccacttttcttcttgtatattctctataagtcatttacttgatagaatgtcaagtctactggttcagagtctcctcactccaatgaatgtaataattaactgttagcttagatgacaacagttatgaggttatataattactcatggtgtaaaatgtaattcttacctctatttcttctgttttccctctcctttataatatgccaattaagaaaaactaaaaatcgaagaatattaaagattttctttaatattcagaaaaggttttttattctcttctttctttttacaaatatattaaaataataattctcaca

SEQ ID NO: 2378 - DNA, 753 bp, unidentified
  source 1..753: mol_type = unassigned DNA; note = White ash mosaic virus replicase, 27 kDa protein, 11 kDa protein,1 sequence
cccatatctttctgcttattacgacccccaaacccttccttttggattgtacctcatcctgcaaaattcttgtttggttccatatggactttcactaccagatcctttcgatgttccccgcttatttacatatatatcttcaggacgattctgaatatgaacggattttcccttttgctcgactacctgatcgttgcttcaataaattatttatgtatagcacatttgtacaaaattttcttgcagacggagactgggcgaacttgttcttcggcgattttgctgttgctcacagcactagtgaccgaggttatatacatgacattgacaagtacgtccacttttcgtatgataatgaccgctttgctaatactttcccactatttcagcgcactgattatctggattatttatttcatgaaccagttccttataatgtacgaaaactcagaggatggtattgtagtgttcgaaacctatcacatcattttcaggaacatgtcgcacgccatcttagtttggaatggcttgcaattataaaattactaaactctccattacccgtatctttaccgccactgttggcgcttcagatgaacaagtttattgtttatttggagcaaagacagattaaagaaatttgggcacttctgggtatcccccgttttgagtgtgtttatttcggcccgggattttagctccttacgaggaagcttgccgtaaaacttaaatcttattttaaaacacttcaaa

SEQ ID NO: 2379 - DNA, 753 bp, unidentified
  source 1..753: mol_type = unassigned DNA; note = unclassified Picornavirales sequence
ggagtgctcaaaatagcagattggtgtgtacgaggcttgtcaacacttgctgcaattgtgtcaatagcaggctctgtgtatttaatctatcgcctctttgctaaagatcaaggtccatattcgggtgcgccgcagagaggtctgaaagccccagttccccgtgtggtgaaagctcagggaccagattatgacttcgccatatctttacagaagcggagtctcttccctgtgacatgcttgaatggtccattcactgctcttggattaaaaggaaagtggattctcctacctcgccactgcaaagtgggggaaaccctggatctagccggaacagaatacaaagtgctagacaatgcagagctagaatgtaatgagggaaagcttgaattgaggtgtgtgaagattgatcgtcctgtggatttccccaacattttgaaaagaataccaaagaaatttgaagaacgccaggattgtgttttgtgtgtgaattctgaaaagtttccagggttgacctgcccagttggcaaaatccaaaattggggtaagttgtgcttgtctggtaatgtgacatgtcgcaccttaaagtacaactacccaactagatcaggccagtgtgggggtgtggtcactaaatgtggtgaaattctgggtgtacacattggtggtgatggacagaatgggtatgctacagctttgtatcaacattattttgatgccctagatgatgctatagagcagggccatatagtggag

SEQ ID NO: 2380 - DNA, 754 bp, unidentified
  source 1..754: mol_type = unassigned DNA; note = unclassified ssRNA negative-strand viruses sequence
aaatatctattagtatacatactctatagcctagaaaaaacaatgatcaagaatccttcagtcatcatgtcagagtcagaatggtcatcggaagattcttcatctcttcacacttcctcaactcaatgtgatctaagcccacttcaaaatcaatttttagctatgtctgcaaaaatacagaataacatagatagaattaataatagacctagatttacgcctctgaattctcaggtaatcagaaagtgtttcaacgtaaaactttctagtggtgagcttgaacaggggttaaaggatgacggagaggaatggatgttttactcagcacaagacacagtatcaaagtccattccggtgtatactagaggaaagatctttcctccacttttaaaaggatctattgtcaaaattaaaacagtcgaagtccctgtctcttctgagaaggaacatccctataaaactaaattgaaccctatatcggagcaataacctctacattgatcttccagattgataacaggtgagctctaatggggaaacatgtaacctccgcattgatcagttacctgcttcacatacctgtgcgcctttaacattaaccaaattgcttttctactcctttaattaaaataatttagattttgaaaaactgtaaagcttaaaactcactaaatagaaatctcaatgagatcttaatctgtttatctcaattgatcttctcctgtttttactgccccaatccacatcccctgcc

SEQ ID NO: 2381 - DNA, 756 bp, Parechovirus B
  source 1..756: mol_type = genomic DNA
tttgaaagggggcccctgcagctcatcagctgcagggtcccccggtggactgggtacacttctcgcccccttctggggtgggggtgtggctcagttaaccaccactgggtggctaccagttttcatagaatagccaatcccgtaacatttgccacctaagcatagtttaacctcctacaattggtcgaagccgcttggaataagactgattgtatactgtgagcctgagtattctcttctgtcttccggttgctctacaaccggataagggctgtacctgggcggtcctactcttcacaggagtctgcataggtggctttcacctctggacaatgcactccacacccactcccacactcaagttagtataagttgtgcatgtgaaatgttgtgaacgcgttgggtaggtgtagcgactacaagtgtgccagcggatttcccctggtggtaacaccagcctctgggcccaaaaggcatgtctctgaccgcacttgtacacaatcccagtgatgcccaccgttagtagtgatctagtaatctgcacttctcaactagcaaaccgtgtgcttggaggtgtaggtatggcaggctgaaggatgccctgaaggtacccgcaggtaacgttaagacactgtggatctgatcaggggcccaccggctctccgggtagaagtcttcggaccttgggttaaaaaacgtctaggcctgtcccccagagggatctggggtttcccttataaccccaatactgacaat

SEQ ID NO: 2382 - DNA, 756 bp, unidentified
  source 1..756: mol_type = unassigned DNA; note = unclassified Picornavirales sequence
attaataatacgtatttctttatttgccgtatcctgtacgatactcaggccatgggatggttttcccacaaaaacaatacacaaagttccttaacattcttttgattattttgattctatataacagcttacgtagtactatgtaagtgagctgttattgatttataatttgatttttaaggttgtgcattgacctgagtatagtctaactatacgcaaataatgtgttcatattaaagttggtctttaattagattctaacatcgaatgctttcactttcagatatgaagtctatatgatttatcacacacgttgttatgggtttagcttacgaagtgtgtagagtagtgagattgactattcagtagatcaatcagagcctttacacatgaggtgttttccctattagtagatgtggtcttgaatatatatttcccatcatttccggattttcattaatcggtaggagacaagaaaagacaggttgtgacacctatgagagaacgaacttatgaatcttaatgttagataagtaagttgtcagaagtggacgtaatacaagtcgtatacttatagctgttacctccccctgttaaagatctgatccgtgatcagatttccacattatgtggcgcttagaattatattggcgtgtaattcaagtgacttgtttagtccccgcatatgttaatcttgagagcgtgagaatataattgataaaatacaaaattcaaaaatatttcagatttgacaag

SEQ ID NO: 2383 - DNA, 756 bp, unidentified
  source 1..756: mol_type = unassigned DNA; note = unclassified RNA viruses ShiM-2016 sequence
tccgatctatgggtcatgcccatgggtctcattttaacggtcggagcaaccgatagataagctctactacgttcatatcagagatactcgcatctagtttttgctacgtgtcagttttctcgaagtatggatctagtaacttatcagctccaaacaccaaacacaccaaacatcaatcataaatcatttaatcgtgagattttactaagtataaatgtccagtagttctactatacggctgtggtggtacgtggttggcgcttaactgtaacaggttcagtaggccacgtgctgctcattacgcactccagcggaaacaatggttaaattgtatagttagagcaaaagatcttagtaaaattggtgatgcaagtctttcattatgttccgggtagcgaacttgataatttgatttagttcggattaccgagttggaccgagttcattgatggaagcaaccgcattggttatattgcgcaagcgaggcatattgtgatttactttctttggtagtactattcttaggatcaagtatcgagagatactcctttggacaactggaaccccgagaagtaaagttgatcaatatcgttttgcaagtgtatgagaccaatgtatgtgttttgacagtttgccgaaactgtccgtcagttataataatggtagtaagaggttgcacgagacgtaaaccttggctacaccctttgactcctttgtaggtgaaaaggagggttttattcattttaaacttaaacc

SEQ ID NO: 2384 - DNA, 757 bp, unidentified
  source 1..757: mol_type = unassigned DNA; note = unclassified RNA viruses ShiM-2016 sequence
ctggggggctaaccacctcccattttgatctgcctcttccctgttggtcagatatgaactttttagtcatatctgaaccggaatgcagttttcgtaaaatgtaacgtttaagtgtctttgtatcgttttgtaaatcaaagtcttaatcaatgttaacttagtattttcagtagaaattacgcgatttttgtcaattagtaagaattctataggcgtagccttagaccttattatggcaatttggacagtgttctaccagtcaatactagagttcttagtattagaactataaaataatactatctcttggaagcagagattgaaaataattccaccccttaggcacctgagacccaattcttaggaatccaccgtataggatttaaaataagatactgaagttaatggaagcgacaagcttgcccgagaggtaacctcgctaaacgaccctataaggattcgacccctttatagtacgatttttgccgctatgggacgatcaccggccccgttacttaataccttctatctttcattgttcacaatcttagtttagtcgatcttaaatgtgacgaactatttatattgatacgcagggtaccctctgattgaatctcaccttagtttaagttaagaggactacgcgtaaccagaccgccaatgctggatgcctatcaatacctaattttgtgatcatgtttgaggggaggatctgtgacaactgccaatttgatcataagtggcctcaatatagatc

SEQ ID NO: 2385 - DNA, 759 bp, unidentified
  source 1..759: mol_type = unassigned DNA; note = unclassified Picornavirales sequence
ggagattgcaaatacggtgtatgcagatgtaaataaatagctgcatggtaaattgcatacatgacagggcgtctccaggaaacgtagctttttagctttactactcagggccgtttgtccagagaaatgcggctcttactttccttatgaagctaaggttgtgagtattttgcttcgctaacacagataactttacagttgaggcacaagcgtgccgtgaatggaccgctagagtccttgccgctaatcttacttattatagattgcgacgtgagctttttgaacagttcaacgatttagtttttgatgaagaccagagtcaacctttggttaatgttaacgaggaagtgttcatagtagttagacagtttttgacttcacgtaatgatgccattaatgatgataagcgcttgtcttttgacaaggctatttttgagttgaggcgcgcttgcgcaaaggctttaaagtctacaccaccttccacaccttctgagggtgtttcgagtcacgtctctccatgatgtccagagaaatgccgctcgccatttgagtgtgagaccattcagtggcgtataatgtctcgcttcttctaaaaataattctaacgagggaaacctccgtgacgccgacgttaagtgcgacgaaataaattctttggcaattactaattcgccagagacgactggagtgacttcatttgtacaggaggctgtagaatgtcaggatatcattccagaggctgttaaccttggcacttta

SEQ ID NO: 2386 - DNA, 760 bp, unidentified
  source 1..760: mol_type = unassigned DNA; note = unclassified Picornavirales sequence
gtggtgggtgttcccaccacggtttctaagttttcaatttgaacatttgtttattacattatataagtagtgttgttacgacaacacgctatatttttgtaaggaccatttgtttgaatcttttcttagttatttttcctttgtttacgtttttctgtgttagtgtgtttgtgtttgtttagagcttgtattcactccctttctatgtagtgacaagccaaaaatctactatataaaatacctttcatcaagttagtttcaaatgaattccggtttacggttataggatagttgatatattgtgttattgcaatgagttcgtgaaaaccccttaacagggctaggaagaatggacccccgcttaacgggataagttgtcttctcgttctctctttaagtttgttaatctcactttattatcgctatcacaacttcacgaatagaaagtttcagttgtaggctagatacggaggactcagatatggtgtttgtagaagttcacttggtaattcttgtggatggagactcttcgtgaggtcgccctctatcgctgtctgatgaggttgctagtaacactggaccgagtattgtgtgtcgaagccaatttacgaagtagtttctcggcttttatgaaactatccaggacatgaatcgacagttgctcctatcctgagtatcgatcgatactgaatgagtactgaaggttgaccatttagtttatgatttattgattaagatttaagatttaaagcgatttaaa

SEQ ID NO: 2387 - DNA, 760 bp, unidentified
  source 1..760: mol_type = unassigned DNA; note = unclassified RNA viruses ShiM-2016 sequence
gcgggattttctcccgcactcttatttcaccgacgttaatcatagcccttgctatcatcaactttgagtgatatatgttcctattggtagttgtatactatacggtatacccgtttggctgcaattacaatagtgcaagatctatgattgttagccagtagggtgatatctgatcccacaattatcaatacttaatagactttgattcttccagtctataaaattagaatcaacaaacccaaattttatgtagtaatgttttgttttgtcttacaacttataccttgagtttataaaacacacctttgctcgttattataaaaatattattatttatgagaataaaatgtgaaataggttgttctgcaaccacctggttgggctattaccacgcccctgacttaccagtgtttcagtatggagaagcccgggcgatttgccaaagggttatttgtattgaatatcacattaaaattagtacatttgtttaatatatgaaattattggtatcttcgtttagttcccaatagacacttttaagtgagtcgtgcagacgttcgtttttcggagtcaacttgacccaataattttaatatattaaattcgagaagatcaatgctaatttgatgtgagtttcgagaggattgagcacccttgagaaaggttttacatttgaagcttataatgcgatggtaattttatcgatagcagctaaacttcgactttatatgttttaaaaaacttacctttaatcaatgat

SEQ ID NO: 2388 - DNA, 761 bp, unidentified
  source 1..761: mol_type = unassigned DNA; note = unclassified RNA viruses ShiM-2016 sequence
ataaaatgcatgtataatttttattcatatttatatttatgttatgtaacatatatgcttatgaaccgagtaaaatcggtcacggcgtcactatggtaaaataatatatatatagaaaactttttcacgtacatgcgaacaaaaagatttatagtttttcatatagggttgacaaccccatatgtgatggagttttcacaaaactccatatgtttgatgacaaaataataattatttgatgcagtttattaaaagatctaagattgaattgtgattctattttaaactttatatggactaacacggatacgagatttatctcgaaggtatctctggacatcgtataaaacggagagtagaatcttctgataaggactactggcctcaatacaatgtatcacgagcgttgtattgttgtatctcaaccatcacaccactactagtgactagtagagtagtaaaacagtttcgactgaaggctgtgatttttcttttgtggcgcgggtttatacactcgtaaaacaggcttgtttcttttggaagcaaatgggccatcccatgttatgtcataccagagtaggctaacgtacggtgcttgcacactactagctaataccatcggatcttgtatttaagtacctgaggattgagtgtcgttggaaacgatacgagctcaatcataacagactagtaaatatttgatgcctgtattagcataccgaaagcgtaaccaaatgaccaatcatggatcaatgtgaaat

SEQ ID NO: 2389 - DNA, 762 bp, unidentified
  source 1..762: mol_type = unassigned DNA; note = Pythium polare RNA virus 1 PpRV1-OPU1176 genomic RNA, complete1 sequence
ggattttaaagggggtaagacacctttaaaattcgtccgatttgcgcttgtgccgtggtttgatccgatacgttcgtctctccgcttgccgctgccagtctggaaccacggtccggaaagcatgccttctctggaatccaccgctgaggtcctctggttacaaatcggtcggcaggttcgcctgtcagcgtcgtcgaatgagcgaagttgacgcttgcgatctactctgacacccgtaccaccggtacggacgttatgaccctcgtcccgcccgtaaggttctacgttatgagccagttaacggtcttcgccgaaccgtgtacaaatgaggccccggactatccgcctatcggatatgccaaggtgaaagaacctgacaacagagagagagctgtgaccgctgggagagaccgctgacggcagtagatctgcaagcgctaaacggaatccggaccggggcgtgacacttggcaaagctggggagttttcgacgagcttcctattgcaaccttgtggatcgaacagtgttcttagttttccaattaagtgcgattaggattggcccgaggggcgaatgcaccgtatgaaggatacgcgttgggcgtgtattactgtatgggaagaagcagattatggattctctgtgttcgtctaagaaacttggtaactggtcagtcctagcgaggcaagggagtggtggtttagtcgatgagccacctgtgggtaactggaccccttgcgttaccgtcgcattgaaggtga

SEQ ID NO: 2390 - DNA, 763 bp, Sclerotimonavirus illinoisense
  source 1..763: mol_type = genomic DNA
ctgctgtcgtagatcgagatggacctctgaagagtggcatgccgaggatgttttactccatcttccggctcagctcaggtgcctcgctcaacccgcttttgatcatcactcgatttgcccgaaagtatccgcagttctatgcggagtttcccgatctcgagaccgagtttcacgccgctgcgcatgcgcttgctcggttctacgacgttaacgagaagcgtcggatgtatctgaaggtaatcttcggaagtgattacgtccctgtgcctcgaactgatgtcgactctcttttgggagttgctgtcttcaccttgcagcaaaccgagcgttctctgcaaaactacaacggcggcaccctcagtgtagctcatcgagagaaacttctctcactcctcaatgtttccgccgcaaaggaggaagacgtcccggagtcctaagtctccttctagtctcgcactgtactgtcattggtgattaaataaaacttaggagagaatcaattcgacgtcgatacgatgctttacgataagtttctgacatatgtcatctccgtcgagctactagcgaatctctgcgagagagctggtatcgaagaatccggaccgaagaaagaagatgttccatctcgatgcgtcttgccgattccttccgtgcctatcgagcatgatgatcgagagagagcaaagttggttgagctaactacctcttcgtcagagcgtctgtaacgcaaatataataaaacttaggagacaaataaatcacc

SEQ ID NO: 2391 - DNA, 764 bp, unidentified
  source 1..764: mol_type = unassigned DNA; note = Ipomoea aquatica botybirnavirus strain pt078-rha-1-newwen-plant _78,1 sequence
agatgtgtataagagacagagtcccaacccgttccaccgaaggtaggcacaaaaggtgggtgttaccacaccaccggcccctctcagcactagctccatcactggatttgtcgtgtctgctagaccagctccatagcagatggtttgcttattatcccgcattccgcggctggcaataaaaggcgaagcctgtgctttggcttttattgcaagccgcggaatgcgggataataagcaaaccatctgctatggagctggtctagcagacacgacaaatccagtgatggagctagtactgagaggggccggtggtgtggtaacacccaccttttgtgcctaccttcggtggaacgggttgggaattccgtaaggaccccagtaatgtccgtgcgacggggaaaagctacaacagcctgcctgtaacctgtaagggccaagggactacccagagtgtaacgactgcgaatcgtttactcagtatctaggaacagtctacttcccacaactcaattgagtttctggtcgtcgaaagccagagttaaaactgtgggcggtgttcgaccttcacaatcttagtaaccccgatttttgcgatagatcaacttttgaatatcgcccggcagagtgagttaatccaacagccacccatctacataaacaacaaaatatcggaaacacaccagcaccctcgaaactaggcagagcgatttaatccaacagccgcacgctaactattaaaacaacaaaacataccatctgtcaac

SEQ ID NO: 2392 - DNA, 768 bp, unidentified
  source 1..768: mol_type = unassigned DNA; note = unclassified Sopolycivirus sequence
gttgggataagctccaattctagtttaacccgggatgtgcttttgttgcccgaagattcaatttggtgagccgtaagtcagcccagacaagcgcagtaaccaatgcgaatgaagttctccttgagcgaccgagaaggcgcgcaggtgaagatgtatcacttagtaggggaggttattaaacgaatctgaaaagtagttttaatgaagttgtacttactattgccccacggattgaacggaaagaaaccgtcatacccagtgctgcaggaacagttactagacctttaaaagtaggcgggccaagttactgcagaatagttaattcaacggatttaagatgaaaagtaagaggcagtgaacaccgaagcgaaacgtaaacgagataaaatgaggccagatgcccaagtcgtaagctccaccacaacccagtggaatggagtaaagctcagaagggttctcggatacattagacattagtcgagagtctccctaccgcacttggggaggtaacaaactcttagcctgtgacgttggattgagagcaacataggttataaattaggaaacgctttcaaaattgctctgggcaggattttcaaatcagaacttcctgctttaaataaaagtgcacaaataagtctatatattttatgtcagaagattttgataaggagattttgctatttacaattaaagcttctatagttgttttacttgtttatatttcagctttatctttgatttgtataattgaaaaccgaatttaca

SEQ ID NO: 2393 - DNA, 768 bp, unidentified
  source 1..768: mol_type = unassigned DNA; note = Dicistroviridae sp. isolate fcc172dic1 genomic sequence.1 sequence
acttataatatcttacgggcctacgtggcctacgctagtacaatgtagtatagcagggacttaaaggtcctttcaaaaccaatataggctcggaaatccgaagtacaccctataccagcatttacgcaggattgcgtaaaggtcaatgaaattaacaataagtatatcgtatacaagagattgtatccacaaaaaaggagccgtaattcctaatgagcagcatatagcgcggtgtgacgcggtgtgcgaagggattataggttcttttttgtggatacaatctcttgtatacgatatacttattgttaatttcattgacctttacgcaatcctgcgtaaatgctggtatagggtgtacttcggatttccgagcctatattggttttgaaaggacctttaagtccctgctatactacattgtactagcgtaggccacgtaggcccgtaagatattataagtattttattatattttattcaccccccacattaaccccagttaaagctttataactataagtaagccgtgccgaaacgttaatcggtcgctagttgcgtaacaactattagtttaattttccaaaatttatttttcacaattcttagttaagattttagcttgccttaagcagtctttatatcttctgtatattattttaaagtttataggagcaaagttcgctttactcgctatagctattttatttattttaggaatattatcacctcgtaattatttaattataacattagctttatctatttata

SEQ ID NO: 2394 - DNA, 768 bp, unidentified
  source 1..768: mol_type = unassigned DNA; note = unclassified RNA viruses ShiM-2016 sequence
cggcataccaacgcacgcccaatgtttgaccctcaagctctggcatttagtctgtttatcttggttaatactcttcggaggggtacaagttcgctgcggctgaaagcgggaagctctgtccttatggggccgaacccttgtcgttatgggggggaacctatgtccttatgtggggaagccttgtccttatggggccgctcttacgagagtgtatctttttgtttttagttttaagtctgcttttagcacttaggtcgtagaaagctagattggcctaagtccttctttctctcttttactattttcctttctttctttctcttatgtagtggtgatctaccttcttcacccgtggataaatacacgttaaactttgagattccattctttcaacttgatgttttgtcatgttcctttagtacgttcggagggtaaaacctctttcgcggaacgagattatgtcatgatgagattgattgttgtctgtttagaatgatgtctgacatactgctgtcagtttgatgaggagttctcataacctctaggcgacttgagattcgcccttgttcattgcaatttgctagtacgtatacgtggttggtctgatcatttgcgcagttcccgtgacaggaactgtgtgtatgtgttcagatgtggagactaaatccaactgctattaggttacgtatcagctcgtcacaattgcttcgttcaagtttgctcgtggggtagtgctatgacccacctgttttgctctcacaacattcg

SEQ ID NO: 2395 - DNA, 768 bp, unidentified
  source 1..768: mol_type = unassigned DNA; note = unclassified RNA viruses ShiM-2016 sequence
tatgcctaacggcataccatacagtgtagaggaattttgatatcggcatctctatagaacaagactgcaagccagaaacatgactatagacttaaccgagaagttttcaatttacacaaccccctgggatcaaaccctcttgtctgtccagactttaaatggactcgcctttccaattaggccagacttttgcttttatcgaagtaactatatagatactagcaaaggaaagcggcgtattgtattaacacgaaacgttgtgctgtgttttgtcgaaacaccataataaatcaacaaagacgacctatcgctaacgaataatggacgaagaattcggacttatttactatgacgattaagcgggcgtatatgtttggtattacttaacggttttatcgaccatgttacccgtagttataggaatagacgttttggacttcacctaggatagccctgaccggcttacccgacggattgaacgagacggctatttctatgagcctttagattgacaaacgtgcaagtttttgtcgcatcatattgcgcgctttgcgattttcagtaatggagaaagcaaggacttcgacctgacccgttccacggtacataatctggttatatatattagaacgttagacatgtattatgctaatatatatttcccgggcctgaaaaccctaaagaaccctaaggacgacgatggcaatcgatgagtgatatgacgaggaccgcttcggaggcggacttgtattggcggacgcgttagaa

SEQ ID NO: 2396 - DNA, 769 bp, unidentified
  source 1..769: mol_type = unassigned DNA; note = unclassified RNA viruses ShiM-2016 sequence
tatatgattaaaatcgtatttatttattatttagttgttcctttataatttgcagtagtgcttacgttagcactttgcaattttattttggaacattaaatttataagtatttacttttctagtcttatagctctgtttgtgtacctggatgtgggaatacattccaaacaatttcaagggtttttttgaatatcaaaaaccctaatcgagtatcgccgtcaagtcttagcagttttatcgctaaggttactcgttccctcccttttggaggagctctacggtttgacggtcttaatttgtccattttccatttggattttattaagaccttttttgttttagtacactttttctagttttattgttttgctttgcctcttttccattgaggttttagcttgatgatttaatttttcttccctactatttcttttctctttttctacctattctatctctacttctctattgtttagaagacgttgccttttctattgaaaattctttattgcgctcttaaatgacctttatttgaatttaatacatagattttggttttcttattctttccgcaattgtccgcaccttatatgtggggttggttggttttccagaaaccagcgctgtacgagatatctttctcccaattagtgggagtttcaacagcttaagctcgccaaaactattttttacgacggagttcgtactaccctggttttgaaatgaaagtggtggaaaacagccgaaaggcacagggggagaggagtc

SEQ ID NO: 2397 - DNA, 772 bp, unidentified
  source 1..772: mol_type = unassigned DNA; note = unclassified Polerovirus sequence
atgggcaagcggcaccgtccgccaaaacaaacggcaactccgacatccccgacgccgctacaagcgcaccaccaatggacagaatggtcgaacagatcatcacggctatggtggggagaatcaatctctcggagatagaggagaagatagtgagcagggtgtctcagaaagccctgcagaagcccaaacaaaagaagcgcggaaggcgtggagggaagaacaagcaaaacagttcacctcctacttcaacgcaatctacaagtggggcgcccaagaaggaggctgccccccaggcttcaggaagtgtgggcacatcccgcgctactaccacccccgcaccagaggcgaaacccagtgggggcaaaaactctgccaagttcatcccgagctggcggagaaaacagcaggattcggctggccaaaagcaggatctgaagctgaactccaaagcctgaatctacaggctgccaggtggctccaacgcgcggagtcggccactatccctggcgcagaagcaagaaagcgcgtgattgagaaaacagtggaggcatacagaaattgtgtaactaacgccccactgtgctcccttaaatccaaactggattgggctggctttcaacaagatatccgtgaagcagtccagtcccttgagctagacgctggtgtaggcattccctatatcgcgtatggcctccccacacaccgaggatgggttgaggaccataagcttctcccagcgctcactcagctgacctttgaccgactacagaag

SEQ ID NO: 2398 - DNA, 773 bp, Tropivirus A
  source 1..773: mol_type = genomic DNA
ggggaaaaccccctacaacttttttcgcgcagttattggaatctgcgtaggcaataacatcgatgtcgctactctgtgcttcggtgcagagcggcctatgtcgcatgttgccaacatcaaaattctgggagagtcgcgaactccttaacactgccttgcctcgacggagccgttgttatagtgtcgacgggatacaaacattaaactaaacccacttgcctcgacggaaccccttaccttttattttattttatagtatgaaagtgaatcttgtatgaatgttcatagaaaactgcaaatgagtaccacgtctaacatgagagaatgatactggagaaatccaagtttagaagtcactacgaatcccagcggaaacaagggaattctgagcttctaataggcgtttaagactatttgcaaaattctggtgcgtaagtgatattttcattgcgtagaacgctggtaaccactccggctagtataagcattgttagtcacttattatgaaactccacactatcctttctggagaagcacacaaacttacatggtaaagctagaccattatcttaagcggtgagtacactgcaaccttgtaacaatgcttgtatgactactttttgtatatcttgagcaatattgttgaggtggacatgtccaaaggtaatgttgttgggaatggaggggtccattttcccgtgcacgtagtgtactagtattgggtgatagccttgcggcggatcaaccatgtattttaatccgttgactttcac

SEQ ID NO: 2399 - DNA, 774 bp, unidentified
  source 1..774: mol_type = unassigned DNA; note = unclassified Potexvirus sequence
gaagaatcagagaccggttctgcccaaaacatatcctcatcaattgcgaaaagaccccaacacaaatctctgactttgtcaaagctcagtgggacttctctgactttgcatacgccaacgacttcacggcctttgaccaaagtcaggatggagccatgctccagtttgagatcatcaaagcaaagtttcacaacattccagaggatataattttaggctacatggacatcaagacaaatgcaaaaatcttcttaggaaccctggccatcatgaggctcacaggcgaaggacccaccttcgacgccaacaccgaatgcaacatcgcgtacacacacttacgattcaacgtgccggaaaatgttgcacaagtgtacgctggagatgattccgccctctcaaaggtctgccctgaaaaagactccttcaagcaattcgcggaccgactcaccctaaaatccaaaccccaggtgttcccgcaaacacagggcgcctgggctgagttttgcgggcttctaatcacaccaagaggaatcataaaggaccccgtgaagctgcacgcctcctgggtgctggcaaccaaacttggcacactgcaacaaatcaaatgcgttaactcgtacggtgaagacctcaagctttcttacgaccttggtgaccatctacaggagctcctctcggagtcccagtgcagaacccaccaagtcaccgttagggagctggttaagttcgctggaaaagtcgaaaagcatcaagcagagatcagatcagtggcca

SEQ ID NO: 2400 - DNA, 775 bp, unidentified
  source 1..775: mol_type = unassigned DNA; note = unclassified RNA viruses ShiM-2016 sequence
gtgaggatgaacctcacatgattcttttatggctcgttgatgagcaatggtttaattaccatttttcaaatgatgcgagttcgcgtgctaatgattagcagtggttttattaccattgccttaatataatttagcataggcggttttgttaccgcttcattatttcatatcaattcattttgtataactttgtgtgtattttctttttgttttaattttgttatgaacgggcttacgctttagccaagctatacgctacggcagtacggtctaatgactagagagactgctagaatttcaattttgaaacaggatgattgtactttcagccaatgatttaaactttttgataaaaagtgcgttacgttaagttgcaaatggtgtctgattcagactttggttggtcggcagaattcttacgaccttaatgcggcacattagctccattgcgggagtttaggccacaatttattgtgtagtgtctatgtaacaagacggtgtgagagatctttgatcgtggctctttgataaaaggcgttttttgcgaggcgtataagatttggattataggagataccaataaaatcataaaaatcggtgggtatcactttaagtagcgagaaagacatgccttcccaaaggcttagtttagggtgctgcttacactcgcaagtgtatttgcattatcttgtggatatttaagtggacttaagtattcgtgggaacaagataatggcttgtactacctcggtaagtttccgatgacgcgacgacg

SEQ ID NO: 2401 - DNA, 776 bp, unidentified
  source 1..776: mol_type = unassigned DNA; note = unclassified Picornavirales sequence
atttggtagcccaaatatatatagtttattatctaaatgctttgtgcaatatagcacggcatccgatctattatggttgtgtcaatatttgacgctcactatttgttattacaatggaattgaccggattttccggcactattgtatatcaaatatgagtagagacaatgagacacttcgactgtattagtcgatgttagagagtttgagctctagtatttagatttaatctatagcatagattatttctgatggccctgattcgtggcattaataaaattaccaatcgccccccctgcatattacaagaaagtaaatcagtttttaactggcattattaaatcgtgtatccttttggaataaatccgtacaaataatgtttttacacaaaataacagaaaaatagataaaagtgtccaaacaaaaacatatacatatatatatacatttgacacagaacacacaatttttgtgtaggtttatggaatagttttcactgtcgaaagctattagcaaacatcgcaaacgcctctccaaatcgaatcacttatgtggtgtctgaagatttgacgcgaatcgtaaagatgtggtatagtacagtaacagttgttaccgaggctagcctagcaagttagtagaccataaactaaccttcttttgttacagcatcatgtaagagtcaagatgcagatttctatatctttaaatagaatatctctatactgggagaaaactacgtcaccaaaatccagatacaacagacaatttacacgata

SEQ ID NO: 2402 - DNA, 777 bp, unidentified
  source 1..777: mol_type = unassigned DNA; note = unclassified Iflaviridae sequence
tttaaatctagtgcataacatcgcactagttatattttggagataagtaccataatatatttaaagtttgcattgctttcaatcgtgaaacattccttcagaattatttcatgctattaaccgatgagccgtgagtaagccctacaagcgcagtaaaaggtttttagaaagagttttcctttagtaaaaaggagacggtacgattataaaataataccttccgcatttattagcaatgccgaggtggagaagtaaagtggaaagttaatttgatactagtaataatgaaaaaaataattatgtaaaagtgggaatgaggctaaagattgccaataccccatgatcattcgcccagctaggcatgtaccgagctattagaaagaataattataataaataaatattagaagatgattaataagtactaatgaacgcccatggaagacccttttaaagggagatatattatcgatcatttagttaactcaaaaataagcggtttggaggactttaagcctataactcctagagcatctatttgtggaaagtgcagtgcgcatataattatatccgttgtattatttaaacagtcccattacatcgtgctggtgtgggatagcagctggtaattgatatttgatcctaatgaacttggtattttatttggactacttttcaaaacattgggcaggaattttaaatcaaaaactcctgctttaaaatcagcacaaacaaataaataaatacttaaaactttagaacatttcaattttaaat

SEQ ID NO: 2403 - DNA, 777 bp, unidentified
  source 1..777: mol_type = unassigned DNA; note = unclassified RNA viruses ShiM-2016 sequence
caggggcactccccctgcacttcctattttaacttcatatgagacgtggttactccatatgtcgtagtgatgtaagtttgctgtatgattgcgaacaccgtaatgtgcggtagaacctctctcacaaaacaaccaagaaccacggtgatactacccgtgttaattgtagtacaaccccaaccaaccccaacctgttagcttaaacagtataaacctcgagcaactcgtgttaactaacgtagcgatattatcttatgttattttagtcaacaacttctttagtgttgagtcctagaagtaaaacaacactcaacttcattcctttgtattagttattcaggatcacctagaattatcgacgtaatcttttattttatatgtctacaaatattgatatggaaaatatgggacgctttcggtttccaatggtgagattcggatactcactgcggaggttggataacttaaagttttctgaagcttaggttcttatcactgtttatatatcttatatattcgtcggagctctgcctttcgtattctccctcagatatggtatgaaaatagactatgtcaattcatattcctctactgtgaaaatatataagtgtataatacatattccctaacacagatttagtcaccccattctttattagtaatcaacatataaatattagattcaaccgtataagacttggtgttgaatgaatcactttacttagatagtaatgaggccaaggtaagagctttaatcttccaacagaaacaaacaaa

SEQ ID NO: 2404 - DNA, 778 bp, unidentified
  source 1..778: mol_type = unassigned DNA; note = unclassified Betachrysovirus sequence
gaaaaaggcttctcatttttgcacatgtacgagcgctctccactaaacacgttaggcacaccaggtaacgcccaagacccaacagctagctaactgcccaccacaacgccccactcccacgcggccgctatgagcaacagggtgccacgtggtttcgctcacatattctccgacttggataccgcgagcgcttgggacaacgcactgagcgaggttgaagaacgcgagccggacgagagcgtggttattgagggcgaccccgagatctacgagacactgcgcagtcacggaggcccgccgcccgactacgaaactagtgagatagctagcgtgtacggccaaagagcagccccacccccgccagtggctgggtgcgcccgcaaccgctttgcccgcaccgagcgccccgcaaaccaccgcgaagcgccgcagaggttggctacaccacctcctcgcccccgtcgagacactcagttctacagttcggactggccggggcgcgacgctctacccacacgaggcggcatcgaggaacagacggcgcgcgttgaggcaaggaaccggtggctgcaggctgaattggacctattaacagaggacgacctgcggttcaacaacacacagcacagagcgcgtgccccatccgtacgcagagagtccggattataccaacgcgtgagcgagacagctgctcgagaccggcgccagcgcgaacgccagcgtagcaaccgagggagtagcaccaacggctctggcagcacactcgtgcggtacggcg

SEQ ID NO: 2405 - DNA, 779 bp, unidentified
  source 1..779: mol_type = unassigned DNA; note = unclassified Bacillarnavirus sequence
tcctgcattgaccacatgcagggtttttcgggtattagccgttcttaattgaacgcaaatatttcgtttatttacgctatgaactccaacgacctggagttatttttgaactgcgtaagtaacgcagtttgatcaaaatatagtttagatttaacatttcgaagttttttagccgacatttttatgtcgtggtaggcaaaccattgccggtgacagaaatcccattgatatagtcacttaaataaaaccgttccttttaggaatgtgagcatttcagatttgggcagtgaatggggccccaaatcagtcgcacaattgcggcattacgttttaacgtttatcgtagtcaaaacgttgatttttacttagtttgattgtaaaactaatgtgtgttacgaaagaaagtcgactcactgatgagtttattgtgttccttagttggttacgctttaggtggtttgccaatcccacctttagttctcatttgagatataggaagacagtgaatgaattattagtaacgtaagtacgtccatttttgtggagcacgtgtaggtcggtaccgtatgggtaaaaccgttaacctgatcgtgtaaaacattgatgacacatgaagagacaagatttctatttagagatagggaagccaaacccgcacaaaaaatagagcaaaggtgcaatctacgagcctaatgtatttatacaaaccgtgagtccactaaccgaaagtatttacaggatcaaaacgagtttacagtggaaatttggtaatcaggaat

SEQ ID NO: 2406 - DNA, 779 bp, unidentified
  source 1..779: mol_type = unassigned DNA; note = unclassified Picornavirales sequence
gggatttatccccatgctgaatttatcccactctaaatattagagtgttgtactcctctttggcccaccattgtacggggtgtgtaccgtacactagttatagtaagtaccactagttcttggttccttctcgtgttagtgcacacgttcttgcgctaagttttctaacttttctttgtctaaactttaaatatgtgcttcttttaacctggaggtctatcgtatttgtggagaaaagctattctaagcaaggaaaacaataacactttctatcttctttgtttctgggttgtcctcttaaccaagctggtcccatgggggcgtgggtaaatggccctatggattagccatagtggttatgtaggcgaaataaggggaacccccaatcatgttgtacgttgagttgttcatggtaactgctttatatacatatctataattgcccataagaggtaggctacgggtgaaacctctattgtagacggtaaggctgcggtaaagattttctttcaacgcagggggaccgctgttctgcagtgggaatatataaatatttatgtactgtgggtggatgactaggctaaggcttgattgtttaggggtgcttaggaagttattagaggaaggggttcacttatatgaaattgaaaaaggatgaacgctatcccacctcaaacttcctgagccttttcttggctctttcaggttttaaatccccaaatgattaaaatatatgatatagatacaaatattggtttttgttttgctgattagtagca

SEQ ID NO: 2407 - DNA, 779 bp, unidentified
  source 1..779: mol_type = unassigned DNA; note = unclassified RNA viruses ShiM-2016 sequence
acgcattatgcgtatgcggggatcatcgagatgccggattaacttccggccagttggccttgaggaggtcagcctcctttcgagctagagtagcactttgggggttcgccccctctgtgctagttttgttttgtaattaaatttattcttttatgcaggtatcgaccgtgttaaaccagcggtcatcgacctgagaaggtcattaaatatatctaccaatcttttgtgatagagacgtaaaataaacctataaaaataaattgcgtccaatgtattgttattttgtcggtctgtagccggcactatatgttgtatgttaatcacaggctttttactgatcaaatggaagcctaatatgtccattagaactaatccgtaattaacggtaatatgagtattatgactgctcgtctaacagtcatagctccgcctgagagtgcaacgtaatgcaatcaggcttgagtcgggacgaattatcccgaccacatttgaggaacgccttcgggtagggcctcaaccccagacgagactcagtagcaagcgtaatgtgagttgtgcttaggtatagcctcattcatgaatttggattttgagcgcctttgtgcaacagcattgctaacttgtggattgagggtggccattgtgtccatggaataacacccaatgatgtccttgattaaatttcattcgtgagactaaagatgctgtgtcgactgtcgaagatttattctttgcaggacacctgcacggaataatctttgactcgtcgttcaataacc

SEQ ID NO: 2408 - DNA, 780 bp, unidentified
  source 1..780: mol_type = unassigned DNA; note = unclassified RNA viruses ShiM-2016 sequence
gcaggtttccctcacacggaaacctgcgcacgcgtattaaacaaccattgcatctgcaatcacgtcttagcattgctagtaagttgctttaaacttgctagttgtcctttgactagttgtatgatccgatggactttaatatataatttaattatatattttaccggattaatggtacgacttggaccgtgtgaagtaaacagcttcgcacgttttcttggatttaaccatcgatttataggatggtcactgatgtatatcagttattttcttataaattgattcttgagcgagttttcttttaaaactgcatgcgaagcaatttattgtttcgtagattcgaggtgacattgatcgtttgacctaataaggcgactgaaaaaccaccggcttattagttagatcttggatgttgcttatgtaccgcaggggtcttatccgccccctcctgtaagctactgcacgggtagactggtgtctccttttaatattgtttcagacccatgcgagtcgagtattagaaggctgatcttccggcgactgtgtagatggagctaatgaggatggcttactctcctcgtcatcggaacctaattgctgggacgtcatcaaatacttgggcgatccagttcttgagcggcattattcgcacaggtgaaaaagtcctgctggtctagtgctagtgtgcctcgctcgaatctctgacaaggtagtctttatggttatctataggagttcgggaattagggtgtgaacgagaactaaatttcattttttacg

SEQ ID NO: 2409 - DNA, 780 bp, unidentified
  source 1..780: mol_type = unassigned DNA; note = unclassified RNA viruses ShiM-2016 sequence
ataggacatcctttacggatgtcctataggctcttttcttatgtcgatctacagtttgaactgctgtagcagtcgcatgagatgtattcatgctatcagttaatttgactttattaatagttgcgctcttctgggacactatttttattgtccctttagagattgctatatgaagtcctcttggacactcatttgcattgtccaattgtttaacgctagtattactttattctcgttggcagagtactgccattataagttttgaagcttagttcacttcatgaaaggctttctttcaaaaaccctttcaacccccccttttgggggcttacatgttcaaatctttcgttcggggaaagatttattgtttgctcccggcttcctctaattgattttagtgaaagctgatttatttgatgtaattcgcttagtgttttatgccctaaagagaatcccacctttactatctaacaaccgtttaataacctcgtgacctaataagaacgtggaacgagtaggaatgatttagtttaggaagaattggtctcttggagtataatttatcagacgtacttgaacatatttagctcaataccaaatagtaaccttacgtttaagcacgtgaaccacacgtgtagggtatgtagccgtgcccgatatttgagtaagaagtgctatttgtgagatacatataatgatatttcagttattaactttttgatattttaggaagttttgtttaggcctggtgcctaccgaaacctcacccagtttctaatt

SEQ ID NO: 2410 - DNA, 781 bp, unidentified
  source 1..781: mol_type = unassigned DNA; note = unclassified viruses sequence
ctggcgacaaatgtcacaggtgcgttcgtggaagacgtaaaatctctaatagattattatatcgctagggctaattttactaacactaccatagattacgataagttgagcgaagttctatcgaatgtaaaaattaacgtaaccactacgcagtctaaaccgtcgttttcttactaccgccggcttatagattactatatcgaccacgactacaatatcacacaccatatttttggtggcggttctatagttggtgataggactaaaaggtttacgttcgctggattgttcgagagctccattcttgccatagttagaccgattttacatataatacacgaatttttcttggaatttattgaacccttattagaacgtttgatagatatattcgcaaaaataacattaccattagttaaaacaatatttactttttcaaaaactttgttcgaacacatatacaattacataatcgaaaacgtacctgaacagacattgatagactttttcgaaagatttttaaaatttttatacagaatattgcatgttgttgttgaaaaatttgtagacattctaataaacactaacactacacataaaatttttgagtttgttgcactatatttaattctgttttactattttaaagcatatttcttatcattaattatcacaatagtaacttttgtaatcattggcatagaacgcaccgacgaacataccataatggttatattaatttttacttttctattgattcgctgctacactaacccacgaa

SEQ ID NO: 2411 - DNA, 781 bp, unidentified
  source 1..781: mol_type = unassigned DNA; note = unclassified RNA viruses ShiM-2016 sequence
tgacgttgctttcgggcgacgaggtaccgtgcgcgacggtaggacagctgccccggcggccgtaggatacaaggttggcgtctgttcagtatgaggtgaaaccatggatgtctaagacattgcattggtactcctgcggatggcacttgattccgaaaaccggcgtggggactttttgggcgcatgctgtgggcaggcatgtgagtagtgggcgctcgtggttttttctcagctctggtgtcgcaaccaccaccagcatattctgttaaacagtgtgctgtgtgtccgtgccatagtgtagagctgacccgtgctgtagggctgcattatggtatacgtgagagtgtaaaatagggaggccagtccctgcccgccaaattaccttccgtggtcaacccagcctcgaggggagaccctgagccaattcgtggacctgctgcggccaggttgaaggtgaaggccacccgactccgaatgccaacggaaaacagtcgggcatcctaccagcctatctggatgaacctgatgccccgcacgagagtgtactttaggggataggggagctggaggatggaggttacggttccgtgtcatgaagtgtggaagcgatgcatggcacgtaggcatccagaggccgtgggcggtcattgtgatcatggggtcactgagtaccgctcgcgaattttcatccacgttagcatcacattgtcgcgcagaggaagagtcccagtggtgttgatgtgtgagacgtttgtgtcggtgtttgccattcattacagag

SEQ ID NO: 2412 - DNA, 782 bp, Mirafiori lettuce big-vein ophiovirus
  source 1..782: mol_type = genomic DNA
aaaaggaaaaaacattgcatcaaaacagtaaaaacattcagtcacttcaaattttgactatggactataacaaagatctaccagaaaatgtaagaacagtgactaaaggtgaaagtaatgaagcagaaacggttagcaaggctgattgtgaaaagtctaatagtcttagcattcaattgttcctcaattatcatgttaaagagattacagttaatgattcaaaaatacaaacaagaaatatctatcttttaaacttgttaaagggatatcaaactagttacaaagaagtaacaagattcctgttcggttcttggttacttttcgaagaggagctgcagccaccctttaacataaaagccatgataataattgacacgaaccaagaattagtagacgtctcagaatacaaaggaatcgagctaattctagggaatgacatacaatcgtgtattgattcattttatatgcatatttacaaggaagatctaattatctttaatgaatcaggagactttatgttcctgacagatcattttaagattccaaaatattttgcaagactggatggacaacaaataaaagtcaggaaaattattgaaaaaagatatttagaagtatctaaagggaaaacactcaaggagagaacttagctgttttaataaaaaatcaaacaaaacaagtgagaactacaaccaagatcaattaagcaagtaaaaatagtgatatcaaaacaaaaaccaaccttcaagttctttgtcatactcctctgcataacgttaata

SEQ ID NO: 2413 - DNA, 782 bp, unidentified
  source 1..782: mol_type = unassigned DNA; note = unclassified RNA viruses ShiM-2016 sequence
atattgcatttggtcctgggatgacattaaactcatccaaactccggaaccatctgtagtataagtttaaaatggttgtgttgtattggataccatatgtgttgaatttttgatgttattttgtacatatataggcttgcatcacatagacattctcccagtgggaatacctgtttttacaggaggtctcgtcaaccacacaaatatcatgcggaaagtgctttgagtagagcacttatcctaagttcataaaattacttactacacttaatactaataccaaaattgaagcggaaggaggctccgcataccaagtctccaaaacctctcgcgattcgaaggcgcagacagtcaactttgttgatggcgatacgccttggtcgtatgatattgtcgcaactcctgacgcgacgaccaagctctctggattctctgatgccgaactcggtgacttccttagccgacctatcaagatcaaggaatatcagtggacgcctggatcttctttgtcagttacgcgtttcagtccgtggacggaattttttagtaatgctgatgttcttgataaaattaatcgttatcgtaacttgcgctgtaatttgcgcctaaaagttctcgttaacggaaacagtttttattatggacgtgcattgctaacatacaatccgtacattgccaatgatcaagtgactgtcaatcgtgcatttattgctcaagatttgattcaagcgtctcagaagccacatttgttgttagatcctacaacttcacaaggtggtgag

SEQ ID NO: 2414 - DNA, 782 bp, unidentified
  source 1..782: mol_type = unassigned DNA; note = unclassified RNA viruses ShiM-2016 sequence
tttagctaggatagttagatagcataactatgaatagatcaggaaatagacgtggtaataatggatctgtgcggttaccagcacaaattttggccagagcgctgacgcaacaaatgaacaacaagtcagcaagaaaaccccgtcctcccaaaagtaggcgaaaacagccgattgcacctggcaatcgagggcttcgtgacaccttcgtgttcacggttgattcactgaaaggcaattctgaagggaccttaacttttggtcctagccttaaggagtgtcctgctttttctgggggagtgacgaaggggtaccacgagttcaaagtggtttgggttaggttcaccttcatttctgaagctgcctcaacctcctctgggtcaatggcatatgagatagatccacatttgaagttgacaaaactgtcctccaccgtttttaaattcggaataacaaaaggaggatcaagaacctaccgagcctcgcagatcaatggcaatgaatgggtatccacttcggatgaccaattcaggtttctgtacaagggcaatggagacacaactacagctggtagttggcaagtgacaatgatggtccatttccagaactccaaataggtagacgacgacccggcacctgctccggtgccacctccatctccacccccctccccctcacctagtccacaaccaacaccagatgatgagagattcattgtttacactggtgttgcaacaactcgcataagagcaaagacaaccgatgatgcattaattctcaacccg

SEQ ID NO: 2415 - DNA, 783 bp, unidentified
  source 1..783: mol_type = unassigned DNA; note = unclassified Iflaviridae sequence
tattttatacccccatgcttcatggcagatgcatacagtggagatgcatccctgtcaaagcataccctcttttagttataagattttattattattatcaaattaggcctaagtataatataataaaatgctcgttactgaacggggctcttttgagtgtataaaaatttggttagaatgtaagtttgatgactccatcactcgcggagttatatatgaattaaagaatgtatgggcattccctcacaaatatgaaacatgaccctataattatatcgggaagtactcctatggcgtttatgttgctacttactgtatacatatttcggcattagttgtcaccatgcaagattctgtcctctattatgcatttgtataggccatccgacttgtcgcctaaactatacagatgtgtattatgataatgtttcgagtactagaactacttattagttattccatatatgcataatcatggtattaattgtgagattcatatattttgcgtcagtcgacacatggtgttttataaaatggggttgcattgtaaacatttcaccgtcttcgtcgatcattccatatttttttttaaagctcaaactcttctctttatctatcttttcggagtggcgcccgagatttataatctcattaaattgagagtaaattgagccattttgtatttcctttcttttcttccgtaaaatgtttagctactccgaccaccagggataggtcgatcatccacccccaagaattacgaatcagatacaactaaatacg

SEQ ID NO: 2416 - DNA, 783 bp, unidentified
  source 1..783: mol_type = unassigned DNA; note = unclassified RNA viruses ShiM-2016 sequence
ggggcttttcccccatggctctcattttaacggcaaagataatcatgccgatagttaagctctcagtgatcttagatgtgcatttggtatacttagtttcgacttttatgcttcttgtacaatctattacactgttggtttttcatgatttcaccctttaagttgaaaaacttattttgattttgattttcgaatttagaagtaagacccctttgtttgacttaacttttgttattttgacattgggcaatccactgacttttgagaatcaccccttgtggttagaagaccacgtacgtaactttagcatagatccttggatagctagttacggcgacgaagtctacttacactttaatttactaagcagagagaaagtgctgacaaattgatttagttcgatttgtcggaattgccgaggtccctcacagaaacccgcctctttagtattttatttgttgtagtagcaggctttgacgatgaactgatataagtacaaactgatcctttggtcggaccccgttcacaagtcttggaacaacacatcgcgaggtgtgccttggccggtaatcatcgctatggttacccgtggacaattgggccccccggctgcgctagcaagcaggaggaacatatcaggaattcaacgaagtatcttttacctgcgttttaataagaaatgcaggagttgataaatagggcttaaactggaagcgagactgcagcggctaaagcagcagtaaatggtgccagtgtaggtgttttctctttttaaatctcatt

SEQ ID NO: 2417 - DNA, 784 bp, unidentified
  source 1..784: mol_type = unassigned DNA; note = unclassified RNA viruses ShiM-2016 sequence
gctcttccgatctggggaaacccccctgttctcttttgaaagctgaagtattggattttgcgtgatttattgagttaccgcagtttcatctgaatttattccggattttgcaaaatgttcttttgtttaattgataccagcgggattttatctaacgaatctagccacacttttaatcattagcactctttagtacaacggcaccaaccaacccccccttttatcattttaatattcttctgtgacaggcgccttagcgcagtcagtgtttgaggattctttatccatttcggaccgcgttatctatttatagatcctttttacgatttcacactgattgtttttaacaaccatcacccttatatttacgtgtacaaaaaattataaaaacgtcgcaagacaccaaaaacaactgtcttttcatacattagatgcaataataacactgatgaattagactatgaatcagatttacctatatgatactaaaacgtcgccgaggcataaagagcggacccaaaaggaaaacctacgtcaagtattatatctgctgatcagccatcttttttattttgtgcgctgtttttgcggacactttgtaaatgctatgtcgttgctgggctcacttttcgagcaataattactagaacccaaaaaatgaataaaggtcttacgggtattcttaggcagcaactttcattgtcaatccaaacatgtttcggtgtttggttctagcaattaatccttcccacgattcctattttaactctttttaacattcacg

SEQ ID NO: 2418 - DNA, 786 bp, unidentified
  source 1..786: mol_type = unassigned DNA; note = unclassified Hypovirus sequence
gggttccgactaaggtgctgtttacagcttaatcgggtgaacgcgcccaacttcaatgggtcaccaatttgggttcgtgatgttcgaaccattggaggttaaatattttgcgttcgtgtcacattgtgacgtgacctatttaggtcgtagggtgagtccctgtggtccattaggacggtgcctctcttggggcgttgcacgaggtgcagcatatcaaaagtaaaatcaccaaaaacaatttaaaatatgaaatgataaaatttgacctgggacgtcattaaactcacggcctcaattgccaccgctcatcggtctcagtgaaggggtgaaagcggccacggtcgttagtaaatataactgggaatgagtaggagagtctgggcccgattaccagttggctgatattaagcggatagattttaaaggttcacctccaggctcaatcggactgagatccgttgtcggcagtaatgagtgcaactcacaattctggctaggtaagacgaaaagacgttaaaacctgaggtgttcgatcaactttaagactatttcggttaaatatggctgggtgggaaaggtagtaagctacccaaaaccttaggctgagatgtcactttgtgtccggtaaaactccggggaagcggaaaaatgcacgctgcacatgacacgagagacacttgactgtactttggtcccgaacgggagcacatgggggtcgatgacaattgggaaagaccaattgacttggcagtggaaagaactgctattcaccatgatcacatataa

SEQ ID NO: 2419 - DNA, 786 bp, unidentified
  source 1..786: mol_type = unassigned DNA; note = unclassified Picornavirales sequence
acatgggcgtttataacgccctaccagtcctctttgaacgtgtgctgtccatctatcagcgcaccatggtctcacgaccatgttgttcaataggtattctaatccaatccctattctcccacaaaccttcttgtaactctgttaagccttttacatccatgtaatttaattttctccacctaaaaggatttcccccatggtcctttttggctcgaacaaatgctacatagggtcttgttttctccccctggctctcttgccagggttccataccccaattcctctatttccatgatttttcatcatggtttatttttactgtcttcttattttctgaggtgaccaactcctaagccgactgggtcgcggaagcccggactcctcgcatcactagggtgcgtagcgatgtaggcgaaaatattggttgctagatgcatacatatagtgaattgatactacaccaaactctgttctttttgaaactagctattttctaagtaaggtaggctacgggtgaaaccttaccattgcaggtacgtgaaccgcaacggacatttggccgaagactggtgtacccacgtcagttataggacctcttcaacgttggtggacggcatgtcactgattagttaggctagtgaatttaagttcagggggtatcttttagcttaagcgtgtattctagtaggacttgcagagcctccccacctaggaggatctctgtttatagccccttttccttgttccgttagttttccacacttttacaatatttgatgatttgtt

SEQ ID NO: 2420 - DNA, 788 bp, unidentified
  source 1..788: mol_type = unassigned DNA; note = unclassified Torovirus sequence
tgacgtattcttagttgattttgaagccttgaaataaagcttttaaaccccttttacggtttgtccaccatacggacattgttcagaccgcagtgtcttgtcaaggaggttcagccttgacattacttctctgtgaggaatctactcagaaatactgcttgcgtactagtagttacaagagttgacacttagtacttacaagcgggttcaaccgccctccggaacggtggaaactccctcccgaacgtgcgcttgacgtgaccaatttaggtctagctttctgagaaatactccagggctgtatttgaccacatctgttattcatttgtggttgtccacaaccaaacatcgtgtgactcacctccagctttgctgcaggccttttggactaaacgagtcgcacgttttgtgactagttttaggacttttcacactcccctaccgccaacctgattcttttcatccttaagttttgcgtttatacgctattttcttacggttggcagtttgtttggttgtttgcacagtttcttttaataccaatttttactgtgctcttagtttttacagctaaggctgttttttatttactcaagttgcttgaagcagcttttacaacactagttttagttttaattgaaaagttaaagggcgtcaggaaacaacgcagacgcccttcttgtggtgtctagttagtcctaatctggcaaacaaatatcaggttgttgactccctttggagtgagacctacgagtatcagtttgcttattttggacacccatataaaa

SEQ ID NO: 2421 - DNA, 789 bp, unidentified
  source 1..789: mol_type = unassigned DNA; note = unclassified Picornavirales sequence
tttagtgttgatgggcttggccgcaggtgcttcagcaattggcactgcggtcaatgctggtatggctgctaggggacagaataaagctattgaccaacaaacttcagtcaataacacaaatttgcagatgcagaaaaacgctatgaattatcaaactctaaattggcaacgtaatgtagatctgtttaaacagagtggattacctggttggatggcggaaacccaaggtggaggtagtggtaatgttgcgtttaacgatttccctaaaataactcaacaagtagctggtaataatttctcttcagcagcaatacctggaaatttagtgagcgattttggcaattctatgatgcaacaagtgatgggtatcgctaattaccagtacatgacaaaacaaggttttggtccaaaagtatctaccatgtcacaaacagatcgcggtgacattaatcctaccagcacattttcgacccaaacagagccaaatcctactgggacctcgatgactgcgactccaaacacccctgaagaactttggggtgatctgggaggcacagtgcctagtacatcctcaacagtagctatgcccgatgcgtctgcagccgctgaggcgattccagctgcagcgccgattgaagaatagccctagtaaacgtgttacttgtgaaaaacatccgcggattttttcacgatggtacagttgtcaaaataaatacatgggcttgaaagacttgaggatttactttgaccttttgtgtttcttggataataaccttgaaatattcaaag

SEQ ID NO: 2422 - DNA, 789 bp, unidentified
  source 1..789: mol_type = unassigned DNA; note = unclassified Picornavirales sequence
acccctggggcccacgcggcgccagtactctggttcgcttagaacctttgtacgcctgttttccctcccctaaataaattaagatcaccactactgtggggagtagtccgactccgcaccgatacgtcgcaccagtgaactggttcgcttaggacctttacacggagtagatggtgttcccttcccccgtaacttagaagcatgaaccaaccgaccaatagtggcgttgcatccagcagcgcagcggtcaagcacttctgtttccccggcgcgaagcgtcgttacccgcccagcctactgcgggaagcctagtagcaccccaattgatcgcgcggttgcgttcagccacaaccccagtggtagctctgaggaatggagctcgccgtccccccacagcaatgtggtggcttgctcgcgcgtgtcctcgggttcactcaaagagtgttcaccgcaacatcaagtaaggtgtgaagagcctactgcgctaggctggttttcctccggagccgtgaatgctgctaatcccaacctccgagcgtgtgcgcacaatccagtgttgctacgtcgtaacgcgtaagtcggaggcggaacagactactttcggtactccgtgtttccttattttgtttcaatattttatggtgacattgactgatatctgtgaatttgctcgctgcccctgaatattgccttatattacttaatagcatttcacgaaaacgacccagctttcaattgagcttattaactttgctgtatctttaaaccagatccacaagtcggtgtaca

SEQ ID NO: 2423 - DNA, 790 bp, unidentified
  source 1..790: mol_type = unassigned DNA; note = unclassified RNA viruses ShiM-2016 sequence
cagaataatagctacctgcaagtcattattgacttgcaggtagtattttatgtaattgtgcctatgtttatgcatggttctacggacctatgtttatgcatggtcaccaaacatttattattctgggagaaggatactcctccacattatgtggtaaaaaaccaaatcacggcgtttaaaggcctgaattgcttttagcccactccctttctatggagtgaccaaaacggcggtagggtagagattatatctccctagtccgcgtctttgctgaatattgattcagaaaggaatggcaattcattgtgatgaagttttaggacagactttaaaatgtcctcgtgtgttatgttatatgataagagcagtaccagattttctgctctacatttgctctatgatttttcataacatatcgtctttaagattgtactttattgattagtttttgctggtttagacctagctattaaggtgagtcgcccactctgcatacttacgagtatgtcgaagtaacgatagtctttttagtaaagttgcgcttcagatggatcgtgatcaccacctgatactgtctttttaacgaagctctgaaagtttaaatacttataaagcatgtgtttgttaaagagaccaccgtcctgctgttgttagttaaaaataaccaggttaccgaattcatatgaggaagtctttaagaagatatgggggttggtactcccgaacggataattagtacctgattagttaagaactcgtgttggtcgtgcgttaacggctgtgcccattg

SEQ ID NO: 2424 - DNA, 792 bp, Brevicoryne brassicae virus
  source 1..792: mol_type = genomic DNA
ttgaaaagatcgtgtagggtatttaccctacatgatctatcatattcttttcatgacgacatttgttcttgacatgcaccatatttgttctctttgaggattcttatggtatatgttacaggattcttgtcgtagtcgtttggatatgattattggcacgtcccgctgattgcgtaacaatcaacaatttagtctataagctttcttttcaaaatttaaataattaattcgctctaacaacattagaattcttctatttcaattatactttattaaccaaaaatatttagctttaagactagctttgtgagctttgcacacacgtcatttatgtattacactttagaaggtaccataaatggacaatttcggttgtcttggctgatacgataatcagtttctattctaaggcttcgggtgaagtgtctatcccgttgaaattaacaccgctggataagagtctttaaacttactatctgagattgtatttagtacaggcgatagttttatgtaatctaggctggagacagtacgattatataaatctagtttaaagaatttctgtttggtttgtgtatggcatattcagtgattatacgtaatcactgtctcgtttataatgtttaatatttttcggcaaacggaaggttgtagttactctgagagatttaataccgtatctaatagaatttagaactcatgatttgttctattagtccagcatattgctataccgtattattttgcctttagtagcgttttaaccaactgacttattagccgcatttacct

SEQ ID NO: 2425 - DNA, 792 bp, unidentified
  source 1..792: mol_type = unassigned DNA; note = unclassified RNA viruses ShiM-2016 sequence
atattgtacatattgtcctgggaagacgtaaaactcattccaaccccccggaactattcgtgggatgtgtaagtttaaaatagtcttgtagtattggttaccgttaatctgtaaatttttgtgttatttgtatttctttctggcttgctacttgttgacacttccctcgtgaagtacccgtatttacgggaggtttcgtcagccacacaaacactatgcaggaagtgcactgagcaatgcacttaccctaagttcataaaatagctttctaatataattaataataatgataataataataatgaaggaggtgccgcgtatgacatttccaaaatttcaaatgaaacaagtactcaaacaactaattttgttgatggagacagcccttggtcgtatgacattgttgcaacacctgatgagacaaccagactcgcaggtttcactgacgcacaattaggtgatttcctcagcagacctattaaaattaaagagtatcaatggactccgtcatcatcgttgtctgtcgcacgttttaatccgtgggctttgttttttgcaaatgctgatgttcttgataaaatcaatcgctatcgtaatttacgttgtaatcttcgtcttaaggtgttagtgaatggcaatagtttttactacggccgtgctttactttcttataatccttttgttacgaatgatgaagttacagtgaatcgaacatttattgaacaagatcttgttcaggcttctcaaaaaccccatttgcttttagatccgacttcttcgcaaggaggagaa

SEQ ID NO: 2426 - DNA, 793 bp, Dobrovirus bufonis
  source 1..793: mol_type = genomic DNA
ttctgaagaaaaccccgggaaaggaacaaccccgagtttttctccctttcgacagccgccacactgtctcatcagctgggataggggctctgtcgagccccccggcccccaggagagagaaaaactctgggcaagagattttgatctccttattgagaggaagatttttggaagattccgggagcgggaattgttcttccgggcgagaccgaccgtggcccatcctcggataggtcgggccctctcgggactgctgtcgccccggagactctcggagatggagatgcctcggcgcgggtggcctcggtccaggaggcgaaatcttccgtttcaagtcggaaccgatggagtcccccttgggtccttcgaaagctgaaagaagttggaaaaatcgggcatccggagaacctggaaatggactttgaggagagtgttgctaaggctttttacctgtcctgtttttcccgatttcccgcatgtggctcttccgcaaagaggggctccctgaccgttttgtccttcctcccctccgcgcctttcccagttttgctccgggaaagaatttgacagtttcttctccagatctctcgattcccttagggccaaactagcccccgggagcggcgcgttctcgtcggttccctccccccccattactaacaattaccgtctgagttcattgtccccaaatcctcaaacgggatcgcccccgggctgcagcgggagtctaaaaagccttttggcataatagttctccgctgagtcggaggcgcggtcccctatttttgaggaa

SEQ ID NO: 2427 - DNA, 795 bp, unidentified
  source 1..795: mol_type = unassigned DNA; note = unclassified RNA viruses ShiM-2016 sequence
taaagtctccatgcgcattatgcgcgtggagacttaaattgaattaattggcattaatatatgcccttgaaccttgtttacgagctatgaagggcattatgatgcccccatacctcgaaggaaagaagcaagctttagatcctttattgtaggatcttagtttgatttaagttatttattttattattctactggggggtggtcccctacaaaaaccacacactatatgtatatggaaaccaaaacgatggtagtagactctctgttggagttgaagtccatggccttaatggcaagagatatcgtggaatgccaccacgataaataaattaaataagcaacacgaaataattcgtgcattttatcggagtaacccgaagtgcgaaagtgctcgaaggtactcgtgtatatttgatatgtatccttgttcgggatgctgtctagtagccactgtcaagcctagcagtgtagtattataatatattacatcattgatagtatatacgagtataggcggagagcagttagtaacccttgtccgaagaggaaaggtaggtgcaagcagtattgtaagccttgttgcctgacacatagtctaaggaaaggtcggtctcgcccgttagaagtatcggattgtttagagtagttatatcagtagacgctcgttcaaaattgttaactgaattcttaatatttctatagcagaattaaaattgcaataggactcaaattagaacaaaagttattataaagaattaaaacgatatttttgaggtaaattgacaaagacagaag

SEQ ID NO: 2428 - DNA, 796 bp, unidentified
  source 1..796: mol_type = unassigned DNA; note = unclassified dsRNA viruses sequence
tggataaaaggccgacaccttttatcccttctatcaattctttttgatagttgttttctaagtcacatggtagcgaaccacaattcgttctttgacgttgttatgaactcatatcatttccataacgtaattcgatcaaaagtcttggtggtgtgtacttcctcacaccttgtcgtttattttgatgcactagcaacgacgtaaaatgcatcctattttacaatttcctttcacacgtggagttaaaccttcactttactctttttcaacgtgtgcctagcattgtatttgaaagctaagtaccctgtgtcatatgaatcacacatccttgtgatatttctagtggtcccaagctcgtttcagccgagtataagatgacagtccctgctgttaattgtgtcatctttagtcccttgcccccctatcttcgtttatttgaagatagataggatttggtttagccacagtgttctatacctagatagctgcgggacgtgattccccgttgggaagctatttctaaaacaatcacaaaaacaggtataaaattaaaaatcacaaaacaacttaaacatgcatggttataagcatgtgcgtgactgagtatgtcctaggttttgcctaagatggaccactacttcacgttgttataactatttgaatcatacactattcatctgtgcctcggaccggccttgtaggaccccgacccatcatgatttctatccgcaccaaacatgtcaagtcaggacctcaacgccaatcccccgttgtgccagtccattgattcatccct

SEQ ID NO: 2429 - DNA, 797 bp, unidentified
  source 1..797: mol_type = unassigned DNA; note = Dicistroviridae sp. isolate fcc172dic1 genomic sequence.1 sequence
cctgcaggtattacctgcaggaggtctgagatctggaattcgtcgatctgcgacgacaggctggttgtttactagctttgttgttgtttttgtgcgtggaaacacccgtttcatctttgtatgtatgtatattagttactatatgtttgtttgccggtgtcgttaaaccggccatgccccgcatatgcggggctagtttatgttgtaaatattgtatcctataataacgtatggtccctgttcggaccagtgtatgaaaaagtggactattttgggttggagcccaacatggaggaacttaccccagtagtttgaactggggacccggggtcggtttaacgagccggccccgtgagttctggattagcatggcgctgtccacataaatacgtacgacctttattttagaataataacctttgcggatgccttagggtgtacgcagtatacagacgacaggtcaacattgacgtttttggagttggtccgtgcctctgtgctgatcccgaagcacatgcgattaaagaacgacccgagatatggtatcatcatttgtagttgtacgaagcgtatgtatctgctattgtgtaaacatagtctggtaaagccatgatttatagcatggacaggccagtttgtggtactgaagcagtagatttgttagcatttcgttagtggattgcaagtgatggtagcgaagtccccaagaaattagatgttgtccgatatttgagcacgcgacttttgtcgcgagctcaagtcgtcagttgttactgacgaacttgagactcgcgttt

SEQ ID NO: 2430 - DNA, 798 bp, unidentified
  source 1..798: mol_type = unassigned DNA; note = unclassified RNA viruses ShiM-2016 sequence
cggacgttcacgtccgtatgagatatagtttagttggcagcttagcccgctgcccgggttttacctgtattttaggtactgtttaggtttgttcttgaatgggatcgcaggatacatggtagaaccatgattctgtcccatttttgaggaaacctttctgatactgttacgattgacttctatataaacgttttttaatgctctgaggagtaaaccttataagaaatctagggagtccaccctacgacaaaacaaaccccaatgctcatgagggcctgcgcatgtcgcttttattgtgtagaccttccgtacgtcgatgagggaagtttaggccttgagcaagcctttagaacttcttaccttactttcgagtgaggtggcccacagtggtgtggacgttcttgattggaaatgatcatattaggtcatagtagtgaattatgatgatgttatgcataattcgaacttattgaaactttgatatggtaatgtcggtttaaatacgcaaaagtgtgtgagactagagtactcgactttgctaccgaatggccctgttattggaaatgatatttgtatcgatggcgtattctgattctgcaggattcttacttatgagatgtgtgagttttatccggtcataagcctaattatcatagtgttggatgtggtgagggttaatagcccaccagcttctatgcaaaagaacttagctggcccaacacgccagacgcctagccttcgggagggaattttatcgttactaaaaaccaaacacagagcggggagagcttgctgaca

SEQ ID NO: 2431 - DNA, 799 bp, unidentified
  source 1..799: mol_type = unassigned DNA; note = unclassified RNA viruses ShiM-2016 sequence
gacatgtcactccagaattcgctgcccccgggtcggtcagggggtggcatatggccgtggagaaggccttggtcgaggagtgtcggccatgcatgtgtggggggccggttgcccaccggtcgagatgggggccctcgagacattgccgactcggggataggcgagctcaccgctgaaacccttggcttattctttcgtgcgggcgtggtgtgacgtcccgtcaaaagcctgctggagtatcggcactcctgaggtgcaagccagtacgcgctgtgcttcgaggtgggcacagttcctttgccagggacgaaggcgtaccaacgtcactcaccgtgccatccagagcaccaaccatttgtggcacgggcgtgtgagtcaggataccacatctgtgggacacccctggtgttgtgtggaaatcggaccgcgacggagcacgccacgtcgcaacgggcaccgtgggaagcacatattggggaggcagagtgacggggaatggactacggcaccgctgcgccgcggaggcgcctgccctcgccattttggcagacggcagatacaccccacaattttgatcgattttccgcgcacacccgcgtgtcggtgcgaccgactgccaattttgggactgtatgaagcgcgtctgttctcgcgcgtccgtgcctatagcggacatcacggtccacaagagacaagtgatcccacaccgactgaccgagctccggcagccgccgggggaggttttgcacgaaggagttgagacgttcggggtctggagagagtggtaccgtcgtgtgcc

SEQ ID NO: 2432 - DNA, 800 bp, unidentified
  source 1..800: mol_type = unassigned DNA; note = unclassified RNA viruses ShiM-2016 sequence
tgcaactgtgctttgcagcacagttgtattacttacggataatgtaattcggtatattttatcgattatgttgttgttaacagtttatgacactctaaatgagtcttacatactggcgcctaccgcggcttcagtatgtaatcaagaagaaagttccatcgactgtctaacgacagtcgtggtttctctctttatttgtattataaattgctaatatcacaattatattattccgtatattactgtgtatttctgtatcatgtgtaatatgttttctaatcacaggatgcttggtcaaggacttaaaagctcccgatagggcaccatgggagaactgattattaattcagtatcttaaacagcagtattgtctaaccacgactagcctgcgtctattttctcttttagttaaaataggacaagcctatcaccttgcgtttttgttaacgcccactagttccgattaaccaagtggttaaacttagaagttaatcaattaagagatgcattggagtcctctgctccattactctataaaaacctaccccaaagagtagaacttgagggatgatatgattatagcctaactaactggcaccataagtgaaaacgttagtccccacacatgcccggtcgtctcttgtgacggacggggaatcgtagggtcatgatcctcacgacttgaaagagcttgctcttagcaaaggatatacatcacggagatctaaggatcaatgaagtgattaaaacgtggcccgccgtattgaacatacaaacccattaatttcgggtttagttca

SEQ ID NO: 2433 - DNA, 800 bp, unidentified
  source 1..800: mol_type = unassigned DNA; note = unclassified RNA viruses ShiM-2016 sequence
gtgctgcagcgcgtaagcgctgtagcactccataggtatttggacctcaaccggtccaggtatcactctacatattatatgtgggcgtttcgacgccctgctgtatttttagagcgttaggtcgctctgcaatattgcgggcgtcaagcccgtagcattgtagaagcacagtaagattttggaactcttttaaccaggtatcgatggtgttaaaccagccatcaccccctttttgtcctgagctggacgctaaacatgctcgattgtcctatagtaagacattaaactgctttttgtccatgagtaagacataaaatcgctcaatagtcctagatatgacataaaactttctgttgtggctttaggaaccacacactagacttaaaattctgtattgaagaaatgttcggatgtagagatttaagcaacctctctgcaatacgcaatatgtaagacgtatatgtcgattgttgtgcaccctctatgatcgttccacagaattaccgagccccgtcgtgtagcgagcacctcggcggatgattagttaagccatgtcgaatatgtaccgaagcgatcctgcgtttttaataaacaatgatcttcggagccaattacatgacatgcccaggctactatctgcgacgctgttaggtacgagtgtaagaaaaatttcttatacgttgaattttgatgttcgagtgccatttaaggctatcattataggttattcctatgtacttgatgctagccaaatttaaaacctatatggtcagttgtgaactgtgaatcactcggcttgg

SEQ ID NO: 2434 - DNA, 801 bp, unidentified
  source 1..801: mol_type = unassigned DNA; note = unclassified Mitovirus sequence
ggggtagactcctaagataggagcctatctcggccaaagacgaggccgatgatgatcagattcatcatatgaagatgacatcaccacaacgcgaggttgcggttaggaatgtcccttgattagtaaccaaggcacaaccctttgcataaggaagtagacgttgggttgaaatacctaagatccataagatttgaagagataacatcaatatcaaaccatatgggttatagtatgtcgaccttctattctatctggtgtcgaatcagattagaaagacaggacgaaccgtactagacggcccttatttgcttttgcgatccgcagaaggaacctttggaggttcttccggggtggaatatataattccggagatcaatgactttcgtcattccaaagattaagtgttgagtgctctgatcggctgtatgaaaattacagtccttcatcctagcacttctttaatggggtgacaattttacaaagttattgtgaaccagaattggtattccaataagcatatactcatacgcttattgttaatcacgatattgtatatgtggaaggataatccaacaggtaaccttaatggtacctgtgaggcaactctgctattaatacgcagagtagaggtaagtaattcacctcacccttacaggaggtctaccagactctcctagagtagctgcagccccttggacctaatgtgaaaacattgggtccttaactaatcccgttaaacggagaagagggaaactgacttttacatgacctagttaacgatacaacctttaatcacaaaat

SEQ ID NO: 2435 - DNA, 801 bp, unidentified
  source 1..801: mol_type = unassigned DNA; note = unclassified Picornavirales sequence
cagtgtgtatgccatccctcatagcatgcctatgactgatggattcacaaccctttcataacccctcccctaattcccaccttgcaaccatacgctttactccgcttcgggttttgcggcccgatgtcgtgaagaaacggttacgcaaacttagtggcgaacggggcctgccaccataagtggccccattagaagaatgtacgatccgcccagtaggcggccaccatccaggtggtttacgggcaagcacttctgtttccccggtgacgttacataggatgtccccacgtctgaaagtgactgatccgttacccgcctcaccactgcgagacggttagtacgatgtaatagctgatcaccgttgatccgggcgttttccccccgcccagaaacatgtgatgaggagcggcatccctcctatggcaacatagggcctctcctgcgttggcacgtgggctccttgagcacggtgtgatgtgaaagtcatccgaagaccttattgcgctggtgttgagtcctccgcccccctgaatgcggctaatcctaactccggatcatccgccggcaagcccgccggtagggtgtcgtaacgcgtaagtctggagcggaaccgactactttgggtgtggcgtgtttccttatttgtttggttgattgcatatggtgacaattcgttgtattgacgtttgccacttcccctgcaaatattaccaaaccaggtgctgtttttgtgctaactcctgccttactattaccaagaaattttcagagtcacttattccctcggttgtttggagcata

SEQ ID NO: 2436 - DNA, 801 bp, unidentified
  source 1..801: mol_type = unassigned DNA; note = unclassified RNA viruses ShiM-2016 sequence
cgagggggtagtattaactaccccctcggtatatgaagtcatagacgagacttcttaatttacacttagtctattctttggtcgtatggtatctacgggaccatgcctcacgacgtccaatgtcaataagtggcgctgacacgctagtccgctataagcgggtcactggccatgagatgaaaagcctattctgaatatgattatttgtaagttatttacattcgcgaaccccataatttgagatacagtatgttcgcttcggagcatcctggagcattaacggttaacagttaccggctcgaaattgcacaacaacatcgtgcatcttgaccatttactttacgccaatgatggagtaaccatttcaccgacaagctagtactcttgtacgaaacactaggattgaaatgttcgaaactgattttagtattgtaggtcaccactttttactcttacgagagaggacgtagctttcccacaagcacgtaatagtgatgaaaattcaccattaagggagcagtaagcgctgtctgaacaaatgctgcgtatgtgcacacgcaatagaagaatgcacccttttaccttgccggtgctctcgcgagcatcgggttcaagtccttcacgaatttccgttgattatgacgattgtcccagattttctggttgtacgataagagtcaactgataataggaagtagtgaacttaattgtttgcaatgtcccttggaggcgcccagacatcaccaaagccatcttttggctttggcgttatttgggcagaacctggttaccgaaactatc

SEQ ID NO: 2437 - DNA, 801 bp, unidentified
  source 1..801: mol_type = unassigned DNA; note = unclassified RNA viruses ShiM-2016 sequence
cttctttagattagtagtaaatatttgtttctgttcattggaaaactatcagtaatataattattgttgttatgactgatgtgcccaatttttggaacggtaacgactgcgtagcatcccccaatgtaggactacgtagacgcttagtcggtaattgtagctattgatagttacatttcgtgacaggttgaatgaatattaaaaataatcatagtacaccaatttgatgtaggccaacccgttgtttgtatatgcatgtttcatatttgcgtttatatacatttgacaaacagtttttcgtaaaaagggctttactgttgtgaataaagctcgcgccgttttgatgtggtaagttaggccgcaccgttgggcgcacgagatttgaagaaaaaacaaaataaaaagaaaataatgccaaagaaaaaggtagcagaactaccatgtatgtttaaaagtgctggcagcaaaccttgaatgcaatgttggagcatggtatgagtacactgactcgtattgatataagaggttttctctgcatagtcactgcaagttatacggttcacactagtatcatatgttacaaatgcgtttgttgagtagttgtttagtttttaatgcgttatgcaccctaggtaattagtcaagtagtatgagtgatcatgtgcgttgtttttatgttacgtccagggtaaaagtcccaggaacagtttaccgctcctgtagagcgggtagccgagctccgggcgataaacgcagcacgcaaagaccagagtgaacacagttaagtaataagtaagtaat

SEQ ID NO: 2438 - DNA, 803 bp, unidentified
  source 1..803: mol_type = unassigned DNA; note = unclassified Partitiviridae sequence
ggctcgtcccaagtcgagcttgcaattgctaattcattcctcttttcccctctccaccctcaagctctaaagcaattatagcaaccatgcagttcgagccgccgatcaagccagccgacatgaccattaagatcactgatggagacaatagcaaccaaagcatcgattcgaatggcatcgtgattggccgctggaagaccggtctctttggtttcaccgattcgatagtgcccaatggcgtcatgtcttgttgctgtcccggtcttgtggtagctcagatatcggctcgtcttggctttatgccattttattacgtgctcagtatctttggagggctttatctagtagcacttattgcggtgacaacccacagtcgctttttcgactttattatatggttgtgcgttgtaatatcggccctctccatgatgcgtttgcgctggcgtattcgatcacttttcagtattcctggatctcatgctgaggacgccgccttcagtttttgctgtggatgctgctcgatcgcacagatggcctcgcatgttgaatcgtatgagccgggcactttttcatttgccccacgcgccacacttcaaggctactcactgaattaaggctttattataaaatagaccatcactatttgcctggaggaagatgggtacgcaagggtacagatataatctctaatactatttacataggcgatttccattcgaaactgaactccgtaactcaatctttgctatactgtcgcaaatttttcagctcttcctacgcttttttcgtaacctctacccact

SEQ ID NO: 2439 - DNA, 803 bp, Human orthorubulavirus 4
  source 1..803: mol_type = genomic DNA
tgcaatcaaagcattagaggtgaggttagacaggatcgaagggaaagttgacaaaattatgctcacccaaaatacaattcagcaaacaaaaaatgacactcaacaaattaaaggctcacttgcaacaattgagggcctaatcacaacaatgaaaataatggaccctggagtcccatcaaaagtaagtcttagaagcttaaacaaagagccagagcaagttccaataatcgtcactggtactggcgatgtctcaaaatttgttgatcaagacaatacaataacacttgatccgttagcaagacccattttgtccggaaccaagcaaacaactgatgaaaggagagcaggtgttcgtatagatgcacttaaaataacagtatcagaaatgattcgagatctatttggagactgtgataagagcagaaaacttcttgaatcaataaacatggcaaccacagagcaagaaatcaacctgatcaaaactaatgctcttagaagcatcacttaaactatgagatctatgaaccacggaggtcacagtgacccaaattcactcaatacgccaagcaatcaaccccacactcagaagggacaactgcaccgcatccctaagaatcgacaccaactcaagcgacggcgacatcaatcatcacaaaacaaaatacagaacatcagcactgcatacaaaatcaccccccggcacacataattcatcgaccgacagattccctccatgacattacaaagtatttaagaaaaaaaccaaaagtaaggggggacccatcatccaatcgactgtggcc

SEQ ID NO: 2440 - DNA, 804 bp, unidentified
  source 1..804: mol_type = unassigned DNA; note = Weivirus-like virus sp. isolate cra070shi3 genomic sequence.1 sequence
aaatcccctccattagggccggtcatctgcaaccggtagagttattttgtttatcttaggaaaacgtggcatctcaacaccaaaaacctgtaaaaaagggctgtttaactcgcattactgctaaagtacggtaaagctaaccggtaaaaagacccgggggtggaaatcccccgggctctttttaccggttagctttaccgtactttagcagtaatgcgagttaaacagcccttttttacaggtttttggtgttgagatgccacgttttcctaagataaacaaaataactctaccggttgcagatgaccggccctaatggaggggatttctgcctcaaagtttcacatactaagttgtgagtgtcacgcactttacgcgtttttagaattagattagatatccgacttactacatcaggacattaggtcttttcacattttccgttcgtctgataatgaccgctgttggttaatattttgatgggtttaacccactaactccaaccaggcattatttttcgttcacattttccattaaaactaagaatgaccacgtttggatacgctgtctgctttgaggtttttgcttacattgaaatagagcgcggctctaattactcattgaagcaaaggctagcttagtgacactggggccacacttcttgtgttatcgcttagtaacgcgctacggcgtcttcccccactatcgcaatatgtgcgggatttagtcaggggcagtgcctgacactttattgcgtttttctatattttgccgttttggacggccccacagctggtaacacct

SEQ ID NO: 2441 - DNA, 806 bp, unidentified
  source 1..806: mol_type = unassigned DNA; note = unclassified Riboviria sequence
taaggcataataaccgaagttacccttaaaaccaacattgaaaacaatattctacctaaaagtcgtgtgtacatatatatatgtacacacgacttttaggtagaatattgttttcaatgttggttttaagggtaacttcggttattatgccttacggtcttcattgttaatggttttcgcggctcgcagtccctaattgttgaattgttcttactgatacgttgtcttcattgttgatggtaagtagagtggtttttcagaagatagctctattattactgttttcaatgttgatggccttcgtttggactttctttattaatgacggtaatcaaagattacacccaattttagaattaaacttttaagtagggtatgctgattttatcctctctcttaattgattttgatatctggtaattgatctcgaaagaagatgcgtcttctggatttgtaatagctgggccttaagatcgtaggtgttattacatggggaaacacattactttggttgatgatgatatttcgatgatgattcatgatgcatgtgcttgtattaagcctgatacaagaacttactaatttgcatagtgcaaagggttagcatatgatttctctgatgtggattttgacactgcctttgattaggatgtgtggatgatcttgaagcatcattggatgtttatgcgagcgtgttgtttaccaatttcaggatatgtggaagcggttgtgtatgatctatacgcacatttagttcccagagggcgttgtcgtctccccctaagcaagggagaaacacgtggcac

SEQ ID NO: 2442 - DNA, 806 bp, unidentified
  source 1..806: mol_type = unassigned DNA; note = unclassified RNA viruses ShiM-2016 sequence
cccgccgcccttcaggcgacgagtggaggtcacaagccctcataaactgtggagtgtaagacacatgccctttaaaggcatgaagattcttgcttattttagcagatgaatcatactagcttgctttacaatattagcaatcgagccagaccacgaggattgaacttcaattgaaaatgaaggacggtccgaatgccctcactttatagagaagtgtgccctcactttatagagcagtagcgttttccctcactctataaagcagatccatattataattgttgccctcacttgattgaatatttcaagccagcgaagcaagttggtgtggtcccggcgtgttaggtgagccgtttaagacatctaacaaatatttagtttctttcttttctcgaactaaattctttacttcaatcgctgaaacttgtatgtgacttaacttaggccagcatattttgtgtaagcgcagtgatagtctgactctatccgaggaatcactacctcgttaaataaatgtggcccggccagggttatccaagcctgagacttcgaaactctcaggtggcatacttcaagcggagcgtaagacctaaccaccgttggctagtggcgcagtatgagcgaattaatggattgtagcaaagtagctttgaataactcctacgatcagcacgcaaccgggttttcgtgccccggcattatgcaactcatattaacggctagcaaagtctatgtccttgtgtggacatgtgtgtgtgggcccttaaccgggttatttgattaggctatattcgcgaccatatatt

SEQ ID NO: 2443 - DNA, 807 bp, unidentified
  source 1..807: mol_type = unassigned DNA; note = unclassified Sopolycivirus sequence
tacacaacaatcaatgaatttacccccacgtgatgtagttgtgcctaacgttcctgaaacacaaactaatatgggaaccttagaacacactggattacctattgaacctatttggcaaattacggatatacctccggattttaaatggatgactgaacaatggaaatttcacacaacttttgaagtaaaagatacacaacttcctggagatgttatttatacaacacgcgttgttcaatctgatgcaagtaaggattctaatttaacattggcacaatggcatgatattccattcgcttgttctaagtggtggaatggaaaaatttcttatcgttttacgatagttaaaccccctcgtgttgttggaaaattattaattcgatatcgtcaagattgtttcgataaatggaatgctgttgatgctcctagctctggttgggacatcaaggattcgaaaatgcgctcaattttgaaagaatgggacttaggacaatcatcacagtttgaatttgatattacaggctcaaacccaattcgtgcccgacccacccatctttatgaaaataaaccgcaaatagatggaactagtttaagtttaaacgatgttgctgaattccgaacaccttatatcctgtttgaaatgggacgtatcagcatagaagttgctcaaaccatatcacctggtggaatttttccgagcaattatatagttatagttgagaagtgtttgaaggatagtgagtttatgaccccaacggacccccgaactgatcataaattgactttatataattctattactgaatc

SEQ ID NO: 2444 - DNA, 807 bp, unidentified
  source 1..807: mol_type = unassigned DNA; note = unclassified RNA viruses ShiM-2016 sequence
ctccacgtgcgcgatttgcgcacgtggagttatagtgtagttggcgatcttcttcgcccgatttaagtgttaaggtagtgctattaagcgttacgacgctttctagttctgcacttaatacttttttttgttttacatctttatcatacccgttccctgggatagtgggaccccctctgtcatgaggtaagacattaactgagattagacaggtctgtgaagtatgtcaaacgtatatatagtaataccgatttcttatgcctctataggaagatgaagtatttaactggtggtgtgtacttgtttttaacaagcgcgtcctttatggattcacactttatcacctaggaataggtgacaccaagttactcgtaagagagactatcttgtaatcggtcatgaattgataattcagactcgattgtaaactgatctttattgatcactctagcgcctacttggcgtattttgaaagagtaaggagttcgagacgtgccctactagcatgggccgacgtaatggtcaagcgaaactcgatttatctcattagttccggtgagacttcagaatcacatatcttgagattggcactcgatgatagattgtgagctacttgacaaatataatatttaggacactttaactagcatttagcaatagttttatcgcaatgtttagggtattcagaaaccttggtatttataccgtaagacgatttatgagttatttcgcgaattttagtgtgagtgtgatgtggattatttttgcattcgagggactaccatccttttattttttgaacacagc

SEQ ID NO: 2445 - DNA, 810 bp, unidentified
  source 1..810: mol_type = unassigned DNA; note = unclassified RNA viruses ShiM-2016 sequence
gcatggggacgatatccccatgcgatcggcctgtgttaatcagactctgttatacctagtgtcttatttggcttccagtaagacacaatttggtatcagacaataattaacaaaacaaattaattttaaggtataattttaagtaacttagttcaaagggctattaaacccctgattagtaacaaaattataaaatactcggttctgaccggggtaattcttttaacaataatatatgataattttatcgaagataacagttagcacctaccagatggcgctgttgcgtagagtataacccccaactctacttcccaactttgataatttttaattatatttttggagaattatgtataaaaattgaggaaacccctcaggtttaactacgacggcgaattaagatgagcgaaagtaaagtgcttaccaaggaggcgtaataatagggacccctctaaccagcaaacactggacgttacttaaggtaagaattacattttattagtagccggcttatagtaggcgtttaaggttaagcgacaaccctagtggtttacagtattctagcctatgtgctaatcctcgacggcagtagatcgctggcgatcgggaatatacctggatgtgaattaagtaaatctataggtatggatactcttctgaccctccagttttacactgtactaatcagctgaggaagagcagattatttcctttttttttcttcttatggtgacaattttatgatttatttataaagttgttatttaatttgaattttattgtattgacttatatattttatttaaa

SEQ ID NO: 2446 - DNA, 811 bp, unidentified
  source 1..811: mol_type = unassigned DNA; note = unclassified RNA viruses ShiM-2016 sequence
tatgcaacttcctattgaagttgcatcgagtgttgctgtagttatttgtgagctacgcattaaatttgactattcactaccaaagtagacgtcaatgtccctattggacttggctatctgctttatgttgtattttgaagcatctttgtgttgctcttctgagtagcatgaagtgttttcacctttatatttagttttttgcaatcttttgattgtcaaaccactaccctagtaaaattacatcggtaattcgtctttatgtttgtgggtctcaccacccactacttgtatattatatatgtttgatcggcattggttataaaaatttttgtatttttaattaattatttgtttaaaaactgtcaatgtcttaaactagtctttgtttctcatcttcggtgaaagttgttgcactttgtgctgacgacttttattatgcgaagtaggttgtatctgcctgagtgaggtacgtattcaaagattaagactgttcgaatcctgtagcgttccgtgattggtcttgagccatgagccgtccgcgtaacaaggtaaacagtaaacaaaaactgtaatagacttattatttaacactatcgcagtactgctctgatcaagcagttgattggtttcgcaagccatgacaaaagggtcatctatgatacagaaaatagacgttaagcaaggtccgaaataccaagggtcccgcttcaaccgatgaagccctggaaacaattattctctctgctgtttgaagtgcttaacaaattctcagtcattctccactgagtcttcttaattcacttccataatc

SEQ ID NO: 2447 - DNA, 812 bp, unidentified
  source 1..812: mol_type = unassigned DNA; note = unclassified Riboviria sequence
gacataaacgctaaaggcaagataggataagtggaaagtcacttctgacgccataaaaacatgcagtccctggaatccactatgacagttaaagaggctggagagctgttaaaccttatgctcacgcatcatggccaatctcggagggatatcctcattctgttcgctgactttttcatgaagatgtcaacggttgtagcagaaaggtcgtcaagtgcatggtctgagcggatgtcacgagcagcagcttgtttcaattctgtaaacggttctatgagaagtgaggaattcagtaaggagcgccttcaactttccactgcaatcatagcacttagtagcgcaacagatgccactccgacgctcgatttcttccggttgaacacaccagagatcctgatagaggttcaatctttccgctcaatgcaccaggttgatcaattgtccatccaactctctatgaggtctgtatttatgttctggcttgcattcgaccaactcaggattatcgaagagtcgcgctctatagtggaagatgcactggcaatgagcttgagtaaatttgtcgaagagaatgcagtagtagcaaggtggttttcattgatgatgacagagaagttcgatgcttccatatgtacctccgtactcgatgatactgtcatggtgatttccagatgattctgcgagttttcctttgtcgtccgagattcatttccatatgatcttaaaaaaactaagagaatgaatcatcacgattttatcattataagtttaagaacaatcactctcagcgaactacagattactacagaatc

SEQ ID NO: 2448 - DNA, 813 bp, unidentified
  source 1..813: mol_type = unassigned DNA; note = unclassified RNA viruses ShiM-2016 sequence
gggtgaggggaattcggggcgtatgccgcgccacagtggcgtaattggcagcccctgcattaggcccaacagaaaaacctaaagagggccgcattttttccgggcaccgtgggcccggtgaaggggagcggcagggggacaatacctgtcgtgagatgaccgcctcgcatgtaacgggagtttaccgtctcacttggagttgtgcgagttgtaccgcgtcccaacgggagtgtcagccttgttcttccagccctagccggtccgcagccggtgggtcagagcctgagtggggtcctactccgcccctgaggtgtggccttgcacgaccgtggatatgggtcccacgtgggtttcgccagcccttaagtcgtgtatcccgagtcccccattgggaatggcccctccagagcgtgtacattttgagcgctcgtacgaggaacgtcgaagctggttgcaggcgcgaaatcgcctgcagttggttaggggaccagtgatgatgtctacggaaccgggggcggcggccgaaaccgccgcggatgacgcaggagaagcaacgtacccgatctgaccgagcttgagccggcgatggaaggacgggcaacctgctgtgtgagggtgcatcgcgtaataccgaccttgtcgggcccatcctccagtcatccacccatgtacagtctgcgggcgtctggtgtgcgaacccccggcccggtccgggcacaccagacgcatgtatagggccgttttggccatggctcaggcgatccccgcctgagacggttgttttgtttgttttcttttttttgtttggacgtg

SEQ ID NO: 2449 - DNA, 815 bp, unidentified
  source 1..815: mol_type = unassigned DNA; note = unclassified Picornavirales sequence
tcccgcgcacgcgaaagcgtgtgcggagttgttgttgtagttggcgtttatacgcccatcatgagttcaaagtaccttctttgctgcgttacgacgcagccccgaagttcttttaacttttgttgtttacgatatttatcagacccgttccctgggatagtgggacccctgtcatgaggataatcattactgacgttagacagacgtatgaagtatgataaattgtaataagtaactatgaaagagtttattcctcaaactcttaatgattagtttactaaattggtgtgtaccttcctttacggaaggcgcgtccattatgtttttaacatttatggattcacattttttagtctagtaatagactacgatttagttcaggtaagactgacttttctggaatcggttatggattgataatcctgacttgttttcaaatgatcttgattgatctctcttatgcctattaggcgtttatttaaagagtaagacgttgaattatgtacccttctagcatgggtagacttaattgtcacacattgttcattaagactgttaattccggcagtcagtaagaattcagtgttctgagggttggcacccgatgatgacactgttgctactttaatttaaacaaattttaggacatacatttaatttcacaataaattattgtcgcgaagtttggagtattcaaaaactctgtagttcgctacgtaagacgactttatgttttgtgtattgattttgtatgagagagctatttcttgtattatttgaaatcgagaaaccactccttttatcttggatacagc

SEQ ID NO: 2450 - DNA, 816 bp, unidentified
  source 1..816: mol_type = unassigned DNA; note = unclassified Iflavirus sequence
aatccctccatacatcttaccctacaagggtcgtaaatctgttcaaagttaatttcaagcagagaacagtagatattttatttaattttaagacatactttagttcacgaggctatctatttattagaaccctctattagtaacaaaacattaaaatactcgtttcagaacggggcttcattttgaagtgaataaaatatttagataacttagtaagtacctgaacgaattataaatagtaaaagaacgagttcgttaggattgaatcgtaaattttaaataattcaattactatatgcttatgccaggtatagttctttctatatatttgacttattatatattatagtgtactagtctacataaatccattgtagatgatgaatatggcaagttggaaccagattactcatattcttgtggcgtagagtgctctccaaagctctacggtcccctataattataataatgatagtatatagaggagaatagtatcgtttctcttttgaatgagtataagtacgtaactttagtattcgaactttataaggatctcgtgggaacgctagactgcgacttaagtgaatagcctttaatcacttagtacaatttgtttcagtataaacatgtaggccggcttgctacgtccgcagaggagtcgttaactatttatcattttggtaacttagtcctcagacggtgacggatggaaagacatcgattccttttatatgcagacaacaattattgatttgattttatttccttgtttgatatacacttgttttatttccctttataatcaattttgttaat

SEQ ID NO: 2451 - DNA, 817 bp, unidentified
  source 1..817: mol_type = unassigned DNA; note = unclassified environmental samples sequence
tagtgtgacgcctatacagcgtcacagatcttcctaccgaaggttggtgggttactatgcggagtcgcctgtcgagggccatccacaggagtgggcaaccctcgggagatgaaccggtgaccctttatcgctccgcttgggtcccggccctacctattttctcgttcacctggcgaggaagtaggggggtgggcgtatgcctgccgtacgagtaattgtacggcgtgatttcggtggggtacttagccttcctgctaggttcctcaccagaatttccccactagatctatccaatagttgtgggcagggtctatttttgcccagtgtatatggaaacactggagtctcttatagggtctgctcatgagagcactaactaagtcgatagcttactgatagtgagtaagtactccttatataacaccttatatgaccactcctgcgaaatgcaggggtacctgaagtcttacagcgccgagacaatgagattctcggtggccaaaacgtcggtttggtatgaccagggcgtgctaagtgatctggcgctcgtttaggcggcggttccatatgaaccccaccggctaaacttgcttccttcattggataagatctaaatgccgagagactgcaacggccacaatgttgtaggggaacagtccctccttacgttagggtaagggggcagttggtgccttcactgttataccgaaagatttatgacaagcgatttccaagtgattttttagattgagaaccgagcgagcaaatttgaaagccagcgttaagttgagaaaactattcgagcctattgggcgtt

SEQ ID NO: 2452 - DNA, 817 bp, unidentified
  source 1..817: mol_type = unassigned DNA; note = unclassified RNA viruses ShiM-2016 sequence
cacgtgattcccggaatttttatcggcgttaacgcatattattacatttattagtacgtataatagcaatattgtattgtattagttagtgtagtatgtgtgttggtgtctggaatcgttactaagaaattagtagtttataagcagaaatgcttattctcaatttttatgtaggtaatagggaaaccgtcaaatgcagtcgtagggaataaataacttacaactgatacctacattaggattcaacgacgattacatagttgtgattttcgttgtcttaggaaatccggaaagtatttacataatataagtacacgtagttatcttgaagggtacccctcgtccgtaaggaagtcagttgtttccccttctgactagagccggtagctgactaagcccgatacgccttaactgtgttagtttaggacctttggctgcttagagtaacgtgctctcccaatggataggaactgcttttacaaattatacatattgagctataatgatttagctactcatttgtcgtgggtgtatgtataaggcgtaatttctaactcctatttggaacatggctagtttcgccgctagtggtgttgtcgtaaggccacagaggtaatgaaagtatttataagaactaaattaacggaacggattcaaatggattggaacatggactcaatatgaagataataatccaataccctcataggcagagtgaaataagagatagttatccattcaccgtctatttgtcgtagacacctatgtaacattggtgattattactcatggagagatatacgggcaacccccaaat

SEQ ID NO: 2453 - DNA, 818 bp, unidentified
  source 1..818: mol_type = unassigned DNA; note = unclassified RNA viruses ShiM-2016 sequence
gagcttccagtctatagtaagtccgcattgaacggccttatgataagtcttctgaagagttttgacttcaatgagtcgatgtttgagcgaatgctcacatccattttgtgatcacttttgtgatatttgttttaaataaatttaataaataaataaaaatgatatatgttaatatttgagcttggtaaagctacaatattgaaaatacgtttgagcgccaatatattgggtttgagcccttggccgggtgtcgtgattaataatcccatgccccaattgttgttgtttagcgtatttgataattgtaggatagagaccatacagcgctatacttgctgtaaagattatatactacagaagttcgtaaatgtgcttattgtaggagctctggaatatggtgcgcgttaaataggcgcaagtttcactggctttgtttagggtatttacctgacttgatgtatataattgtttatcaacggatgatatggaaaaggtgacgttctcacttttagatcgcagtcatcatagcactcctggaggaggctatagtatatcgcgaagacgtcattttgatatttgacggttaaggcgtaaagaatccaccctgttatagaatagatacgagtcgcacgtcgcgccagtagtgattctatattaaatgtgatcacctccttatttctcttggaggtttctagttcgagactacaggcattcagccaaccccccactttccaggaaacaatagagatttatatatttattattattattataatattcttcattcattcatttctctattgttcctattttatatc

SEQ ID NO: 2454 - DNA, 819 bp, unidentified
  source 1..819: mol_type = unassigned DNA; note = unclassified Iflaviridae sequence
ccccttttcatcttcacaataatatctattatgaatctacactactagttggattttcattgccttacagaatacgtatagtgtattgctggactagatggtgtatgttgatatagaattattttgaagtaaagccccaaacaaagcaaccccgctctcttttagttcttaagtttaattattaatttattttaagttccctcccctattccaatatccctattatcctttagtttaaacaagttgataggcctgggaaccctggagactttgagaaaaacccataatgatttagcaatttcacatggaactgattgagtgactaagtgcctaaatgtaggttgagtttcgacaaaaagcctttacttagttagacaacactccgatgttaatctcggaatttcttgtgacggtttctatatttgttcctgatagtcagacgtatagattctaatgtacaagaccgaagacttaactacgtttagtggtagtatattatacacggtgtatgaacgatttattcaagtaaaagccgtgagttatataatatatatatcagattgttgagcttgatagcgtgcgaaacgtgcagtgattgtgattttggtttatcttgaaaagtatcatagaaaaatattaattattaatgtgctatggatagatgcgctacgccccaaatccttcagagctatcccacgactggcatcgtgtaattaaatgtggtaagttaatatgagatgactcactgtgtgcccggttgctttgctagtttgttcaccgtaaggaagaaactagttttacaaaccttccaattctttt

SEQ ID NO: 2455 - DNA, 820 bp, unidentified
  source 1..820: mol_type = unassigned DNA; note = unclassified Riboviria sequence
tcattaccttgttgtttattatgataagctagagtcggcctctttcatagtgacttgttttgacgtagttccccgtatcgtagcattgctgatacgttcagttttcgacctaggcatctttaatgtagttcggttgtagattcagataaatgcacaacaaaatggttgtaaacaaccagaaaggaactctttgtttaattttcttaaactttgctaaagttttagttattctttgaccctggctcgttattatttcgcattactagaaagagaaatatgcgtgagccataaagttaatttattaactatgctttagaccaccttcttctgtaacaatatcgcagaagatagtcccgtaaatgatgattcactgaaagggcagtggtaacaccaccgtcggaatgaaccttttaacaggggattgacccgagtccttgacaacccaccatttgtagttgatactatatcctacaccatgctttatgggagcaccatccacggttcattagtagttcgcgaaattgaagaattaaacctgttatgaaaggatttagtaggacacgacctgtcttgatgtcattcgagtaggagccgttaacaatccgaaaggtctaagtaatgcagcttaattccataggtttctgcgggattgtcatttcgcctttctcatctccttagggaccagtatgctggtccctttggagccctttcatagtgcgctgattgctagtaacaatcagtgtactaagtttgggattctttcgatttaattctttagaggaatcccctcgcccaactttttatcatacagtacaacatc

SEQ ID NO: 2456 - DNA, 821 bp, unidentified
  source 1..821: mol_type = unassigned DNA; note = unclassified Torovirus sequence
acgtatctttagaagtttatgaagccttgaaataaaaagctataaaccttattacggttagtccaccacacggctaaattttcagtgcgcagtcactagtcagggaggttcagccctgtcttttacttctgtgtaggaatctgtacagatatattgtctgcatactagtagttacaagagagtgcatttagtacttacaagcgggtcaaaccgccctccggaaaggtgcactttccctcccgaacgtgtgtagaccgtgaccattgtgtctagctatctgtaacaaactatacggttgtattttactcaactttaaggcttttataaaacttgcaagtgccaattttggcatttgttctttagccttttaaacctcacctccctacgggcaggcgcttaagcgactaaacgaggtatagccaattagttgttactcccctccagctttgctgcaggcccttagtttgggactaaagtgagtaaacatactttttggattacatctttctaaactactgccaaactgttgttttatatatttaagttttgcggttttacgctatttacttacggttggcagtttgtttggttgtttgcacaattttttgttataccaatttttactgtgtttttactttttacagttaaggctattttttatcttcttaggcttgttgaattaagtttttccactttaataatttggcttatagaggttttaagaaaaaggaaacaacaatttagacgtcgttctttagacgtctaaattttaaatctggccaataaatatcaggttattgactccttgtggagcgagactt

SEQ ID NO: 2457 - DNA, 825 bp, unidentified
  source 1..825: mol_type = unassigned DNA; note = unclassified Luteovirus sequence
tgataactttgcaaggtcccaaataggtagacgcagctccatcaccttcacccaagcctgacccaaaacccagtcctcctccaccttcaccgaaacccgcaaaggaaaggcgatttttcgcctactctggtataccaaagacgaagatcaaaactaaaggcaatgacgactccatcattgcctcctccaacttggagcagcaggtcttccggtatatagaggcaaacaatcagaaagacgtcacgttgaacgcgcgttggtattcgacttccacagtgaagaacaagccaatgattgtattcgacgtgcccgctggtgattggtttgttgatttcctttgtgagggttacatgcctattgaggcaataggtggtagtgaggaccagaagtggatgggaattgtagcgtacaacaatgataccgcggatatttggtccgtcggggtgtacgacaatgtctcaatcactgagctcaacataacttcctcttggaagcttggtcacaaagatttagagctcaatgggtgtcatttccatgacggtcaggttgtagagagagatagcatcggttcatgtaaagtatcatccaataccggtggatctctctttttggtggcaccatccattatgaagacagcaaaatacaactactgtgtctcatatggcgattacactgacaaaaccttggagtttggttttgtatccatggtgtttgatgagcgtgatggagctaacaccgccgttccgcacattagaagagagctcaagaatgttaaatatcttcggccttctcctgtgcgtctgaacgacggcggtgattatattg

SEQ ID NO: 2458 - DNA, 826 bp, unidentified
  source 1..826: mol_type = unassigned DNA; note = unclassified Hepeviridae sequence
actacacttcaccagaaagtgttcaaaaggtcctgccgggtaaacccgacagggccttttgaacactttctggtgaagtgtagtatcgccagtgggtttctccagccaaatctggaggagcgggctgcagcgtgactgcagtggtgtgacccggtaccatgattctgggaaatggtgtgaatgagaagtgtgattgagtgtttagccccgacccactggggtttcgctactgttggtgcagtggttgagcattgtggggtgaaataggggatacttcttttaggagcagtcttttagccatattggctgtgacatttaaattcttaatacgtctggttcttgataccagcgctcatttcttctttctatcattcttctcttactggctgtctaactgccaagagctgctaccgctgcgcccggcggggttaactccaggactagcctggagctgtggccgccaaaaagttagatgctgtgactaaccaggcggtgagctctcctccagtgtccacattgggggtccggtagcgatcggggtcgacaggtaggctacgggtgaaacctgtctgggttactactatgtaggagaaccactggagcgctaagcacgcggacatttgtgagatccaaagtcaggcaaaccagcttggtatgggtcaaaaacatctcaacgcgagtggggcggtgtctccagggccccgcgggacctattcccctggtgtggcgtagctggagctgcgcccaccttcctgtatgcagtactccccttgagggggctaatcaggggcatgttaggttttaaaccacaacagtgttgaagttc

SEQ ID NO: 2459 - DNA, 826 bp, unidentified
  source 1..826: mol_type = unassigned DNA; note = Apodemus agrarius picornavirus strain Longquan-Aa118 polyprotein1 sequence
tttgaaaggggtgcggatatcatggcgtttctcgccatgatatccgcacattgcaaacccatattgcatacccactgggtatgcattatggggaggcccctttcacccctccccccccaattaccttttccccctctagtaaccatacgctttactcagcgtaactactccgggttacgtgatgaagaagaggctacggagattctcgggctacggccctggagccactccggctcctaaagatttagaagtttgagcacacccgcccactagggccccccatccaggggggcaacgggcaagcacttctgtttccccggtatgatctgataggctgtaaccacggctgaaacagagattatcgttatccgcttcactacttcgagaagcctagtaatgatgggtgaaattgaatccgttgatccggtgtctcccccacaccagaaactcatgatgagggttgccatcccggctacggcgacgtagcgggcatccctgcgctggcatgaggcctcttaggaggacggatgatatggatcttgtcgtgaagagcctattgagctagtgtcgactcctccgcccccgtgaatgcggctaatcctaaccccggagcaggtgggtccaatccagggcctggcctgtcgtaatgcgtaagtctgggacggaaccgactactttcgggaaggcgtgtttccatttgttcattatttgtgtgtttatggtgacaactctgggtaaacgttctattgcgtttattgagagattcccaacaattgaacaaacgagaactacctgttttattaaatttacacagagaagaattaca

SEQ ID NO: 2460 - DNA, 827 bp, unidentified
  source 1..827: mol_type = unassigned DNA; note = unclassified Partitiviridae sequence
tgtataatgggtttggaatccatatacatcctgaaatcgttcattgttgcatcgcgagctggagttatcgcgggggagtttatctcttctagggaaatgatggcgtgacttaagaccgaaaagtgtcgaaaagcgttggaccggcctctgtttacaagccgcctctattatgaatgtgctccttcctctgttagtgtgagagcttaagttattagcctaggtgacgccgtagggtgctctgtgcccggggattgttgctgtaaaagagtactgaagtgcaatcggctcagaaaggctatataagagtgcctttgtcaaacggcaacctgccgcttagttggtaatcaccagccccctggcgcctaagttaagcgtctcctaacccgtggcgtaggtatctaaaaggagctgtgcaccgtatagctggaagtttcggggggtgacgtcgctgtccatgtgacacagtaacccagggtgccttcgcaagggtatacctgtggtgctatcctcactcagtcggccgggttcaactcctttatgcttataccaagatatttcctacattatatcatactatagggtgctagttatagttttattcttaatatatcgataggccaaacattcttagtttgagctctttcgtgcatttttctcacatatgtacatatgtttcactatttatcagaatactcgaaaggtataccgtactgaaaaatcggataaagaggttgacgatctaatatggtttctcaaattggaaggacgtccgaaatgggttagctttgtaatgaagtgaccagggtgaggcatgatgccgccacttc

SEQ ID NO: 2461 - DNA, 828 bp, unidentified
  source 1..828: mol_type = unassigned DNA; note = unclassified RNA viruses ShiM-2016 sequence
gggagagaaccatggattaacatccatggttctctccctacatatgattgtgtgtcgtttcaccgcgacacccggcaatcatacatattcattgcagatctcgttctgctcttattttacgtagatatagacgtgttgaataggggtagaacccctaatcgcatttgctgtatttgctttaagagacctatagaataggcaatagcttaatctatagattatgagaatgtatattaatatgatatttagtcaccactccggaaattaaccacttctaagtgatgaccgtatgaatgaaacagttgtggctactgttttgtacgtttatgccgtcaccccagagagtcaactctgagaataaatcacccacttctgcgagaagttgtagcagcctgtaaggacgagctgtgtttcgacttgttcgcatagattattgaatctcatgaactgaagtttaatgactgataattaacgcttgtaaggttttttaatcgttggaatcccacctattagtttcgatttcgcttaactgatctccacccgcagtagggttgaagagagatcatagatctaacgaacttttaggaagaattggtccaccggttttaatttgactgacgtactagtacttactataagtgaacaatatagatttatatatgcacgtttacctcatgacaacctgagtgaggaggtttggtcacctaaatttaccgtgtctctgtatgaattttgaggttatcgatagttgttctactgatgtgattgagatgatatcgtcttggtttgtttagcccgttgaggttagtccctattcccactaaaatt

SEQ ID NO: 2462 - DNA, 829 bp, unidentified
  source 1..829: mol_type = unassigned DNA; note = unclassified RNA viruses ShiM-2016 sequence
gttacctggatggcgcaagtagaagttgctttgctcagtatacttgttcatataataactaaaccttttatgtaaacctttttatatgtgtttgtgtatgtttattgtgtttgtccctacactgtgtattaggacctctatgtacgttgtcataagtcccacagtaaaacaaatataatatcaggtaattctcatgtatcaatatctctacgggtattggggaagttttcaagttttgggtgccgacgaagatgccgacgacttaggaatcaaaatgcctttatggtcatggggtgcttaatatgctatcatacctcttgcggagcttttaaagccgttcaaagtccctgtatagcagcacctcgtggggtcatgccgttgttttcctatggctagatatagctactgtccttcgttggggaaccgccctctaggcgattatgggtcctttactgatgtggttattataattggttcacaatgttcgagaaatccttcttaagaccgcttaagaatcgtcgagaccgtgaactagggtacacgcgtggagacgttccgttgtgaatcaattataatcgacatggtattggtcatgagagttattgggtctcaccaaccctcggagtaatgtatccgaatgtcctgtaagttgtttttgagcaacctcttcaggaaggtgggtttctcaccaaagaggcggatgtggccggaacccggtgacgctactcaataagagtggggctctgcggagagacgtggtgacaccttggaatagacagggatttttcagttccaaattagctttcatgtgtttgtacaaattaaattt

SEQ ID NO: 2463 - DNA, 832 bp, unidentified
  source 1..832: mol_type = unassigned DNA; note = unclassified environmental samples sequence
ctcgtgcaatggggcccctgtcccctgaccatacctacccgcctccgggccacctgagtttctgtacagagctcagacccgggggtaacaggccccattgcacgagcaggtaggtctcggggtctacccctgtcgaagttccggcttcggcaggggctgggcgtaagccagccatcagagcgatctggtggcgagatttggcactccgttaacacgtttgtggaggcggagtgttgattcacccaatagcattcttgaccatcatgggttttcacccaccctttccccctagctataggctttggggtaagggtgtgtgtaaaacccctagtagccgattgccatctgcccacacaggctcatttgaaaaagcaccgaaagctctgcggagcaccctctatcccctgcgggatttgaggaagtttgaggctcttgccttgcctccaattgatggaggtggccaaattaccctctgatgggttcgagaggtaagctaagttggcttggtagttaggcggttgtactgctcgagggcaggtttccggctgctacctttaaggtcataaatgccgagagactgcaacggccgcaatagggtagggggacagtccctagttgagttaggtcaactggggtggtttgagcgcccccacaggtaatccacacacgttaggcgagtttttccaaaatatccaagttatccaggtgatcttcgagtgtattccagacgattagagtgtttactccagatttttaaagtgtacttcaagggaatttcgtataacaagcgtaaaaaccgttcttttaagaacgaaccgtatttattgttgag

SEQ ID NO: 2464 - DNA, 832 bp, unidentified
  source 1..832: mol_type = unassigned DNA; note = UNVERIFIED: Macaque picobirnavirus 0 ORF1-like gene, complete1 sequence
agatgcatatggttttactaaacctatgcttcaaaaactcgagccatttgtattcaaagtggttagagtagaagcaacaacaacatccgtcacagaaaggaggaaatagtgtgacaagtaatcaattatcttatctagcgaatcaagaaacggttcgacacaatctagccgttgaaaatgaaactcatcgctacaacactgaagcactagctgaactaaatcggcataacttagctacagaacaaagtgcgacagtaacaaacgcaataaacgataacagccagaaggaaaacgctcgacacaatttatctcttgagcagatacaagcattagctcaaggtgaagtcggtagacacaatcaggcgagcgaagagttagctagcagtagtttgtctgagcaaatacgtcatgcgctaatttctgaagatactcagaatattttagcaggagcgcaggcacttaacgcgcaaactaatgcgttgagtcagcaggagacagccagacacaacttctcacaagagcaggtttctaattacactgctatggagcagcaccgccataaccaagcaggtgaagaactgtcatctgagagtaacttgttaagcggacagagaagtttattagactacacaacaaaacagcagaatattgatctgcaaaataatgtccttgatgaaacaaagagacataatactgttaacgaaatattaacaggggttgatcttgctcaacaaattgtaaacaaaaatctcgacagaagagatagaactacgaattccctatttaatggaattttccgaatagggtcaatggtaaaataggagggcatacc

SEQ ID NO: 2465 - DNA, 832 bp, Cardiovirus F
  source 1..832: mol_type = genomic DNA
ctagactttctaccctcttgaatggcgaattccagagtaaagtcacctctgccttgccgctatacacacccaaccaatcgattcggccccacgtgtatagccccttggtcaagtgacctcttacgtctggacgcggatttaagacctgaatatccgctgaaagttaacaccatgtttgccccgattatgtgatgtttctgctcttgctgggcggaacatccgtcgggatgccaaagcaatttgtgtccccttctttctttggacttcggtcccccggtcgaagccgcttggaataagacagggttattttccctccttcctctcttctactttgttaagctctatttaacaaaagggtatgtctggcccctcccttcttggggaatgtgcgcggcggtctttccgtctctcgaaaagcgtgcatgccagatgcaagagaaggtgaagaaagtaagttgtgtctaacgttaagacaggaacgaatgtgtctgtagcgacctctcaaaggctgcggtctccccacctggtaacaggtgccgcagcggccaaaagccacgtggttaacagccacctttgagagcggtgcaaccccagcaccacactttcgttgttgttttctcactaaccacaactcgcttctctgaagccctcttgtagagttgccaagaatgtccagaaggtaccccggtccacgggatctgatctggagctccatgcgtgtgctctacacacgttcgggagttaaaaactgtcacagcaactccaaactaggtggtcctagttttcacttttatttgtcaagtcatatggtgatggttaaaggagaacgaca

SEQ ID NO: 2466 - DNA, 832 bp, unidentified
  source 1..832: mol_type = unassigned DNA; note = unclassified RNA viruses ShiM-2016 sequence
cccggcaaagccgtccgggtgcggctttgtacgagtgggcggtggtagaccgctcgctcgtggcgctagaagtgacagcgcggagcccgacattggtgaaacatgaacgctatagagttctatcggcccacgggccgggcctcactgtccatacgcctgggggtagtcctttgcggacgctatccatcgcgtcaatgtcagtggggagctcggggtgcagggagggtaccggtgttgcattgggatagactgttttgcgcgaaaacgcttgggtgtcgaccagatttatttctaccacaacatggctttaattagcgcgtgtggcagggtctcccttgtttaatctacggcttaggcagctcattggcattcacggtatttactcttatgcattagtcaccgcacgttgaggggcggttggaccacgggtagaattctgggtggtttcatcattcctgaatccggaaacgggaagttggcggcgataatgcctatacgacctgtggcccggggactaaggcggtcaaatcaaagaaaccgcttttccaaagccagctgtcctttagagggaggctggcccacgttgttagtgggtgacatatctttctgaactctgagctctgctcacgtatttttctttggcacacgtagggtccctcccgcttacagataagcagcttaaaacgtattgctaggtagaagagttctatctaaggccacgaaaagtccttcgcgtccgcgagtacggtgcttccctcgatcagcacagcttgaagcttagtatcggtgataccttgaagaaccagagtttagaaaacaacttttaccacag

SEQ ID NO: 2467 - DNA, 833 bp, unidentified
  source 1..833: mol_type = unassigned DNA; note = unclassified Sobemovirus sequence
gatggtagagatgggcttgtgtgacccggtgcggctttttgtcaaacaagagccgcacccgtctcgtaagttgaaggaagggaggtatcggcttatctcctcggtctcaatcgtcgaccaattggtcgaaagaatgctctttggagctcagaacgagttagagattgctgagtggcaatctatcccttcaaaacccggtatggggctttccgtcatccaccaagctgacgcgatattccgtgacttgcgagtcaaacataccgtgtgtcctgcagctgaagcagacatatctggttttgattggtccgttcaggactgggaattgtgggctgatgttgaaatgagaatcgttttgggctctttcccacccatgatggctagagctgctaggaacaggttttcatgcttcatgaactcagtcctgcaactctcaaacggacagttactccagcaagagctgccggggatcatgaaatctggatcttattgcacctcctccactaattcgcggatacgttgccttatggctgagcttattggttccccatggtgcatcgccatgggtgacgactccgtggagggttttgtggagggggctagggagaagtatgcggggctggggcacttgtgcaaggattacaagccttgtgcaaccacccccacaggccagttgtatgccgtggagttctgttcccacgtgattaaacgcaataaggcgtttcttacatcatggcccaaaactctgtataggttccttagcacgccgagggagacgctggaagatctcgagagagagcttgcatcctcccccatgtggcataagattcagagtt

SEQ ID NO: 2468 - DNA, 834 bp, unidentified
  source 1..834: mol_type = unassigned DNA; note = unclassified viruses sequence
gagcttacgctccgttgggtatccctctcatacgctgttatgagacggaagggggtgaggtgttttcggattaatagcccctaaatcccaaagaggcttgtgaaacttcctgttctaaatagtcgtttcacaggccggtaatgctggaaggttatgggatgcaaccaccagtccccgcgagggggtgcgcttcggcggtctatagcagatctcgtaccggctataggcgaaatacgtaagtattccctgtatgaaaacccaaacctcctcgatcacaaaccgcctttatccccagattatagggggccctataaggccccatattaatctacgtgtacgtactactgcgagtttcgacttgtgaaatgtatgaatcactgtttactggctggactatcgatcgaggtttcggttatcataaaacaaaaactcagctgtgttttgatcaaatatcaaaacagcggctgggagtacctttcaattattgtcttcgggcaataactgatagttctttgcaagtaactttataggtagcggccttagttagggcgggacgtcctgggtggcgcgatgctggccaaaatctgttcgtcagtgctaaataggagttgggcaagtgcctgcttcttaaacgccgagagactacaacggcctcactgtgggaaaggatcaaacgacgtgatcccatggtgactaattttaggggtatagtccccctctgtgctaggaggggcttcctgcatactctatatctagcatatcgttacgatctttgaattttttacgcgctttaagtcttgagaacctactcttgggaattattttcggataatt

SEQ ID NO: 2469 - DNA, 836 bp, unidentified
  source 1..836: mol_type = unassigned DNA; note = unclassified RNA viruses ShiM-2016 sequence
accaacgccacggcttgcccgtggaatgcattaattcgtatcgttgtaattaagccattttggctaaagtcccaggccttgaggaggaaatgcctcaggggagatgacgtaggacaattgcatacccaggggatgttccgcccctctctccttgtccggggttctgaagggagaaaccctaacaagtcaggcttattcttgacccctcgcttgatgagcgcaagcagggtgcagcctgccggtccagtgggaaggagctggcctgaggtgaaagtcgtgccgaacgcgggttgacagccgcgtagggttagccgccttaatcggtacaggagttccccctctcccgcgcatccttaagggatgtgaccccagcacccaagccgtaatggcgtggaatgttggaaggggaactaaggaatggttgcgccgtgatccagcactgcttgacaaatctggactcatctagcagcaggaatgtgtattctaagccctccgacctctgacgagactatcaaacatccaaggtagcacgtgattaggttcaagtcaagtcggtgaaggtggtttcttgagccccaccttttggaaacaccaggagttgatcgccctggctcggcgccgaacggacagattcatttctgcccgatagttttggccgcgctcgtgtggagtacacattttggatgagatgtcagtgtgcctagctttcgcgagctttgcacacacaacgctctgtatatagtttcacttgtattccgtggaacgtcgaacatcgatggcccacgtggacctgggcgaagacctagttgtcgtctatcaagctttctgttttttct

SEQ ID NO: 2470 - DNA, 837 bp, unidentified
  source 1..837: mol_type = unassigned DNA; note = unclassified RNA viruses ShiM-2016 sequence
gtttatagcgcatgtagagtttttttgaagattgatcaacctaaagttgagagatgagtatacttcgtgtagatacaaattgtgaaccgtgttcgcatatacgcgaagtatatgctttcacgtttcatgcttttgtctgcatgagttatatgtcattatgagaatgatttagtttgtctcggtctttgaaaacgtttttacggttctagcagaaactaccctcgcgaagtagggtccatctgtagtcctttcggacaaacgtgttaaccggaacacgtcgtaatgttgccttaattggcattttcacgggcttcttgacttttgctccggagcatcagttatatagaagttgggtctgacgagcccttcaccatagttgtgtacgtcttagatatacactacttgtccatatgtttggacaatacatagtttatggtttagatatatatatctatgttcaagctgtttgtcagcccaagggatcacgccattgatcctcctttaatatgggtgtaaatttcttcgcactttggaaacagagtgcaagtattggcaaaaaccctaagcctgtgatttgattcaggatagccaaacgatcttcaagatcatactttttcagggggcgaaatacccagaataatcaatcctgcccgggttcgcaagaacacggggtgttaacctcatgcaatgtacaagcgctgaccttcgctctctgcttggtacttccgacgccgtcattggttaggacatgtggtgctgggcaaccagaaatgaatcccaacacgggattcatggtttctcagcattgtgacatcttgtttgcaatgctgatttatc

SEQ ID NO: 2471 - DNA, 840 bp, unidentified
  source 1..840: mol_type = unassigned DNA; note = unclassified Iflavirus sequence
cgtattttgaccgtatcgatctgtttatataatagcgacgtattttagtgagaatcgtttccttatataatatagttgatatgtgatatagtcaatatacagaagaataattgtttcctggtaattcatagcaaagtaaaatctgtccctattgtctatactagttttaagttttagttttaagacacctttcttagttttaaattttgtttgcatgttaatgttgttgaatctgcgagaaaatgttgattttgtatgaatgaaattttcctattaagttaggtccgtttgtgtttgaatgaagagtatgtattagtatgtttgtttctattcctaatccctcctttgtccttgataatctttattattagtaaattatgtagtagaactctaccggaattcgattttgtatagttcttacctgcagcggttagatgaagaactactttttctttaattattgagctcagccctgtgacgttgtatgagagtatgcttttgcattatctttactgaacgcatctatttttataggttacgatttgcgtgtttatgcattatgtcggtttaaccctataatagaagagcgttgtaatagagaagcattagaacttccttgtatgattagaatcagatcctggtaaagcaataattatagacgaagtaaagtacaattgacatgccccggtagtgaccttcagacaagtccccctctgaagttcgaatcattttctaaagtaataaagtattatcccttttcctctttttatccttggattgatttctttatttggacacgaccactgcttgtttttatgactattttgaatattttatgat

SEQ ID NO: 2472 - DNA, 840 bp, unidentified
  source 1..840: mol_type = unassigned DNA; note = unclassified RNA viruses ShiM-2016 sequence
gcggagcatgcttgtggtgtgttgagccattttggctcgcgctgtgtcgctaattagcattttgctttaattaaagtcccaggcctcagggaggaaatgccctgggggagatggcgtaggagtgtgcatacacggggatgttccgcccctcgctccaactccggggttctgaagggagaaaccccaacaagcctggcttattcttgacccctcgcccgatgagcacgggcagggcgcagcctgccggaccagtgtggagctggcctgaggtgaaggccgtgccgagcgcgggttagccgccgcgtaggattggccatccttaatcggtataggaggggcccctctcccgcgcatccctaagggatgtgaccccagcacccaagctataatggcgtggtgtgttggtagggcctccaaaaagtggttacgatgtgtcccagcactgcttgacaaatctgggcgcacctagcagcagcagcacgtttccaagcccgccgacctctcacgtggactatcaaacattcacggtagccgttgacccatttccagtcatgtcggttgtggtggctttggcttgagcgccaccattaggaaacaccaggatttagtcacctgcctgggcgccgaacgggttcgggattcttcccgtccgccgatagttttggcccagatgtgtgggaatgtgctgtgggtgtgggcgaccttcgattattgcgtcgttggtcttttgctctgtaaatagcgttcaacttttcgtggttccataagcggcccacgacgacctgggtgaggacttagtccgtgctcacgccgttgcagtgtgttagcatctcttccgcg

SEQ ID NO: 2473 - DNA, 842 bp, unidentified
  source 1..842: mol_type = unassigned DNA; note = unclassified RNA viruses ShiM-2016 sequence
catgcacagcggttttcccgctgtgcatgtgtcttcacgttgatttttcttcgaatgcgtttattcgcattttgtcttttgaatcaactcgtattgtaagtgcaattgcttgctgtgatatttcgtatacacctatagcctttgtgcacgtgtgtagacgactgtttcagtatgtttgaccattttcaatacaaacaacaagttttatgacatttcttgtgaacaaataaatgtcaccaccctagagcattgctactaagctttgttagtagaagttgtttagagtcaaaacgacggacctctatttagagaacccgtgtccgatggtgataagaactttaatcgccccgggtgagttgccctcacatctttatgatgtgtagggcgctctcggttagtattgtggtggattttataaatacgtcagatggctcgacgttaaagcctatggttgtgaatcaaccagcagaagggaaaagccaacccaaactgctttgttaaaaactttgccgaatgcggaagtaccgtgaagcaaaggacggtaaccaaacttacatgtgactgcgacggaatagcatgtattttaatccaataacgttcaccagcccaggcgggaacctgagctcaaatttatttgactcgttggttaacgccgagaaacataatcaaggtgatatgtccatgaagtgggaagcttgcttcctgtgggtatctcggaaagtttggcccggaatttattccccccaaatgagtacaccttggtcagatagatgaagtacgcactatttttagtgcgtgtttcttctatcgtgtttcatggctatttatcatttaaatagatc

SEQ ID NO: 2474 - DNA, 846 bp, unidentified
  source 1..846: mol_type = unassigned DNA; note = unclassified Bacillarnavirus sequence
gaaatatatattatgtatttcgtgctctttagcactgatctaagaaggatcttattatagattgttactttgtagcacaggaccctttttagggtcctatgttagatcgtctaactttgtatattaagatgtggacatttcagttaactattgaattacgtattatgtaatcttggtgctccagattggtaatctggagcttccattgtaacttagaattaataaatatctaaaatttaccaccttgagtgtttattctacgaatattcactctttgctctcagccttgcgctgagagcttttgctccccatttatggggagctttttgctctacacttttgtgtggagctttttcctgcctttatggcaggattttcgatgttttatctgagtcgactacggtcaagtgtttatactcagacttatcatcacctatagaaatttcaaaaattttattagttgaatttctatgattcgttacctttataagaatggtttcgtatgttcgaggaatcccctcagtactatttagtaattttgtttattaaaatctccgacgaaaggagagtttatcagaaatagaactttagtgccgaaataatcggtcctcggctacgttttaagcaacgtatcgctacatttatattatattaggtattcgcaataccatttagagattatgtatcgtttaagcatcagttaccgctggtgtagggtgttggcactcccgacttttaaatacctctacctcttttgtgagccgatatcactagattttcgtaaactactattacgattgttttaaatatagtttttcaaacacaacccccctcttcacttttatc

SEQ ID NO: 2475 - DNA, 846 bp, unidentified
  source 1..846: mol_type = unassigned DNA; note = unclassified Picornavirales sequence
cgtatattctaccattttggtaggatatacgtgagtattagtttcgacctttacgggtcaaggataattttaaaccttctttatggaggactgaatttgattgcacaattgttgtgaaccgtaaggtcatttcaactttgtttatatcaataagtcacttattttgatttgtttttaaatgtctttgatcatttaattctaaaatagagtaaactatattatcaaatctgtacgggtcttttcagacccaaataactaaatgaaaccaacccttttatgtttatatgttgtagtgcgtttattttacacgcattgtttttataagtaaaattagttgatattaatctgcctttcttaagttcaaatcttttagatacctctcgtcggaaagacagcaaattaattattttctattgttgaagtttagtggatatgtacttcttgttttccaaacatccatcataaaatattataaaatatgcccctaaaaagagccaagtattgtttaatacatttagtattgtttaactcatttatgtttcttttgcagaaaactttttataaaattactacacacagaatagaatatttctggtgtgaaatctattagcaaatctcgcaaacgcctctccgttcttttatggacgacgcgaatcgtgtagagatgataagttacagcatcagttgatgccgaggactatctagcaagttagtaaccctgtgtggaaaattttatattaataccacatcaaagtaagagtcttagatgtatgttccagtgcattgcactggatatccttagcacgggagaaataaaactgcaccccaaaacctattagtacaacc

SEQ ID NO: 2476 - DNA, 847 bp, unidentified
  source 1..847: mol_type = unassigned DNA; note = unclassified Picornavirales sequence
gtgcaacccctcatctcaaccaggtgatttgaggtattttaattcctggggttcctggcgaagaagcacaactctcgccttgataccggtgtcggctagtagatccgatggttcacctggtgcgcagcccgttccttaaaccatttaatattgcaccttgtaggactgagccctcctgcaagtagtttagtggcttactgaagaaacatttcaaaaaacaaacttaggtgtctacaatcaagacacctcaacccctgttgttcaaacaggtacaacgtcatttgtggcagatccggtgtcggccatacaaagtgttggcaggtcccaagatgtgtacgatttgtacacgcctaatagcacaagcaccattgccgattacctggctaagccatatcaagtttttgccggtactttcactgttgttgattcaattggagctattttgtatgcttcagacacaaaaccgtattatacaaattcattgaaaataaataagttgcaaggcttctttggtttgcgttccactttgtgtattcgtctggatttaaatggcacgccttatcatgcagggcgtcttcgtttatgttattatccttgtttttccctcaatgtgaggaaggggagtgctcacatcacgaatgccattcctttgtctcagttacccggtgttgacattgaagcaaatgagtcgtctgttgttctgcgtattccgtatgtagctacgtcacagtttatcgaactgactggcggagcggtcgactggggtcgtgtatatattgccgtcttgtccccgttaaggacaggccctgacaatttgctcgaggttaattaccgcgtctggacatgg

SEQ ID NO: 2477 - DNA, 847 bp, unidentified
  source 1..847: mol_type = unassigned DNA; note = unclassified RNA viruses ShiM-2016 sequence
gggggacacacccccacgcacaccgtagattaattgagacatcagttagtcttgttggaaccagttgtactgtcttttggagagttacgactctcctccagaccagacttcatgttccatcgcacttttctacaaaccattattctgaggttagccacctcgtgcaacggctcatagacgcatacatgctcagtatacgtataaaatctatgttgattttacagaaaaacatagtcgctattatagcgcaacaaagctaaatactagataatttctgtattattagaagtatttattcctatgaattttaaaggaacgggcggcacccggctatgttggtttatgttatgtttatttgcgcactccacgcaagattatttaaacatgtcctgtctggacactttaggttgacacctagtaatcggtcgaattgataattcacctattacaacatcgaactcattggagttccatgttccgcttcgtttgaagcaatccggagtgaggcgtttatttgcggacctgtcttgcagggttatcttaaaggataacgcaaatgattaggagtattgaccggtactcagtcggaattattgtagataggtgtggcaacccatgacctacaataagctactggaatgtgaatacgttgtcgggctacctctcgggagaaatcgtgagacttacgcaataggttcgaggtatccaaaaatccttactagtagtgacactgttgtgtgtcttgctagtgtaagccgtttggtaacgactattctgtttggctgttggaataaatttgagggacgtgtgtaatagtgaccacgcaccttttatctttgatatcgca

SEQ ID NO: 2478 - DNA, 848 bp, unidentified
  source 1..848: mol_type = unassigned DNA; note = unclassified Carlavirus sequence
catcgtgtgttttcaacatgcggtcctgtgtcgttttgcgccctacatgcggtacattgagatgaaagtgcatgaggtgctaccaaagaattactacatccactcagggaagggcctggaggagctggatgcttgggtcaaggaagggaagtttgacggtatttgcacggaatctgattatgaggcattcgatgcatcgcaagatgaatttatcatggctttcgagctggaattgatgaagtacttaaggctgccaagtgatctaatcgaggattacaagttcatcaaactagcttggggtctaaactaggcaatttcgccataatgcgcttctccggggaagcaagcactttcctgtttaacacactggccaacatgttattcactttcatgaggtataacatacggggtgatgaattcatatgctttgctggggacgatatgtgcgcgtcgcgaagattgcaacccacaaagaaatttgctcacttcttggacaagctcaaactgaaagcaaaggtgcaattcgtaaacaaaccaactttctgtggctggcacttgtgccccgatggtatatataagaagccgcaactcgtgctagagagaatgtgcattgcgaaagagatgaacaacctgagcaattgcattgacaactacgccattgaggtggcgtacgcatacaagttgggggagaaggctgtgaatagaatggatgaggaggaagtcgctgcgttctacaattgcgtgagaatgattgtgcgaaacaaacacctcatccgctccgatgtgaaacgagtatttgaagtgctttaattagtgtagcttaggtattgctattgtattgaatattt

SEQ ID NO: 2479 - DNA, 848 bp, unidentified
  source 1..848: mol_type = unassigned DNA; note = unclassified Riboviria sequence
ggtgcaggaaaactttttcccgacgtgtccaaaatttcctatctagtgatttcgatattaatactcctgaacaggaggccattcgacgcatttttgtttttaccaactataaaaatgacgttgaaaaatcgaaattacgtaacttatccagtgaacgatgtactcctgctacgtttacttcattggatgagtcttttctttatgttgatttttcttccctttcaaaatctctcaaaatcaccagggaaccttatgatgcagtatctgcatatattctttatttcctttttgatcctattcctattgaagtatggaaattcattcctacaacaatcttttggtcagagaacttatcaattccattttcacaaaataattattctaatagaagctatcccacgcctactatcatttcgaaattccgtgaattatttccttctccaggcggacgtgcttatgaaaaatctttcattttacctcatgatgttctttcctctcttgaaaaacctaataaaactaagaatctctacagactcatatctcgtcttcttcatgtgaaatgggagcctaatgttgtttctggtcttttacttgcttgtatttccttgcctactttagatttgttctttaccatcattattaattgggatgagttttggcaatgtgataagaaacaattagttaaagtgttaaaggacttacatactgggattcgtcttacattcagtcttccaaacggagttaggttgacctcagaacagactagacatcactacggtctcgatgcactctacggccggtccgacactttaactaatttttctgcaaaagatgaaattgctcaaaga

SEQ ID NO: 2480 - DNA, 848 bp, unidentified
  source 1..848: mol_type = unassigned DNA; note = unclassified Riboviria sequence
tgagatttacgcgcgagcgtagatccgccctagacgagtggtccaactggcagttaaagctagccagggactgctcgggtcaaagctagtcagttgccgagtggcgacggcggctgatactagagaaggcgacaccaagtgtggacgctgactcgcacgaccttaaacgtcttgggtgcgcgtaactgcaggttttggcaagcttgtagcctagcgtgagcttcagtgtcatggttaagtcaagaacataaaccggatagcactggagccgaaaggcgattacccgtagaagctggctttgccggtgtagtgttctggtatggacacgctaggggtgggtcgtcggttgtttaacgcgagtggggtatgctaaagcattaaccacttgaggcttagcgtgaaaaactaagcccgcgaatgaccatgctaatcggcaatagccgtgtagttgtgcacacaactatgtcacaggggtggccctgtataccggtatcttcttacggtatactaccaagttatgttaacctgcggtgcgatgaataagtatcagaagcagggtgtggcagcaggaggaattctgttgttgctaacgtacgctcaactggcctcacggcagcgggtaagaaccgtatgagttgggtggaacgtgccttgggcgatagacgtccagggtggaacggccggataacttggggaagcagaaagctgcggggattgaatggcctgcctacgggtgcctgatagtgacggaacatattggataacgttaatccaattttcaaataattaacctctccgcagcctagcagctgggatacatagcgggttaactactattaacgataaag

SEQ ID NO: 2481 - DNA, 848 bp, unidentified
  source 1..848: mol_type = unassigned DNA; note = unclassified RNA viruses ShiM-2016 sequence
gtcagacgttaatattactttgtttaaagagtcttattattctcgttatctaacttattattcaatggtctccgttcatatagttgcttatgctatatgttccgcgattttctgacctaataagatgcttggttaagaaccataaaagtccccgcataggaatggggtggccttagggtctctacaacaacggtttcggcatttgctgagcccgtgtcttgatttgatttgtgaacgcgtaatttaaattttaaaagcattctggatcaaatctagttgccaattgaaatttagttaaacgcatattcattttttattcgaggaagaactatgcattgcgtgagtgtttccgcaaaatgaattggtgggatattccccatcacccaattctaaatctttacaattgcatgaatgtgcataaacacatttgaaacttaatgagtagcattagagtttaaagattgtggtttataccactttataacagtttgttttacaaggttagatctataacggatttccgggggtctagcgcggttgccacagactcaacatcctttctttttggaaatgatagtgtgtttgttagtgtacattactacggttgtttttatttaatttgggaccaacttttgttgaacttacattgatttacggatgtcaaccagttacaatttctttagtctgggagatagaacgccttgtaagtagactaaaactacagatcgggggcgcggattaatgctatcgtggacaatgatgtgtttcattgatttgtctggaaactttgtttcttccccttaaaaaccggcattccaactgcttttaagcatagtcgcgtgcagaca

SEQ ID NO: 2482 - DNA, 850 bp, unidentified
  source 1..850: mol_type = unassigned DNA; note = unclassified Picornavirales sequence
atagtttcactctggaggttacacataagtcaatttcttgaaatacacataacatagacgtgtcaattagcagatagaaatatggctttatgtgtatatatgtaattttgaatttgattgcgtgtattgtccattttctacagatagggactcaataattttgcagtgcgctccatctcccattagtgctgtataaattattccttttcctttttcccttccctttggatttataatgtgcttatgtttcacttgcataagcaaacttaaaattatatattgtattgtgattttccaatagtatataaatttaagtagacaagttgtgaacttactcttcggagtattttattctcttctgatatgatttggctttgtattttttcggatgtttgatatggcatgtgaactgattgaagggcttcggcaatatgtgaggatctgtaatggtatccaaatattctgatagtattacgcgtggcgaattgagatgtgacttattttaaaaagaaaactcactcacacatcactacgagtcgtacgtaattaactaaccgagttgtcccccctgttcactatcggctaacctgatgcctccaggcgttccgtcggaaacttcatcgctaagcctagcggctgaaacttacaatcaccctttccactgttttgttattgcctagtgcgagaaagacgcttttagatcgtgaatctataagctggagtgaagtacgcgtgagacatgtgttctgcgtatgaaccttcataacaaaattagtggtcggctattgacagtaagaccttcagtgactgcgaaaatggatcaagatgcccaaccttgaccaattggctg

SEQ ID NO: 2483 - DNA, 851 bp, unidentified
  source 1..851: mol_type = unassigned DNA; note = unclassified RNA viruses ShiM-2016 sequence
atataattgattgatttcaattatattcgtttgacgtgttcgcacgttgggtgaaaatcctgtttccgagatttatatatgtatttgaaccattagctcttttagttcaaggtacagctaattctggcctttgttctactaaacaagattgatttttggattcttttaaggccttttcgtacagctcatctgtgcgttgacaagcttgaccgatgtttcaatgcattttatttttcccggaacagacataaccctgtttctacagcagacctatctgctatatcaaaggaaccccctatatgtttacagaaaaatattccactaaatgtagtgaagaagaatgccccgttggcactcttttaacgggaggacataaacctgattctttcaggcctgcccccccgttttacgggaggacataaccctagcttctactaggcctgcccccccgtgtatcagggcccctgccctgatacctctgtttttactttgaggcatttgtaagacctcaccagattcatattgttataaaaatacgaaaataacaattcctcaatatgaacgttccagattggaataaaaaataatctataccctttggtaatttatgtcgatctaagtttaactcgttccactttgtttggttttactcactgcaatctatgatgttcacagtataccaacttatgaaagcgcttgatactttatcgcgttatgcaccctagtcttttgtgacgccggtttgacatttcgacatattttattaaatacttatcaggttaaagtccagatatatcccaaggaaggggagaaataatactccatttaagactcagaattacaattttaag

SEQ ID NO: 2484 - DNA, 853 bp, unidentified
  source 1..853: mol_type = unassigned DNA; note = unclassified Nidovirales sequence
ggtatatataatatacctccagacagtgatcctgtcaattgtgaaaaccatatttgttaaccagttaaataactgtttgaccgcctgctaaagtgggcaacttgtttttgctaaaccccaagacagtttagatcagtccaatttaatcaaacaaaacaattgaaatattttattttattgtcagagtagttaactgattgtttgagaattagtgtaccagcacaaccactcagccagcctaccaaaggcccttggccacttcccctctcacgacttataaaagtcgccacccagataatctacgaaagtagacatcactcctatttccacccataggcactaggagaacaggataaccccgaaaggggcatcctgcctgtgtctctcacattcgctagccagatatcttcacagactctgctaggcttgtgacccagtccgttcccaaagaccgttacctcccgagtagcgcttaggcgcgaaagggaagggagtacctcccgagtaagcgaaagctgaaagggacgggaaccacggcaagactaatcttagtcttacagtgtgggcaatctggtaattgtccccaacaatcaacccaatttgatgtgaaaacatctaactcggttggcttctaactagctataaactaggatatctcttaacggagactccgaggagggccaccaacagtccaccagtttatagtaagcaacaacaggggcgatcttccaagacacctctcaccacaagacacaacaacagtcttgtgaagccgacaatattgtctacggacgtattatcgagggttttaaaggaggagttagtgattaaactaatttcaacaccaataact

SEQ ID NO: 2485 - DNA, 853 bp, unidentified
  source 1..853: mol_type = unassigned DNA; note = unclassified Iflavirus sequence
atttgttcgactatacaatagcaacttatctttgtgagaattgtttccttgtttagatcgacttatgttggatgtagtcaatatatacgagaataggtgtttccttgattttattcgtttagcttagcttctcgcgtaatttcaatagcatggtaaaacgtatccctgttgctacattttagttgttaagttttagtttttaagaacaacttttaatgttaagaaattttgtttgcttgttagcgttgatgaatctgcgaaaaaatgttttcaagtatgaatgaaattttcctatttagttaggtctgtatgtgtatgaatgaagtgtgtgtattagtatgttttgtttctaacctttacccattcctgttcctttgtaattcttcctctacaagtaattttgttagtagtacttataaagaattcgatcgtatatagaccttacttgcagcagttagatgaaggtctacttttcgattagaaattgagctcagccctgtgacgatgagtgagtgtatgctttaatattatctgtactgaacgaacttaagtatataggttacgatttgcgtgtttatgcattatgtcggtttaaccctatcttaagagatcgttgtatttgagaaattttagttcttcctcgcttgtttagaatcagatcctggtaaagcaatttctttttgcgaagtaaagtatatgtgacatgccctttatatgacctcttgaataagtccccctcaagagtatgaatacattatgaaagttttggaataattaccctttcccttcttttccctcgactgttatcttttggacacgacccctgctttgtttaattgattttatagcaaat

SEQ ID NO: 2486 - DNA, 853 bp, unidentified
  source 1..853: mol_type = unassigned DNA; note = unclassified RNA viruses ShiM-2016 sequence
tgtatatatttgattaactatcaaatatattcacgttttatgaaaggatgttgcttttagcaacatctaggaagtagtgcttacttctgacctatagcctggttttggcacgaacggataccgtatcgtcataatgcaactgggcctttatggtaccgcctcttatcattgtacgataatcactcgaacaaaccaactatagtcctggcacgtgcgtatgcatgccgtcactatgcagagggccttgaaggtaccgccactagtcattgtactgtaattacacgaacaaataaagcacaaccccatttaagttccctattcctgggttaaggaatgacgaactatcgtctaagcaaatagtgtgttgataatcactaaactatcatccccccttttttatgttaaatgtcaggtgtttcctgaccttcctcacaagggaatgcgttcttaacaattttatattgttaaacacactagtctttttagacttttattatctggttttatgaatactttgaccatgaccccatactacagaatgcgacgttcgcgtttgctccatagtatgtaatttcaaaggtatgttgtgggtttccaaccctccttgttttacgcgttttgccgaacttgatattataataacaaatttccatgtgcctgggtgtacttgaagatggaacgatgaactgtttcctatcacttcttgatataccccgcacctctgagttatttttaaagaatattgtttttagcctttatgactgcaaagatcagcatattgtttacgttatcccctatgtatgttaagggacactattaattgtagaaacaagtaacatatgtccatgacgct

SEQ ID NO: 2487 - DNA, 853 bp, unidentified
  source 1..853: mol_type = unassigned DNA; note = unclassified RNA viruses ShiM-2016 sequence
ggaactccctgtaggcctcaaagcctacaggagttccctagagaaagtatattgtgtcgtttgaccgcgacacccgatatatgctttcacagatattcggattttatattccttttcaatgtgaaaaacattggcactggtaagtgctgtcgttactgggatgtgaaatcccggttcgtagtattttgctatatgtgtttaaaggagtctttgtatgctgctaacgcggcttcatcgcaaagtccttatttcatctgttatatttcgtcaccacccttatggtcacccgtaagtgatggttcatcatagattctatttgtggcgagtagagtttattattgatgtataccaccccggagagtcaacttcgttacgaaaatcaagccccttgcgctatcatgtattaggaaattgtaaggaacgtttcccgtattacttgatagtgtcgattgatgctaactcataagattggcttcatttgaggattatttatactagatggtttagtattcgtgaagaatcccactcacattatatgatttcgcttaaccaccttcactcgcagtagagttgaacgaaggtgtagatctaacatttttgtgagaagaattggtcttctcggagctatttgctcaacgtaccgagacattattgatgtatacaataccatattttacaactacgttttaaccagggacaacctgacctggagagtttaagccactcaatttttccgtagctctgtctgatatgtgaggtaatcattactcagaagaagtttcaactatgatgcagtagatatcgtagtattgtttagcccttgtggttagttccctattcccattttgaaatc

SEQ ID NO: 2488 - DNA, 854 bp, unidentified
  source 1..854: mol_type = unassigned DNA; note = unclassified RNA viruses ShiM-2016 sequence
gggagagaaccatggaataactccatggttctctcccttacatatgtttgtgtagtgtaccgcactacccggcaaacatacatattcattgcagtacttgttctgctcttattttaaaatgcgtaaaggcgtgtcaaataggggtagaacccctaattgcacttcctttatacattataagagacctatacaattaccgaaaggcaaatgtatagattatgagaatgtatattaatatgatatttagtcatcactccggaaaaaactaattccgtaagagatgaccgcattgtcagctatagttgtggctactatagcatatgtgaatgccgtcaccccgtagagtcaactgcgtcattaaatcagcaccttctgtggaaaatcatagtagcttttaaggacgagctatgttttgatttgtccatatagaacattgaatgttattgtatgacattggatgactgagatttatgcaaattgttttgtattcagatgagaatcccacttttagtgtgtattactcgatttaacctatttccacccgcagcagggttgaagtgagatagtagagttaacgccattcgaagaagaattggtctcgtgtgtgtactttaatccaccgatatagagctatgtcaataagcctcttatgtggagctctggtatacaatatgcgtttatttaagtacgtttacctcatgacaacctgagtgaggaggtttggtcacctaaatttttcgtacctatgaatatttcgctgaggtctcacacagttagaaaatcgattgctttagcaggatttgttcttagttttgtttagccctttgaggttagtcctagttcccatttaaatc

SEQ ID NO: 2489 - DNA, 856 bp, unidentified
  source 1..856: mol_type = unassigned DNA; note = unclassified Riboviria sequence
atgcctgaaaaggagtggtgaagatccaaaccatgttgatagtgccttgtttagcctcggagagcagttggcgactgtttgcaagcgaatgtttattatagtatttactaaagtatcatgtacctgtatcgtttacgttgggtacatagaagtggcgacgattcctgccttgtacttactatattagatttagcccgaagtttccgttgtaagatagctacttatatcaatccaaatataaatgtcccctttattttttataaagagtaatttcccccataccgctgaaagtgtctacaggtacgaacgttattaccagaatttattttggattatgcggaatgtggagtgtttcatgtatgtgttgctctatttactgtgtgaatgtgtgcgtatgtgacaggacctcttcttaattgaagaggacagacgagccaacttgattttcttgtaaaaacatttactgaaagtgtttctatctatgatttctacaactaggacctgcccgtgtagcctctggctagtagaattctccttcgcgagttttcgaacgctaatgcctcgtgtttgactcacttaagcctgatgagactttcgatttctctcaggagggtgttttctctctgatgttgagcctagaatgataagatagaagtgcgattaagacctgttttcggattattgacggaaccgttttccttgaatgtgattgagtgaagttgtctacctaacgccaaaaggagccatgtcataaactttgtttggccaccgatttagttaggaagttaaactctatgtgttcgccttaaccggcccaaaacccctttttgctggcgagtgcccaaacccttaaaca

SEQ ID NO: 2490 - DNA, 856 bp, unidentified
  source 1..856: mol_type = unassigned DNA; note = unclassified RNA viruses ShiM-2016 sequence
ctggtggcctgtgtgcaattaattctttgtgttcatgcctcatcagcattgaacagtacttcaatattttgattatcaattctttgcacaccgcccaatgtatccagtgaaccatggctagacagcggattgctttgccaactgcggacgtcatcgtgccgagacgttaaaacgacgcatcgtctactgccagcaccgatgttaactgtgcaggaccccccagacaaaggaaaacatgagcgcactcgtacgtggattaaccaagtacgcgtgtgctggccttgccctggccactgtctatgctgcggatcaattggtgaagaggttccaccggcgacgcgctttgctgcgtgatgctaaggaggaccttgcagccctcaattcgccatcagtcatgcgtgggcctggtcttgaccaggtcccaggggtggtcactatgctggagcgccaaggcgttgctccagtggccgcctcttccaccactcatctcctccgaaacaaccataagtacttctgtgcgaagtgggctcgggcagtgaaggctcgctttgagtttgccaggatgtgtgaggacaccccccttaaccgtgctgctgtccataggtggctcctttctcagtggaaggagcttaagaacagcgctgggaaggggatgccgttgcatgtcatggacctttacatgaccgatgctatggacatgagcttcctgccaactgccgaatatatgcagagtgagtctaagagggcagttaggaagcgcgcccgcatggagtactacaacgagcggaaatttgtggagggatggaaataggggggcctagtgagggtaagggggtttgataccgtcccgcgattt

SEQ ID NO: 2491 - DNA, 858 bp, unidentified
  source 1..858: mol_type = unassigned DNA; note = unclassified RNA viruses ShiM-2016 sequence
ccatgccagaagacgaattcgatgttggccccgttcttttggggcctcatctgcatttgaatttattaagggagcgtcgggggaggaaatgcccccggtggagatgacgttgtgcgcaatatgggttgggggttcaaagcatcacccacccaggggatttcaccgtctcatccgggcctgcgcactgaagggggccgcaccccgagtcagccttgttcttctgccacgtgtttcactgtgcacggggtgagagcctgtagcggcgtgtcgagccccacgcctgaggtgaaggcttataggagactggatttcacccccagtttaggattggcctcctttaactcctatacccgagatgggcaatgcggtaggcaccccatgatgccccacatctgttgatgagttgttctttttaactctctcagatgggcgtagggatacggggagaagtcgaagctggccgccaagccgcaaggcgtggttggttggttacccatcctgtgttgaatggcgcggtaccgaggcctggcgtatccaggtaatgctttcaagaacatggttagagcctcgacggttgaggaaccggtcaccgaccaccgtatgagccagcggggaacccttcctgttccaggcttgttcgacccatgtttaagagagtgttggtgtgtatagaaatcagtgacgatgcaagtccgagcaggcaacaaaataaaagtaaaatatgcctgctcgtccattgtatagttttttccggacctgattctgtatgaacaggcacaagcgactcccgcttgagacgtgtatagtttttccgaaacgtcacagtagtgttcatccgagtgtacattctttaagaga

SEQ ID NO: 2492 - DNA, 859 bp, unidentified
  source 1..859: mol_type = unassigned DNA; note = unclassified RNA viruses ShiM-2016 sequence
cgcagataaagaactccacgtgcgcgtttcgcgcacgtggagttattgttgtatttggcgtttgactacgcccagtgtacttgttatgtagtgagttggggcgttacgacgccccctcttcctgcattagcagctacattgacttcaatttcatctttatcatacccgttccctgggatagtgggaccccctctgtcatgaggatagtcatttctgacgtaagacagacgtatgaagaatgacatattgaatataggtaacattgacgaactatgcctctaagttcgaatgatatgtttaccgaattgatgtgtaccttcttttgaaggcacgtctactttcttgatgagaccgaccgaaaggcggcacttgattgtagattcacattttatgtttctcgtgagagaacacaattcggtacaggtaagactgacctgtctggcaatcggtcagagattgataatctcgactcgatttgttgtgattttgtattgatcactttagcgccgagaaggcgtttgcaccgagagtaagcggtacgagacatgccctactagcatgggccgacgtaatggtcaagtgaaacttgttttaggctatctgttccggtagtcacgcagaattaagtgtactgaggggtggcacccgatgaaggcacttttgctactttgtgtaaacaaattctaggacatcattttgatattttgtcaataattttatcgctatgtttggggtatttacagaaactctggcttttgccgtaagacgatttatgagacattatttgagacttgatgtaagtgattgatcttttgatcagtaattcgagggactacgttccttttatcttgaacacagc

SEQ ID NO: 2493 - DNA, 860 bp, unidentified
  source 1..860: mol_type = unassigned DNA; note = unclassified RNA viruses ShiM-2016 sequence
gctataggtctacctatagcaagtttcattcctgaagcagataagcctctcgaggatattaatttgattttatgttacactgtatacactagatgtgggtgttgttactcacacactagaagacggtggactaaagattttattatatattgtatacaatcaaccccaacctattggttgaaggcttccagacgttttacgcctagctggcaacaaattagtcaccagcgatccaaaacgaatttggagtgggtttgacatcccactaagaaattgtcctgcatagcagggaaactaacgtctggccaaaatcctattattaggtgcgcagcgggttcgctttaacctgccactcttgtttactgtcagtccgaaagagtaatagtcggacagaatatgtcaatgaattgaccggaatgaggaccaagttgattgagcctcgccctccgaatgggccaagaatattttcttatattcccacgtatatacacaatttagcacaatagtgtattaacccccttattgttttggggcattgaatattgtgtatagactttgtcatagagtcacacttgtggatattttctgctcgaaacgagtagatagggagattcatcacacaacctggataatcttttgattataaaccatatggaagtgtgggttgaagctcaagtgtgactggtctgagagcgtctatttgatcagtagacagcgcttgatgaagaccgcagttggtggattaacaaccacttatggtatatggcaacctgtgtgaacagtttctttactctgatcgtgtgcttcgtgcaccagggtaaagtattgtttgacaggacttgggacttttctatacaaaa

SEQ ID NO: 2494 - DNA, 860 bp, unidentified
  source 1..860: mol_type = unassigned DNA; note = unclassified RNA viruses ShiM-2016 sequence
gcctgcgcctcgataacagtggtattacgtttcaccccgtgttgcttgcatttaattaaagtcccagggctcgaggaggaaatgcctcgggtgagatggcgtagagttcttataaaacaggggcacgttccgccgtcccctcctaactcggggttctgaagggagaaaccctaacaagccaggcttattcttgacccctcgcgtgatgagcgcacgcagggcgcagcctgccggcatggtgtaggagccagcctgaggtgaaagccgtatcgagcgcgggttagcagccgcgtaggatttgccaccttaatcggtacaggagtcccccctctcccgcgcgctccctaagggatgcgtgaacccagcacccaagctgtaatggcgtggcctgttggaagggggactaaagaatggttacgatgtgtgccagcactgcgttttgggcttcggttcattacaagacaaatctggacatgcctagtagcaagagtgcgtactctaagcccgccgacctctcacgttgacgtcgtactgtggttcgcccacggacgcagctgatcccgttcatgtcatgtcggttgaagggtggtttcttgagccccacccgtggaagcaccaggagttgatcgcctggcgcggcgccgaacggggagtttgctcgcccgatagttttggccgcgcacgtgtggagtacgtattttgggcatgctgctgcgtttgaggatagtcccattcgcaccacgctcttccttaagggaaatgaattgttttagttatgttgttactgtttttccagtgatgccattttggcacacgaagacctggagaggacacagtcgtcgtcttgagttgcttcaaca

SEQ ID NO: 2495 - DNA, 861 bp, unidentified
  source 1..861: mol_type = unassigned DNA; note = unclassified Riboviria sequence
gtccaaggggtttgaaggctcggtctaccactttgtggggataaattgtaactgcgagcaatggttgttggtttcaccctgaaacccgtggcggctgttaccccatctttgagttggtggtcacgctgcaaacgggctttcggtgaagccgtcctggagtctccaatactccagtctctttgctgctatgacagtagagaggtagagtcgtacaaggcggatcgcgaaatccgccatgacatccgtgaatccatgcgcacacatatgggttatggtacggctgctacttgtgttgagaatgtgatgttggaaacgtttaacaccaccggctatgatcttagcaatttctcgaccatccggacccagtgcgcggggttgcggaaaaccatgacacaatgggacgaattcttccagttgaaaggggttgacccattcaaactggtggacttcgagattctacccacttgtgttgtgcccaagttcgctgcgtcaatggccttgatgctgagaagcaaacttggaaggttagcaccaaatgatgctaacacgctccttgtggagagggagtacttgcgggtggcaaggaagttaaacgtgcgcgatgtggacatcgtcgcgcaccagcagttcgtgatgaatgctgtgttcggtgaaacgttgctggacagtgtagctttaaccaggagtcgcattccaaggtggatgcggtgggcgttcgaggtggaaacaccgacagcgcccgtccgcgtctgctaggggtgcccactcactgtgcgtggctgtgacactaaggttgctgatgagttgttagaacagatcagaacccaatgtctcggcaagttgtgcgcgcgcaggaatggg

SEQ ID NO: 2496 - DNA, 862 bp, unidentified
  source 1..862: mol_type = unassigned DNA; note = unclassified Tymovirales sequence
ctcacgcgccgttctacctgactcccacgaagatgagtctaccgacagcacaccccaaagcgacaatctcacaacctgccgctctgaggctagccctacaaccccggtccttgaacccttacccacctccgctcttgcacccgcccaaggcacttccgctgatctctatgaattgcctcctttcgtggctcaggcccccctcggtggcgccgccacctcggccgcccctttttgcacgcccgtcggcccgtcgctctctgaaccggaacgtccgtcagcgtcgagccctctcgacagcgacgtcagcgccgcgcctggcgtctccgagcctttctaccttcttcacaactttcccgccgccagcgacattctctggcccacgcgtcgacgagtcaacggcgcttcgaaccttcccgtcccacacaacaactgcctcctcgttgccctggccgaagttatccctactcagtctgtgcgctcactttggacccgcctatgcgagctcctccctgactcacaactcgacagcgaggagatccgcacaatcggtcttagcaccgaacacctctctgcactcgcctggagccttcaggtccatgtcaccgtcgtctctggcaataccagcacctacggcaatccactcgcctccgctaaagaccattacaccatttattacggcaacaatcacttcagcgcccagagggtgctccgcggcgccactccccaaaaatatcgcccggtccgacattcagactacgcggccttacacaagttcaccaccaacagcgggcatcgcctccccttcgacaaatttcacaagcacaccgccgaccgtcatcgtgccaagaacctaatctccaac

SEQ ID NO: 2497 - DNA, 862 bp, unidentified
  source 1..862: mol_type = unassigned DNA; note = unclassified Picornavirales sequence
gtaggtcatgtttgttgaattggaggcgaataatttccttgccgtctctaaacgcgctagtcagcgtggctttgcctatgacgaacctcggaagcataaccgagctatcaatattgctgaatagattacgtagatctattttaaagaagaatacggaccccataatacacatagagagatttgatcgtctatatgatttgagatgacttctttattttgtggttttttcgggcttttatttaaaagctccctcgggttggtctcccgagtgctttcgacattagtgtctaatgatataacgtttgagaagatattcagcccatcgtacgtacttttttccttatacggtagccccgtttggaattatttacttactggtggtattctcgcggtaaaatgactttctttttaattttcctttgtaaaatattaaatttttctctacctattttcattctatcatttatgtagttatctttctgtgtttcatatcactcggttttactgttggcaacacattgttttttacattatctcactcggtctacatggtggtacttcataacatttcactcggtctacaaggtggtacttcattttcattttcattggttatttgtccattgttgcgcacttcaacggttgatgtgtaattcgttgttttcccccagcgtgccgtagttcacggtaatatcatgaacatccacgagcgactgagcaggattagctttgacgttgctatcgccgtatattttatataatccgcgtgcggcaaacccataagtggtgcggaaagaacaaaaacatggaccattaaggccgtgagcatctttgtgatactactacaaacaaaaagcagacc

SEQ ID NO: 2498 - DNA, 863 bp, unidentified
  source 1..863: mol_type = unassigned DNA; note = unclassified RNA viruses ShiM-2016 sequence
ggttaacaccgcatagcagtcactttctcaagaaaatcttcttagaagactttcctgacatgaacgatttgttagagatttataagatttatttgtgagtatagtactccttgtagctcggcgaaatcgtagagtgcttaactattgatatagtcaattctccttgcagctctacggatttgtctggagcttgattttgatatcattagacactttaagtatctcctaatagctttttcatgcagaaagttttaaactaaagtaaccaacaccttttgtatactgccatgttggcagctagatgttcctactttgaagtcgttttataccgcttctggtagtgttttatatttgttttaaaatataaaaatcgcttgtgtgattcccagtagggaatttctaaatagtggactccagagatgagtaatggccactttgatgaacctagaataagcagttgacgcgagatagcactttgtgtgaaacggtcctgtgataaaaagagaagccgcctgagtgggctagagcgtttggaagcgttcgtcatcaaagatgaagaccctttatgggtaggatacaccaaatattgcaccaggcaatgtgcaatctgattttactatttgagtcagttaaaaccaaggttgaaggccaccttgaggtctctgcggcagaaatcaccgttcaatgacaaattctctcgtgtaaagtgagagagacaacagcaactattttcatcagttctattacactggtgaatcttacataggataatagagcaacttcccggtagatgtacccggatattaacgagcacgccgtagcgtgcacatcatgaaattttgtctttcccattccattttgga

SEQ ID NO: 2499 - DNA, 863 bp, unidentified
  source 1..863: mol_type = unassigned DNA; note = unclassified RNA viruses ShiM-2016 sequence
gatctccacacggtcctttcgaccgtgtggagattcagttaatttcttttgtcaaatagtttattctcagaagtgcatactatatgcttctgagactttatgtgtagtaagtcatactttagagttgagttattacactctactctactttatgatatatgtatgctatacttaaagtctatcagaattgtacttctgttagtgagatatttgatttataagaattacagtaatcgaaaccccgtcatttatcgactttctgtgtttgaaatgtcgcacagatcgtagttcctaaagttagacataacataatttaaggattgtcaaggctaatgattaagttgttaactttcttcttatgatttagttgtactttttaacttgatatagcgcacagcaccgtgcgcttccaatccgacctcttaggtttaatttgttagttcagtaaccgtcaattattgaatgtttacaaattaacccatttgtttattaacactatttaaacatcttatttataatatttttgatttagacataggacttatataacctgttgtatccccctactatatttcatacttgttttaacggaaaaccgcgtaaagagacgtataggattcccagagaatttgtcttatagtagaagaatcggccaatggagtatatttaacgaaacgtacatcgagatccaatgattgtcggaatatattaccaagatatgtatagtttaaggcatcgtacaccgcgatgttaaggtcgtcttacctgatttttaattacctctacttggaattgacccattaatagagtaaataattagtgtttatatattgtgatttacaataaagtattttgacgttttt

SEQ ID NO: 2500 - DNA, 864 bp, unidentified
  source 1..864: mol_type = unassigned DNA; note = unclassified Mitovirus sequence
gggtgtagccggtagaaataccggttacatgtcaagttactagagcttggctctaatagacctgatgtaggagtttaactcctgaagggaaagtccgatcttggaatggttggacctaactattagctcacctggaatctagcaggtttgtgttcagaacctacctttggagcagggaaccgtaaatgggttttcacacctatgagcccggttaaagcttaacagggtgcccggccagggcctctgacagggtagataagtaatttggaaacaggttactaagaaaggagagagggtaatccgaactcctgccttatagacagaagcgaccgctcttaaaccggagcgaagtagtagagatgattctctgaaaggacagctggcaaagtcagttgctagattcgtaacgaatctgggagtcaaataggtagggtagcacccatccttactataaggtcccccgaaggggataaactgatcacaaggaccaactcattagttaaaaggagataaggtgcttgggtaaccgagtaccggggtaactgggatctttcgatccaacgattgaaggaaattacgagccttattcctgttagtctgacagggtaaggtgagaccaggtctctggcaaactcatagagttaggaccaaaggtggcgacaccgaactgaaccacagttgcctgcggcctgtccggactagtggattccctaggctcatgctgagcaagaggattcaaaggtccaagtaacgaaatcaggaagagttctgggtagccctgtatagggcatcttgagctttaactgaggacagaaaccgaaggtttcaataatcgacgctaacggtcaattcaatctactaatt

SEQ ID NO: 2501 - DNA, 864 bp, unidentified
  source 1..864: mol_type = unassigned DNA; note = unclassified RNA viruses ShiM-2016 sequence
aatttttctgcacatttattgctagcgccttccctcggcgtaggacggtttgtctatcatctgtctgttcaatgccaaaccatgatgatcacgtattgtcatggtatgtatcagtcttaagactgctttgaggttttcaaatagagggtttgcactagctttgctggtgcttttggggagttatctccccttttagcgttattgcctcatgaaaagggctgtaacgcgtagttttcgctgcttttgactatgataaaagcagcatatttgcctttatggcaaagtcttttgttcttgactttactaagaacaataataggctagtatttgttgtaaatacgtatcgttccacgtattgtagtaaaggaacgcatgttttcaacatgtagggtgcaaatcccttgctggctctttgcgttttgatccactttatgccagtattgcctattgtatttttgagctttggatcagctcagttaagttttaaaaagaaataaaaattaaaaaatatctgtccaaataaaaagattatttttgtcatatttgttttaaaagctggacagcaaacagccattttaattaggtggagaaatagattttctctggttgttattatacgttttatgttcttaactgtcactgcatggaatatttccggttcacacaggttaaggacatagccaccctgtgagtttccggggcatgtttcaggccttgtaacgtattttgcatgcttcatttgattttaatggtttattcctggtaggtaagagtccaatcaggtcttccccgtgggatcacggggtatccctttgaccgggagaaataatacgtcatttacacgcctagagacacgaaacatta

SEQ ID NO: 2502 - DNA, 865 bp, unidentified
  source 1..865: mol_type = unassigned DNA; note = unclassified dsRNA viruses sequence
gaataatagacccgaggagggtggcctgattcgagccaggtagcccctccgtctgttatgtgatgtcctaaattgttgggcctcacctcaaggtgcagagacgattgcactggctgaacctcggccgtaaaacgaaacccggtgctaaatcacaaccacttcattctttcattggttgagcgggtggatacccaacacttacagatgttgggacggttcagcgcgcgtaagtccgttagggtagggtggctttatagcatttagccacaccaggccagcggcgcgtagcctaacatttagaaaattcgttcttccattaataacggtatgctccgttagggagaacgatgcttttaaatcgagcgtgcagcaactccgacctgggcatgtcgttaaactacctaccttatcttcgggtgaagctggtccccggagatccgacaaagccagtgcagcctcctgtgattaaaccagcgagtagggaaccgacgccgacttccagatatggtcgtccgccgagggtgtgccaaccgatcagcgcttgcgctgccagtgtaaaaactgcgctcttgagattagagggttggtgctaacgtagagatggtgtccccgcgggcttgttcctcgtagatatgcgagggagcggcttttgcccccgatccgcgggcatatactaccactcgaacgtgctagacttaaaaactctagtggagagacaacacctaccgccccgacctgcgcaatgtcttcgactgttcaggaattacgccatggcgcccccaagtagcaatgcttgggccggtgtggttgtatagggcacagaaagagtccgctctcccttcatatcccctgaagggcgggaacg

SEQ ID NO: 2503 - DNA, 866 bp, unidentified
  source 1..866: mol_type = unassigned DNA; note = unclassified RNA viruses ShiM-2016 sequence
ccacattaacttccgccccacgcacgccgcatgtggtataatattactccttactttatagttttcatttacacagtatactgcttcttgtttatcctccatatggtgttaaatatattagtagctcctataattgtactaatccttctcataataatcttgataattgttgcaggctgcttttccacagacttgagtgctaggtgttcgcctgagttgcctttatccaaatgctcaacacaacaacagtcagctggccttatcctcaatccataggatttgtgttgtatatatacgccttgtcgatacttatttcactatttgtatatgagcttttaaccctgctgcaaacaaagtccttcttgaggtttactatttacttgtctttcatactagggctggcttattacacacatcattatatggtacataatataaacaccattgatagttacaatcaaatgactaatgagtgatatagtagcatctatttccaatctacagagtgatagtctaaacttcaggtatagattcattatactcacaaccgtatcgctaagcagcatattaatcaacctactatctttgataggtttattaatttgtgagaagcattgttacttacctgtcactaactacaattgtgaagacatagactatatatattatgagtatatattctctcattacccttttataggattttacaacactttcagtagagaaggctgtgatttttatgttactttctataataaaatctgtgttagttgtgattcatcatcccgttgctataagctacaaggtgaaataacaaaaataggaaattgttttgctctagtgaaaagagactttagtgcttcagt

SEQ ID NO: 2504 - DNA, 867 bp, unidentified
  source 1..867: mol_type = unassigned DNA; note = unclassified RNA viruses ShiM-2016 sequence
tgcgtagcgttacacgctacgcacgcttattttatatctcgtttatttgatttatatatatttatttagggataaatatgaagatttctttgagaaggtaggccttggcttagatttcaatatttcaatattcgagatccccttttacacccccctcttttctttttaattggctggtgttcaaaattatttattaattttattttattattcgtattagtatgtttggaaatctttaactattacgaatttcattaagttggagtttcaaaattttcatctcgttccctagattatgtatgggaaaaagttcgtaccctaacgatttattcaatgggtaagtttgattggtataaacacgttttcaattttataactaaatatacttgttaataatctcttttattagagttatcctgcgggatgtcttagacataaaattattaataaaggtatttattataaaattagatttctatccggtttttacttagatcatgggaaatctacagtttctataaagtatgtagtcctgttaattagagggcctcaaatattaggtacgcttgatatttgcctctaatgaggaggggaaaaactaaaggtgcgattcgacatcaaacctactcctgtattcatattcgtacgcgtaagtgcttgggatggataattgaatactgtcttatgtaatgtctggatgtaaaagatatgagcaaagtagcaacgtcttgttaaataactcctcttatcggcgcgtttagtcctagtcgcgcagggacacattcttatgttatgtttgtataagatcattatcagccaccgtgcatatcccctcagaaatagcccgtaaagtacgatttatataca

SEQ ID NO: 2505 - DNA, 867 bp, unidentified
  source 1..867: mol_type = unassigned DNA; note = unclassified RNA viruses ShiM-2016 sequence
attttatcatatttagttttgctccggagaaaaccgggtaacaaatggacgacctttaattgtgagacacatgggggttggagccaacatgatattagagatcatgttcggtagatcatcttcggtctggcggtcatagacttccagggcttgatgtcgtccatggcgtgaataccagttaggtctaaaggcgtttgaacaaacaaacagaaaaatgatggtaaaccatcaccacctttacttcgttgtttcatcattgagacaggcgtgaaagaatgccatccgtggagtcgctttatacatactgcgctattctgaccaatattcgacatactagaaagagaatattgcttattgtagaccagccatatgagtgtaatcttggtgcagtccttgttacactatgatttcaactgccacgtaagtgatcgcgtcactatagaattccaaaaacattgttttgttctaccgtgtcaatttatcatcaggatacaatttttgcttaggcattcgatggttgtcgtcccttccatcgaacccgcacctcggagaaaggtgtgctcccacattacgtcaagttaaggtaaagctgctgttataacataatgagaatcaggagatcatttcctatggattagatattacgatttctgtagtatcctcatcatctgtatggatttgtaccaaatgtagttgtgtttattaagtggagcccgatacacttgggtcgtgtgatgagtaaacaagaaggtttggtcaccatttcttgttgggattatcgaggtccgagattttgcgacatttgaacaaatagtttgagagaattcccacttccatttattctagtgaattatagtgctttgcatt

SEQ ID NO: 2506 - DNA, 872 bp, unidentified
  source 1..872: mol_type = unassigned DNA; note = Posavirus 1 isolate Ishi-Im2/JPN/2016, complete genome.1 sequence
agaatttccaattctcatatcgtagactggctgaaaagttggtcttgacgtcgtgaaaatggcgttatattttgagtgtaagggtttcctgaaaaggtaattcttatattgctgtgaaaacggctttctctttttatctcctcaaactccttattttgcattctggctgttcaagcggcccaaatcgcaagcgtattacatttccttgcgtgcgtacccgaaaatttattgaatttggcttgaattataagcaatgcttcttatagcggacactttgagaatataatgcttgcatggattaatgtatactgtttcaaataacaaacctagacacgcagttgcgttgatggttgtatcaatcacatacgggtgttgaactcgtgttaatcctcgatcgctatatgtttgcctcctacttccaataaaatagattacatacgcgacatgcctttgtggtttacctattggcctctgtcaaaaacaaatcgttcgatttgtagtttcctggcctaaaaagctgggcgcggtctggctctcgtcggatggaaaggtccatcaatggctggttgagtgtaagctccggtgttctggttgtcgcaattccagacgtcgtaataacctatattgcatctgactctaattcttgtggctctactgtatctagttcttgttctactaactctaacaatgctactggttctatgtttgaaaaactctcctatgtcaatatagataatgtccttgatcccgatatccctcacatcactgaagttcatcgcaagcggatttcagatgatatcctcgaatctcaaggctgtacttgctctgaacctattctcactcctcgtgtgtttactttttcaactcttggc

SEQ ID NO: 2507 - DNA, 872 bp, unidentified
  source 1..872: mol_type = unassigned DNA; note = unclassified RNA viruses ShiM-2016 sequence
ctaggaggcactcttttaaacactgtagatcggtcgggtaacagcgcagcgatacaagattcttccacagcccttcaggctgactggaagtttttcaaaatttcaaaaccccaacacttttaaatgtgatcactgctttccactataagactgcttgaacaacagtacgtggttagttagatttagttttaagtaaagaagagtaaaacatcaaagctctgacacggatgccgagcctgtgagtaagccagacaagcagcattaggcagaagtggtaaacgttcaccttgagaaacgtggacggcgcgtcaacgaagtttactttataagccatttgcaatcgcgtcgtgtgggaaattggaatgttttcttttatctaaagttcttgagtataaacaacccgaaaaggccgtagaaaccatgaagattacggacgagggggcgacaggctagttataactaagttatagcgaaatattagtgcccagttgtttaatatgaaagaatcgcggatttaagagaaagtaccatcgtacctgcgtaaatcgtataagaagattgaaatgagtttaagcaccaagcatacctagcgggttgcgactaggcaagtctaacttgacgggaaatttaaagcctcccatggtgtaagtaaatagcgaaagcgagggtctgacagtgtgcaagctcagatgctaacccttagttgttcttatttagcaaataagattaccctaaccaggtaacgacgtcgaaagccaatcaacataggtaaaatcttttaggccgttcatcaaaattaccctggcaggactttcaaaaagaacgttctgctttcaaataattgcacaacaataaaacaagtgaataataaa

SEQ ID NO: 2508 - DNA, 875 bp, unidentified
  source 1..875: mol_type = unassigned DNA; note = unclassified Picornavirales sequence
tctagccgcggtatggcaaccgcggcgcccaggccccgcctgttgttggtccttttcttaacccacttttgtggctattgcctgtctctgcttgcatacaggcatgtgtcctttagtgagttgtcttggactgtatacatgggcctcggtctttgccacctctcccatttttcaccacttttgtaactaagccttctttctcgccacaatataacttgtcacactagagagtattttctacttggcggctctctagggcttctttatgaacacagtgttgatcactgggagtccaccggctacgctaagtttccctttcccccactgcctcacggcagttgggttcttaccctcccaccccctcccactttctctaatctttgtcttctttcgtcttgtttttctgggttgtccccgtaaccaagtcgatcaggccgccagggtctgaatactagtagcaggattagcctcttctagggtagacgaaacacgagggataggaagaagtagatttttgagtttagtttaaggtgcccttaactgggtaactgtcttcaggtctttgtattcgatcgcgcggacaagagtaggctacgggtgaactcttgtttttgttggagaaatcctcataatgtagtgcgacctgcaagtgcattgattggccgtttggtgcattaagttgtgccttacggacatcctctaacgcttggggtacaggagtgctacaccgctcgcgagtacactgctctggaggcgggcctttcattaggctcacctctctcttctttctagcctgcaaggtgacgggctcttgccccgatccctgtcggccgcttcctgcctggcttttaggttttacccactttatagcattg

SEQ ID NO: 2509 - DNA, 877 bp, unidentified
  source 1..877: mol_type = unassigned DNA; note = unclassified Mitovirus sequence
cccaggttgtgaaacctggtaacatgtcaagtgactggagcttggctcgcagtgtagcttgactgaagggcttagaagcccggaagttaagtttgactctctcttctaacgaggatgagttctacacctgttaacccatctgaaatccagcaggtactgtttctatacagtcttcgtaacagggttgaaggagacacgcccgcggacgtgaatcttcttgaaaagtgaacttgggctggggccaccacctaaggcgaagacccatgaaggcaacaatgccaaaaaacataaagagattttctgtaaaagggatttctcgccatatgagacagaagcgaccgggttccctgcccgaagtagtaggaagtgtcagcgcaaacgcgagctagtttatactagtccgttcggccgaaagggccgttgggcactacaggttggttagtaccatccttacttatatggtcccgagagggataagtagaaacaggagaccaccctatagtgttggaccttagaatcgagcagttgtaaaactgtttgaggggcaaaaggattatggatctaggtgtcttacctagtttgtagtctatctaagctaaaactacttaggaaatggtcaaaggaggcgactccgatctgtaccacagaaacctgcagcctgaccgaagaaccgggatatccttaacaggaccccttgttcgccagaacccctaacggggaaggtaagcctttaaaggtaggtgagacctcctggtgatctattcaagtaaataaactccgaaggcccgttggtagccgaatggcatcatgggagataaagagggtcagaaactgaaggctatctattaactaacaatggaacaactaactctacatt

SEQ ID NO: 2510 - DNA, 877 bp, unidentified
  source 1..877: mol_type = unassigned DNA; note = unclassified Picornavirales sequence
gcatgtcattttagtcgcgcgagggggacgacgttaactacccccgccggaatactaatccttagacgttcttccctttggattaagtaaatcttaattacttttaaatggctaatagcgatttaccggaatttttacaaaaatacgtcacaaattttcccaaggccagttctggattgaacaatcaacaaaagcaaagtattgaagaattgagaaaacttcccattcaggatacagactcacctcgtttaatttgcttgaagtgttttcctgacatctctttcgagtctatgctaaaagaagaggtgtttaagtgttgttggtattcatatttagaacatagcagtcagtggaaaaatcatgtccgtgaacgatacgaacgtagtcgacgaattcgtgaagaagagtctgcctctgggtctcctgaggccgattaattttgggacgaaggacattatctgctattatttcttgtgtgaatatacgcgggaagaaaatccatgcccgcttaataatcaacttgtagcaaccaattctcttcaagaaaaattgtgtccattttgtcaaagtaaacgtaggtgtgtcaaagcagaataccatattaataataaattggctgatgtacttccaaattcaatcatttttacagaaatcgaagaccacactaagtcgttgagaacattgtactttaaaggattttatccaggagacgcaactctcacaggcaagaaccatttcaacattcgagccgggtacaattatcctgacggtcgctgtgtggaatttcatcaacgatatggacctcctcaaaacaattatctccgaactcaattcagctttggccactccccctgccccccaatcagaggaaatggag

SEQ ID NO: 2511 - DNA, 877 bp, unidentified
  source 1..877: mol_type = unassigned DNA; note = unclassified Negevirus sequence
cagactcccgaaccatataccaaattgctagatttagtatttaccaagtaccagaacgtcacactacaaattctgcaagatcccgttattcaaaacctcacatcttacctcacaaagaatctcacattgaattttacagcagaccctatagattacaacgctttgtccgcactactgaaccgcacccttgaagctttggtagtgaggttacccaacatgtcacagaccaccgattacaaaaattttgccaaagttatacatcaatccccatcaaacaccttatcattttggaaagaaatcatagactattttattgagcacgattacagtataactcacaaagtttacggacaacctgggacgaaaaagcggttctctgttgtaggctatttggaaagtgttttattgaaagttgcccatcggatcataggtacgttaaaggccgtgttgcacgatatcatagaacctatatttttaaaaattttacgcaccatagtatctcttaccgccgaaattgttaccgccgtatttcacgtaattaaggcattatggactgaaataaagacggccgtcatcgataatcctgagttagttcgtcatttttcaacttttgttaagtgggtcgttcagcttgttcgcgacgtttcccacgttctcgtggagcatctcgtcgagttgaatgaacagtataaggttgtggaattggtattgctatttgtcgtgtgtgttaggtatttgcgcggttacgtcatatctgcgtttatagtggccgccgcaggataccattttggatacgaacgtgtcacggaacataccataatagttatattaattgttattttttcatttatacacttcctatttccagatttaaaca

SEQ ID NO: 2512 - DNA, 877 bp, unidentified
  source 1..877: mol_type = unassigned DNA; note = unclassified RNA viruses ShiM-2016 sequence
cccgtatgcacatttacatgtgcatacggggattattattgaagtgctggggattctcccagcaagatttttacacgagtacgctcggtatttatcttttgaatgacataagtacgcttttgttattcattcaaaatattattttccgaaatttctttatgtacgtttgtgggtatctaataaccctctttcatgaacagaaataaaaagtttagacctaggtatagcagaggagtctttaaaaggccttactggtcctgatcatgaccacttaaactgattattctaaacagaattcaaacttatacactgtcgggtgtttaaatacgatgtgatgaaaacacttataaaacatagtgtcaactgatacacttgtacacttatatacaagagatctaagctgtaattaacagcagctgctttgttaagtttacttctttgcagtgttttaacacggaattcacatattcctgcatctaaatgcaaatgtgatctttgcctatgatatgtgcatagctgcaccgagttaacgctgaacgtctctcacaatcgtgagaactagtatgtagggaacgcaaaacaaacgaggctcagtagcaagcgttttgaatttattaaggtaggcttgctcatttatataaatgagtttcatatctggaagtaatgaccccagtatgatgagaggccttagtagataagataagctaacttgtgagttgaggatggccatttgtccgtggaataacatccaatgatgctcctgacgaacgttctttagcctaaccagctatcgaacccaaaggtgctgtgccgactgtcaaagattttatctttacaggacacctgtacagatatctttgacacgttgcatttaaca

SEQ ID NO: 2513 - DNA, 877 bp, unidentified
  source 1..877: mol_type = unassigned DNA; note = unclassified RNA viruses ShiM-2016 sequence
gttagtagcccttcttttataaccccgtaacaaaaggttaaacccttgggaggacctgaagcacctaaaagcgcaagatggaaaagctactaaaacaaataattaagaaacagatgttataaaacatcacaccagcaataaaacattaacgttaactggttataagaactccttgagaaagagtatcccagttatattcaaaattttaaaagaggttacttaccaacttaaccgatatttcaaacgagcgcccgagttagccagacaaggaccagtagggagaaatagtaaatgttcaccttgagcaacacggaaggtgcgtgaatgaaggatttaatacaaccgtaaataatcgcgtcaagtgggaatctttacagagtgtagataagagaaaatttttataaactagagtccgaaaaacgactgttccgaacaaagtgttcacgaatacagttgtggggcgccaagcgagacaaattaaattttgtttgaccagttagtcccagctcttttaactattaaaattggaaactatctatcataaagtagagttagtacctttgtaaatcgtataagaagaatagttataggttaacttatttaggcttatttgacggatagcaatcaaactactagtattagtagacgggaaatttgaagcctcccaataaataagttaaatctagcataagcgtgaggccggcagcgtgtgagaccggataacacctcatagttcgcgacattgaatgtagagcaacataggtattttgtttcgaaactcgttcaaaattactctggtaggaattcaaaaattgaacatcctatcaccaaataatcacacaataataaaacaaacttaaataatcatatatcaata

SEQ ID NO: 2514 - DNA, 878 bp, unidentified
  source 1..878: mol_type = unassigned DNA; note = unclassified dsRNA viruses sequence
tgaataaaaggccgaaaggctggattttcagagcatcgctccgaagtccagctaccttttatattgtccacttaattagctagtggatgatctcaggtcgggagacaatccggccagtgtagtagggggcaggaaagaactaagcacgtgcttatcggttgagctcacccaacttgggctaaactgtagcgtgtggatactcaaggtgtcaaggtgcggtcaacatgcaaacacgaccagttccgaaaacatccacaaaccttgaggcctactacagagcgtaagaatgctagggtagaaagagctggggctataacccccggatctcttatcaggccagcatcgctcagcccctctttttgtgtaaatcccacccggtctagcggagtgggacgcatataaaatgagcgtgtgaaatcgctctaaccgtccaagcacatgacactaaactgtactcgcccaggatatggcgttaaactgtaccatccgcttttgccagcggttaaaacaatggcttttcataacagccgcgtgtgagtccgcgggataataagtgttctaacagactcaaaaagacatcctatttccaagttttcgtcgctacgtcaaacgtcggcacttcttggatctggtggggtaacatacacgtcaagtatggtgtgaaccggggctacacaactaccggggagctaacgtaactgcgctggtgctctactttcaacgtgcttcaggaccgaaaccgtccgtaaaccaatgggttgcacagaaagtaaaggcgtagggaacgtgcctgggacaagaaccaggtggacagactgacactcaccagtgccttcccgatcgaaggcagtagcaaacagtcggtgcgggaactccgc

SEQ ID NO: 2515 - DNA, 879 bp, unidentified
  source 1..879: mol_type = unassigned DNA; note = unclassified Iflavirus sequence
cagggattttatccctggggctctttgagaagattcactaacactgcgttgtaagataaggaatactgtcattactcactcacctcctagatcattcgaaagaggtagtatgatttcagatatttaaactcgttacggcactgtggtagcttgcttttcaaactcgaatcaccattcgtttcacaaaattcgatttagtagtatgtctcattgactttacaagtaatcatataatacttgttgttttccatttgaggttttctacctcctaaatttaatcaaaattatgggttttcttcccgtgaaattcttttagtttttaggcgcttttcgaactttgtgcgaaacaaagcggaccgtgatatatagtggaagttcaatgtgaggtaacggaaagataaccgctgtgtaaaataggacttattctatgtgtgctctttgagaaattctttacctagtattttgaatgagatacgatggggaccacatagttttatcctagcttctaatatactctcgtatctgtttggagcgattgagaatagtagaagccataagttacttctgtgcacttgctagtaaaacggaaactagtcacctcttagcagtgagatactgttaccgggttggcatccggtatactgacattgatggaggttacctgatactggcgcagagctggtatggtgcattggatgagtgcttgcattcgccagtggattggtgtcggctgcacgcttataacgatgaactcgaagatgggatacctgtttaggtccttagtgagaagttatttgcctgtagacctcccttgtaatcgatgaaatctccggtgcataaaacgggctcagtgaagaacacagctactttgatttcaat

SEQ ID NO: 2516 - DNA, 881 bp, unidentified
  source 1..881: mol_type = unassigned DNA; note = unclassified Sobemovirus sequence
gttgatacaactaggtctttgcgacccagtgcgtctcttcataaaacaggagccccatccactcaggaaagttcggactggcaggttgaggctgatttcatcggtatccctgttggaccaactggttgagagggttcttttcggttttcagaataacctcgagataagccgatggaagcagtgtccatcgaaacccggaatgggtctcacttctaaggagcaatccgatgcgttgtgggacgagctgaagttcaagtccaccctagcccccgcggctgaggcggacatatcgggattcgattggtcagtgcaacattgggagctaatggcggatgtcgaaatgagaattcgactcggagacttcagcaaccttgctgcaagggctgctaggaacaggtttacttgtttgtcgaactcggttttccaactgagtgatggcaccctgatttctcagggactaccaggcctaatgaagtccgggtcttattgcacttcgagctcaaattcacggataagatgcctaatggcgaagatcatcggctcacgatggtgtatagccatgggtgatgattccgtggagggttgggttgacaatgctgtagaaaagtatcatgcacttggtcatgagtgtaaagaatactcagcatgcgcccggacatacgtgagcgggagcggagaacaaacccttcaaacggttaatttctgctcgcacgagttgtccgagggtaagtgtcatcttacgacctggagcaaaacgcttttccgattcttccatagtacggctccgtgcattaggagtctggaaatggaattagcgggcagcccccagtggcccaaaatctatcggtacctgcgtcgggtgggcttagcgcccgacaaag

SEQ ID NO: 2517 - DNA, 882 bp, unidentified
  source 1..882: mol_type = unassigned DNA; note = unclassified Marburgvirus sequence
cattaagtgtgcaatgatgagaactttaagataattgctactgagcccttcttctgatctactgaaatcaacttgggagatttttgagaagctgataacttaatgtgaatcaacagtttacgtattatcgattattatggtttgagattcaactgttatcatcgtcaagagtgacctttcctatttgatgcattaatgttttaaactacctcttaagcctttgtggatggtctcaatatgcgcgtaagggttaatttaaagagatttcttgttgcatagtttttcgtgttactgatttaggcttgaagacatagttaagactggccgaaaatgctctccagtcaactccatttcctctcaggggagacgtgctgtccaaagagtcttaatccataatcaaccattgcaagaattaatttactttttccgttatacttatctacattaattctttaaatgtccagcattattaacaacttgccttacttcaatcttttggatgcaaatcataaggaaagatgagccactttccctctaccctaagctaaggaaatttctcttatcagctcaaaatatgatccgtcaggtcacgggccattcataatctgtttgagcgtgaatattgatcaaataaccaaatgatgttgcatttgtatagacgcaattatcctttattaagaaaaagacaaatagaacacagatagttgacaaaattttactttgataaattttgcgaggaattataaaaatcttgaaggataatttatagtagagtagaatcgaagaacattaagtgttctttgttagaattattcatccaagttgtttttgagtatattcgcttcaatacaactcctctttatatttgatttaagatttaaa

SEQ ID NO: 2518 - DNA, 882 bp, unidentified
  source 1..882: mol_type = unassigned DNA; note = unclassified Riboviria sequence
gcgccgtaagcgcgaaggaggacacaggtacccgatgctgtactgattaattcaggcattttgcctggtaaagtcccagggccatgggaggaaatgcccatggcgagagagggaagacgacattgcaaaaccagggtttgcccccctctgccggagtcgtccgggtgttggtagagtccacccgtagaccgaggcttattcttctacactcactgtgcccgtagtgagtggcgagcctgctgacgctgttttttccggagcgtctgaggtgaaggccgtgcgagagggggatttagtcacctccttggtttggccaccttaactcgtactgaacggggcccaggctctttggcacgccttttgcgtggcaacactggctaccaaccggcgacgggtggatagttggaagccccgaatggaatggctatgatgcgacctggcgcgacggtggggagtctcgttctgttacctggtttcgccaggagattgactccgtcacaccacatcaatccagggccatgctgttgacaccgtcagcacatccccagtgaacctctcatgttgagtcagggccgacgcattttgctaggccaggcagggtcgagccccttaaatagccagcagcgagcacgttgcctgatgcagagtgattcctattcatattatgttcactgcctcccattgcttgagggggagggttaagggggaggttgatcacctccgggactagtctgaccggttaggcatggttgactgtgggtaaccaatcccacttagggcgttttgcaacacttgagcccgtttggctcatgtgacctggtatcaccaccggttacgttactttaatcacggcgctgtctgccgtcattgcctttattaaag

SEQ ID NO: 2519 - DNA, 885 bp, unidentified
  source 1..885: mol_type = unassigned DNA; note = unclassified RNA viruses ShiM-2016 sequence
cccaaaagggtctggtctatgtggcacccgattctcggtgcgggtccttgtttgcggatgccttgggccggccggggatcgttgcgacgggcaggtgctagccctagcgtagcctccttctacagttctcctggctgtgggaggaggtcggactgatgtcagctgcttgggtaaccaagcagcgtaacccgagcactctccttcgggagggtgtaaggtgtgcgcacactcttacacaactccttggtagaaacggcatataaaaaccgtggttatagcaaccatgggagactttttacccggccctttctagggcctatagtgatgccgatgtgaggaggtggagtgaacaggagataacaacatgcaactacaatctgagaatgcatttcaaaaatgacaccctcttgtagatgcccgtgtagggccagccaaaacgtcatctaagggcggggagctcgcagcgccccgctgatggatagggcgtgctaagtgtggggtttatttaatcctgctaaatgccgagagactgcaacggctgccaaaggctacaggggcacagtcccgtcgtacaggtgcgggcgggtgtttatacctgtagtgagtctgcgattttgacgagtgatattaacaagcgatattccaagttccaggtccctgagcaccttattcgagctatcttatatttcatacaaccattgtgtgaggcgttcttctaagcgttccgtcgcgtccttttcaggacgttagatttcgagtgtctttgaagtgaattaaacagttcttttcagaactacccaatcgcccttttcagggcggcaaggtttcggtgttttcaagtgttttcagttaggccatccaatttcaaacgcttctacttgttta

SEQ ID NO: 2520 - DNA, 887 bp, unidentified
  source 1..887: mol_type = unassigned DNA; note = unclassified RNA viruses ShiM-2016 sequence
gccgtagtgccaggttaacgtattaattaatgtgcgggacacgtatgagccgggcccgtttgggtcacgcggcacttgccgcattaatacctgttggttgacacagagccggcagggtccacgcgtctcgacgtttgcttcggcgggcaggcgtcgcaacacagagtgccgctggcgcgtggatgtgagaccgttccttgtttattgctttacttggataggggtggcggcgcggatgcgccggcccgagtcataccccgaaggttgcctcatgcctgagtagcggagggtagttccgtgaacagcctggaagccgggtagcgccggtgacggtgagggcgccgctgttaaccctgtgcgtgggttggtccctttggagggggaacgtaaaatggcggttccgttgtgtgagtggtgactcgaaggattcgagcctgcgaggccggcaatgctgcgcttgctacgcagcaaccgtgaatatgtgggttttcggtctggatgtttcgttcgcgtagcgcgcgcgggtgaataatcgcctagggaggggcgacacacacggacaaaatggaagtgcgggggtaacggcccgcttaacgcactgcatgggggacgcccccccctttcgcgtgtttcccgcacgccgtaggatattgcatgatagtctgctgggagtagcaaacccgttacagacccgtagtcggctgcggcgccgacgaatttaaagtattgtaggccatatttcaaaactgcgtcgagaacactaccgggcgggccggtggtttcctctaaggtgcatctgtgtcgcactcggcgccacgcctttttctccggctgccggtgggggcagcttgcgtttttcgtcttcgcaatcgggagtgtttttagcg

SEQ ID NO: 2521 - DNA, 890 bp, unidentified
  source 1..890: mol_type = unassigned DNA; note = unclassified Riboviria sequence
cacgggttaatcccgtgcagcgctctagtagtatttcaaattttgaatcgttacagtgcatttttgttgactaattttgttatctagttcattgtcagttcgatttatcgttcgtgactataatgttcgtagaattttcacctttagtcttcgttaaatgtattgtttgttacaaaattctttgactactaaactttaggttagttatatattatagttaagataatttatatatatattataacgaaatatagtattaataaaatataaaatacaaggtaccgaccttggctatctctaacaactattaatgtaagtgttatgtattttcactgtcggccagtccaagctcttcatgggcgagacaaacagtgacaggagcacaatcatccctcctggcaacaagtacctctcacacttttattaatagaatgattgatagtgtataaataataattttaaggcaaggttagattgtattgtaaatgtctacgagtagatgaaacggtctttgataagtgtgttaaaatggggacccctccaactggtttgcagccagcgcctactgccaatagacataaaacgacataatcgaaagtgaccgctttatgtgcaatgctaacgaccactcttctgtaatggagggagtgtaattcggctgggcaagtcccaaaacctcgatgacgtgtttatccacggacttcgggaatatatctctaagatatagtcgaacttctgaaacttaaatttacggacgttttagtaggaagattaaaacgtgtccatttctttcatttcttttcttatggtgacaatttgagtgattatttcagagaatttgcgcaaatttataaaagttatttcccatacacatttttattcctatcacc

SEQ ID NO: 2522 - DNA, 891 bp, unidentified
  source 1..891: mol_type = unassigned DNA; note = unclassified Mitovirus sequence
ccggccttcctttctgtccctagccaggcagataaactctcattcctatctaaatcctaactccggtgaggtctctgttaacgctgagaaccggcaaaacgcactcaatcaatgagttggccacttgtgatgatgcgtataacccttcctactcttggctagaggaaagaagggtttcctatacatgctccctcttttcctttccaaagtatgttactgtccctaatcttaaacggctgagtagattgtctctctagtatcagcaatgcttgaccatcctagctctcccgaagattgatcgcttctgggtcttggggtgtccgagataggaacggacataaatatatcattaattacattcatgaagtaagactcctcttaactccctactctactctagtcctaacactgttgaggctaaggtaagactgcggtcttcttagatcaactacttgtccctaattgcttccacttcataacaagtctcggctatcacgagcctcggctccggtagagttacttgagtcccttaagtcccaacgtccctgtccttaatacatctctctgttccctttctctctttcaaaactcccctctgactccttgaaagcgtagattcaggtcttggtaagcgtggcaaggttaataactcacaaagacttgtaaaccgcaaatccttattagtagaacataaatgattgttgaagataagaaggtctacccctcatcacttgtagggtcaacatgagtgtgcccgtcttgggtatgttactaattcggtacctatacggggggagattaaagcccgcacgtaccatccctaatcgaagatatctgtgtgatcagattttaatggacttactatgataagtagtacagcagttttcagta

SEQ ID NO: 2523 - DNA, 897 bp, unidentified
  source 1..897: mol_type = unassigned DNA; note = unclassified RNA viruses ShiM-2016 sequence
gtgtttaaatttaggttaataccttcttttaaacactgtatacacacctaaaagcgtaaggtacaagaatcatacaccacctaaaagcggactgtatgtttaaaacaaaccccaaaatccaattaaaacaaaagcctagtcagttaatattaatctgatttaattcaagagatgtgggaagtctcgataatattaaccttttagttttaagttcaaagaagagtaaaacaactaagctctgacctcttagccgagccgtgaaccgccaaagaaaacgcagtaggcgacgagggtaaacgttcaccttgagaaacgatgaaggtgcgtaatcgaaaacttaattaataaattcatctcttgacaccaagttgagtgggaaaatttattagtttgaaactcagattgtaataaaattttgaaccgaaacgataagatttctatgaatgaataccttatcaagggtgcgccaagctagttagattaaattcgaaacgaaatactagtgcccattcaaaactataaaaacaattgaaactttaaactaataaaaatgtaccttcgtaaaccttgctcttttgagagatggatattataacacataattgcttgctagcgggtagtaactagccaatttattgaaggatgaaagccacatcccattatgtgattaagttagccttttggcgtagtgcaggaaccgtgtaagccctgataaaccactatagattatgacattgaattcagatcaacaaaggtatgcactttcggaaacccattctaaattactttggcaggacttcaaaattgaacgttctgctttcaaataattacacacaaaacaaaactttatttttcatttcaacttcgtttaatttgactttgaattaataatcaatt

SEQ ID NO: 2524 - DNA, 898 bp, unidentified
  source 1..898: mol_type = unassigned DNA; note = unclassified dsRNA viruses sequence
ttgcatgcctgcaggtcgctagaaaagacatggttctaagtatagtcgacaacggtctattgaagatctcttgcagatggaagatgccgttgatacatagccaaccttagtcgttagggtaactatgtatggagagagtttagtcagtctgatctgaagaactactctctgtcgaacgataacagccatttcattttcattttctttcttttcatttttgttccattaaattcttatttatttcacgttctgcgggataagaggccactaccgcgatagaaattagtgtggaattaagcatccaatcaagaagcagaagtccaacagccagttggatactgtaagctggaacgggattcatgtccgtgcaaggacctaccccctctacctttctggagctccgtgcctacaaacttacctgacctagttatgcctagggtggtatgctgcgtaggagcgaggagactggggagatgcgggacattaagagtaggcaccgagtgtaacgactgcgaagctttgttcttggttagggaacagtctctccggcatacccgggggtgatagcatgcttgtgggtcttaattggctcgctgcttgtaggttaagtaaccttcttttcctccttttccactacactagtagtgacgataaaggttgctccttcctttcacttcagttattcttccgccgtcagcgaggaaacagttggttgcaataatcttggacttaagtgtttgagatctattgactgctgcgtacaacgttgaggtatcgtttgattgatttggattcttcccgcgctaaacggttaattttagtatcttgaagtggtagccccacaaattttcaaactagcgtgatttgagacgccctgagtggttaatcgcgtttaaaa

SEQ ID NO: 2525 - DNA, 900 bp, unidentified
  source 1..900: mol_type = unassigned DNA; note = unclassified Riboviria sequence
tttcaccggcccttggttagggccgggacccttggttagggtcgttaatgttgtgttttgggattcgatgagagcaccattttggtattttgacaccgggcggtacctttgcgcgtggggcccgggtgcgaccagacacactcacgttgttgctcgtcaacgtgaggcaagatggagtgcggacgtctggcgcatgtgaaagatccgctcccctgcttggggagttgcgcggggccatatgccttaccccgcggccgacgataatgtctagctggtccgtcggcgtgaacccttatgcctcagtagctgcggtgctgcgcggtgaagagcctgggagacttggcacgtcttacggtgagggcggcgacttgccttcttggttgggttgggagttggagagctcccgtgaaagtcgtctggtgtggcggtaggccggcgaagcttgcgaagtatttttacagcaagtggattggcgtctgagtatcccgctcgggtgtctaatggttacgcatgtgaatacgttttgcatgcagaatacctccgtcatggcgttgtccgctttgtgagggcacgacctggtcgccgtctgtttggcttggcagagcgcgcgacttaccacaaaatgtctacggtttataaaacctcgtatgtggctacacccacttattaccgaatcctgagcactctttccacacgtgatcttttacttgcggcagtattagatcctttttcatattatgcccacacgtccatccttcgacgtgccgcactgatttgggcttgttttgatagtagcagccagcatggcttaaggtgcaacgcgcagttcactgctactctacgatatcgctgtcgcggttctggcgtccgtgactcagaaaacaatcatcgtcattcagt

SEQ ID NO: 2526 - DNA, 901 bp, unidentified
  source 1..901: mol_type = unassigned DNA; note = unclassified Caliciviridae sequence
cgatatggcatacgtaaattctttactcttatttttcctatccctccacaagatggctcacgagcttatcgtgtggagtctctttggggtacgggcgcgggttagccgcgccccaactcccctctttatttcagttaggtcccccacttcccggtggcctggctgtgccacctatacacctggcaccacttttgtggtctcgctgggtgaaggccccattggccgtctggtcacagcacggcccaacctagtacccacgaacgcacccaactgagcgtcgcggcgtcatgaggcgggcggagcacccccctggtaacagggtcctcccgggccacaagccacgtgggcagggcgaaggtgaaggaagggtcccccgacccaacctcaagcctgaacccgcgttcaccctcatgatcaggcaaacccagcctggcggttgtttgttagtattggcgaaaagctggcaccgactgttcccaagaccacccaatggcaagggggctggtgagtagatgccctgcaggtaccctttcggatctgagcaggggcccttgactataccgttccggtaaacagggggtaagaaccatgaaagcgcagcccccacaacgggttcgtccaagggaggggtacccaccccgacctcacgacacccgtcatttcctttttctttttcctcttgtttatggtgacaccaatggtttttgagtctctggcgacttttgtttgtgtttggctcatcttctttttccactcaattcgcctgggcgcacaactcacaaccatttttggctttttgattcgctatttgattggcgtttttctttggctttgtttggagtgcgtggactttagaccctggtttctttatactgactctgcatggtccagatagaatatc

SEQ ID NO: 2527 - DNA, 903 bp, unidentified
  source 1..903: mol_type = unassigned DNA; note = unclassified RNA viruses ShiM-2016 sequence
ggactctatataggtttcacaacctatatagagttccatttgattagatattgtccgcttagcaccggaccatgcttttcttaattttattgaatacttacattctgaataagtatagtagtctcctctcaggttattactataccctgtttggagtgtctactttattcctaataagtttcaccccttattagttatgtttaagttttagtgtctataagcaccttggtattaggttctttgaccctattaccaatgagtagcttacctaagtatacgtttttcgaaccgtataaattgcttaatgtattcattattatttattttatctcgttgataaagaattatcaaaaataagagagtttgctaaacttcttaaatcgtctacaaggcgcagtttattttatttctctgttaaaaatattaaccaattttattattgcttcaacggtaaatttgtacttgattaaaatcaggagtacattacccgtgtttagcttacgatttacgaatttaattaaattggaaatttgattgtaatgatttagatttgacatttcaattgcttagagaaatcccactttattaataagtttcatttacgataaatgcactcgcaaaggacgagtaaagcgcattttagatgtataactgttattgaagaacaattggttctctggattttgattaatgcgacgtacagcatgttataaatcccaatactctttaaagtacccttagcttcagcacgtaccagcgtgtagggagttgcttcccgtgattcatataaggctatgctttgagatgaggcatttagattgatagtttcaactttttatttatttttgtgattgttatttgttagcttttatagttactgatattaaccctttctttttaatc

SEQ ID NO: 2528 - DNA, 905 bp, unidentified
  source 1..905: mol_type = unassigned DNA; note = unclassified Iflavirus sequence
cgcgggtttatcccgcgcagcgttgtagagcataatttcactaatatttcaaagtgcatgtctattgtaaattatttgtgttagttcagtttgtatgttcctaaaggttcgatacttgttcgtaatacagagatgtttcctttgatggcatgtatttgaatattagctttgtatgtttacgtcatagttttaaaataaattattttgttagttattgtatatattatatcattgtatagtattaataaaatataatactcggtactgaccggggctatatctaacgacttattattttcacatcatgtgttttcgtagtcggcctctatataattcctttcagtgggtattagtaactacgacaccggcataatcacccccggtggcaacaagcacctctcatgtgtttataataagaacgatttatagtgtaaaaataataattttaaggcaagactaatttctattgcaaatgtctatgagtagatgaaacatagtgaagaagtaagtgtgttaaaatagggacccctctaagtggctaaaaccaccgcctactactttttcacgtattatgacataatcgaaaatgaccgctttgtgtagaaagttggtgaccctcattctgtcatggaggtgaggttaatccggctgagtttatctcaaaacctcgatgacatgtgtatccatggatttcgggaacatatctctaagatatggtcggacttctgaaccctaaatttacggacgttttagtaggaagaataaaacgtgtccatttcttattcattttcttttatggtgacaatttattgagtattaacattattttgtttgtttgattctatcacttttacagtcttgtgtattctttccactttattttgaatttattaaatctttaaaaa

SEQ ID NO: 2529 - DNA, 906 bp, unidentified
  source 1..906: mol_type = unassigned DNA; note = unclassified RNA viruses ShiM-2016 sequence
tctgtagattcgttcttatgaacgaatctacgcatatgcttgttttggctgcaaaaaacagccacttcgagaagtcgaagccatacatttagtaaatcgccgcactaccgtagcggataaatgatggtggaaaccatcacgaagttacgaatgtatgacaacgcgaagttatttccgtaggagcgctcactccgaatataaaatgagcaacacgtggaaaggaaaaaccacgataaaacaaaccggcaaaccatttgcctatatgtaatttgtctatttgcttttgcaaagagtaaccagggttttaacccactagtgtacaataagtttaaatcgaaagatacctctcgcaaaaacactagcttttataaagaaaacataaaacaaataaaaattatcgttattatgctatctgtatgctgaggtcacagctttacaaaagacctattaggtgatctattcaccttgataggagttaagacactcctccaacaacagtcatcatttagtccgtggctacttagagccacaaccaaacaaaccggagtggaaccggttgacacagccttgtgtgcttttatagcaccttggcactcaccttgtgagtgtgtcaaacctttagagtctcatggatataatacctgagaattacataggacacaaggaattagacgcgaaagtccacctcagagtggtagacgccccttagtttgttcctcctgttgaagacaacctttgacattactttgactagacaattaggtcccgatgaatatagagtgattagactcttgacataggaaagcctctgattgttgaacccttgtaatggataaggaagttggaaatttgagtgattcttggagaaccggtaaaaatagccgggcccttgacttgtaaatcaac

SEQ ID NO: 2530 - DNA, 908 bp, unidentified
  source 1..908: mol_type = unassigned DNA; note = Riboviria sp. isolate nut157pic1nc genomic sequence.1 sequence
ccgtgggacttttcagacccgagctcaatcaactcgccatgatgcctgcttgcactattcattctacatatggcccgcttctggttttgactaaaaagccaatactgagctgcgtcaattccgataaaccgaactaaatcaatttatcagcacttcgttccagattctgtagggtagaagttacaagactacttcacctttcctagtggatagcacataagaaagtaaacatgcgttgatttgtttttgtgtttgctatattgcttcataggtaaataagagaagaatgggttcaattcaaacaaaagcatgctcgtgagtgaatcgaagagccgtgttctaatattatttagagctagacagcaatatcgtaaacacaaaaacaaatcaacgcatgtttactttcttatgtgctatccactaggaaaggtgaagtagtcttgtaacttctaccctacagaatctggaacgaagtgctgataaattgatttagttcggtttatcggaattgacgcagctcagtattggctttttagtcaaaaccagaagcgggccatatgtagaatgaatagtgcaagcaggcatcatggcgagttgattgagctcgggtctgaaaagtcccacgggtattcaggtgcaggttctcttgaaaggttttacttctttgaagtaaaataagacaccgagaggtgtgtcctggactatgctggttaccttagtggatatggcttgatgaactgagataagcaaacattcgtgtttgttgcttgagcctttgattgatgtatcgattttagtagatggtttgatgaaactcctactgcgagatatattttaacccttttatgaaccgacgtggaatttggtaagaagaaagggcgaacgatggctttttattttctctcatt

SEQ ID NO: 2531 - DNA, 909 bp, unidentified
  source 1..909: mol_type = unassigned DNA; note = unclassified Picornavirales sequence
cgtatcccttatgggatacggaccttttgttcatgtcgatttataatcagcactaaatacgtttagtaacgccattgtaataggacgcttgtcgactattatatataagagaattattacgcgtatcgtagtgtgaacatttcataacgccattgtacgtatcgtacgtttcaaaaccgcttagatttgttgtcgtacgtgcgtatatataagagaattatgccgtgttctggttatttattgatgtgttcatcaaaaacttttgataaaacacccattttatttcatttgtagatatttcatcattttagcttgtaaatatttaggtaattatattttgaagtgaatattatctgccagggcagcactgatatccaattatctgacctgacagcactgttattcatagatatttaataaaatgagtattatttgcctagacagcttatatctgcctagacaacactgtcactcaccaaaaacattttataaaatagaaaatggcgatctttgcatcttgttgcaattaagccaccaaaaatatatttatttgattaatgacaatatgtagccttttatcatttggcagatggatgaaggattactcacttgttgagcgtaccaattccacccatttgactataataaattagcgtatcatgttatcacccttattgttgttaataacctaggagtccagactcatatcacgggttagatgagataaaactggttactgcgtgtcttgcatagggctgcagcgaaaaatttctatgcacaagtattggatcttgtaaaaattcacgctttgacttttgagcgatatcacggtcacccataaattttcaattgtacaacctgcccacgagagttaacgttattttgtgtttattatacgattttattaca

SEQ ID NO: 2532 - DNA, 910 bp, unidentified
  source 1..910: mol_type = unassigned DNA; note = unclassified Picornavirales sequence
aatcctagggggcccctattttaagggccccctagatcgcgtgtcgtacgtcttacgacttttcatttattattttatttgaagaatttcctataccgcccttcctggcggtttcaacatcatatgtaatatatttttgtcttaaatttagttttttgatattacatatccccgttattgctcatgtgtgtttctcttgaagattcacgtatttcgaaacaatttagttgttattctattgtcctggagcaatatcgtattcagcaatgcgtttagattatgccaaatcctttggcgataacaaactcagagcacctgtcgcatagacaggccccccattccatgatatcatatcatgttcggataattagaagttccgaacctctagcttttattatgagctgcttaaatattcataattaacccaccccatgcagagtagactgtccaaacatttcgttattcaagactttttatagctcgataaattgtcctctgactctcaatcttatgcgctagaaccgaaatcttagcttagttctgatcatcctatatttgatctgatgactataatagttagactcgaacctcgcttagtctttaaagaagaggtaaccgtgtattatttttaatcttgctttgctagcagattgcttatactacccacggtaatattaggattgcaaggccacattagtgcctcctgtttattacccggtatttcaaaaccacggtctgaccgaaacttgttagtagtacttgcagaaatcagcaacatgaatctgtaagtggttatgctacaggatctttcattaggtccgcaaaactttcttaaggtttcaattcccagcgtcctttcgtcttagttttatactacttcactggatactaaaacagttttaccttaacc

SEQ ID NO: 2533 - DNA, 911 bp, unidentified
  source 1..911: mol_type = unassigned DNA; note = unclassified RNA viruses ShiM-2016 sequence
cttgctatgggtcaaaccatagcaagttatactccgaagcagataagcctctcgggagttagtattgaacgattgtccagtgtgacgatttcgaattttatagatgtcctattggagattttctccagtcgaacttactagatattttatttcgtcatatttgggttttcttttagtatatattgtgttaaatcaaacccccccccatttttgagggaagtctttctacgtttttagactagccagcaacaattttgtcactggtgaaccaaaacgacggtatgacaggtttgacatcctgttgagtccgtgcctttttaaggaattgaacgtagagttctcaaaattacatttactgtggtttcaactgaaaagctctgtaagcagtaaaatgtgatttttgatagtgtttataagtaaaatattacttggtttagccgagtcctaggcgaaggtctgtgattagttgacctctatgcgcgacttacgagttgtgtttaagtaacaaggcgtcataggcttagccgcgcttatttgatagacgtgacgaccatctcgttatgttcatatttgtagatctgaagagtcatatcagactgattatttgatcaatcggtgtgcttacgctcaatatatgccctaagggagcaatctctccgagtcttacgagtccgttgagtgagagtgttatacaccaaatattgtgataatgtcatgagattatctactctaaatcttgtgttaaatatgaaccacctcttgattatttgtggttaaaataggcgctttactaaaagtagtaatttgaacagacacatgaaaagtggttttggtgattgccataagagcaaaattttcacccatctaggccgatgtaaaccttcccgtgtggaccgcgtgcggaacggggt

SEQ ID NO: 2534 - DNA, 913 bp, unidentified
  source 1..913: mol_type = unassigned DNA; note = unclassified Picornavirales sequence
cacctgacgcctgtctcttatacacagcgtaaatcattaaggtgcaattaatcaatagttgcacaagaaatcctgggaggtgactcccaggatttcttgtgcaactattgattaattgcaccttaatgatttacgcctacttggtgttgacacggctttttatttcacgccgacttttttgcgaaacgcatagacgccgcattcttgtcgacacggacttactaagcacgctgactatatgtagacacggatgatttttgtttagatctgactactggaaagacagttgactcaaggaaagacttgaaaaaccccacattaccatacttaattattgtataagtggttttagtcgctgacgtaaccactacctctggattagttttagtcgttgacgtaactattctcctaggttaagtatttcaagaatatcaatcttggtacttttatactttaatttatttatcgataatacattagggtgttgttctttaagagcagcccgaccataagacgaaataggacacttggatatttattaccggtacttctaacttcttattgaggtaaggttttcggaccctcactttctaagatgcattagtacttgttgtaggtacccctgttatcagcctatgcccccgcaagaatcatacaaattcttttgaatacgatttggtttgacgacgaggcgcactatgactctataccgttaagtaggagagggacatttctatattatacttaggttgttaccatctctcttggcatatcggcctatgccagttatagtgtttgtaagcagtacagcgtaagtctgcaagaacttcgtaggagtatacctccgaacctccggttaaaggcgcgcacgataataccggttgcataaaaactgagcgcacaatgtatcaca

SEQ ID NO: 2535 - DNA, 913 bp, unidentified
  source 1..913: mol_type = unassigned DNA; note = unclassified RNA viruses ShiM-2016 sequence
gcccatacacgcattcacgcagtacatagcgtcttggcggctgcgttgggtggcaggacagcctacccgttactactcagaggattcagagagtaccaagacacttacattggcttgtgcgagccatgtatgtacatagtagcacgcgacagatccagcaagaattgaagaatgttccactataagtggattagatgtacccagcaaagtccttgataatgctggagtcctgtttgctgatgaggcgagcatatgcgcggtggggcctggtggctctgagtcctcgtttttgcttgccgactccggtttgcaagatttgaagagtttcttttctcgaccagtcttgtggagtaggtccactttgagcacgaccccggctgtgcttacaacccacattttgacgtggacggagttgaacaatttgactccatcttggtccactaggctgcagggtgtcaggggtattcgtggcactttggtgtttaccgtggaacacaacgctaatccttttcaacagggattgctggttgcctcgtttcagtatggggacgaccagtataggcgggggttacggccatcattgtgtacgcagttgcctcatgttaggttagacattgcgcataacacttcagcatcactcaagattcctttcaggtcagagtttgagtatattggaagcgcctttagtgaagttaaccatgtttatggtactttcgctttgactcaggtgctgccaactccctctttgcccaattcatccttacctgtttttaaggtgtatgctcattgggaggatcttgaggtgtttggtagagtgccgctcaatggcaccacatttgtggttcctcagtccggcgccaatgtcaagccgcgcggattgactccttctgatagggagttagaggataatggc

SEQ ID NO: 2536 - DNA, 916 bp, unidentified
  source 1..916: mol_type = unassigned DNA; note = unclassified Flaviviridae sequence
caggaagttagttattttctgtgtgtattaccacgtgctaggtaacaatttttctattgttgttatcggtatatttgtatttagtttttagtttacattatatgtttagctaagtagcttttaataaatgtctgggataggaaatacctcttccaaaagtagcactaatcagttaggtagaaatttgcttaaacaaacagtgtataatagttcacttctctcttgctattatagacagccagtggtcatttacaatactgaatcgacttgcgaccgaaactttacaggagtatttggcaatatattttatgacattacccctctaaaggaaggcggagtcaggttatcatatcttgaccctttacttgctaggacttacaacgacccgaaaactctacagcaaactcttgtagatcagggtatcaccggaactcatttggttgggaaatcggtggtatatgtttgtgagcaggacccacaaataccagttcctgcttctcctccaggttggttttactctaggtagaccatcctgtagagtcacagacaatcgttgttattgtctttacggtagggtttggattgagaaacctagttattgtgaaggacttgctgattataacagtaagattgtaaaagcagtattatctaccgatctggaaccagatatgaatgcctctcaggcaatttctaagtgtttcggttccccaaagttggagtttgacttcacaaggtggacgccggaatacaaagaaactttatatttgtgttccatcctcttcatatactcattttttatgagtagaaatctaggaatttctggtctgggtttagccgttggcctctgtaccaaagccctagatataaagaaaacggctttaattgttctggctataaccgggtttagaacaaaaca

SEQ ID NO: 2537 - DNA, 916 bp, unidentified
  source 1..916: mol_type = unassigned DNA; note = unclassified RNA viruses ShiM-2016 sequence
ggacgacaccgcgcggagtttcagttctaattgctgggtttgcccccagcaggctttgttccttgcagatatttctgcctagcttgcagttcccgggcaaaacccggataaaactgtattgttctaggatgaaattactgtattgtgatacattgtttattgaattgaaatggagttagctgctccttttttaatgcgtagcccctaggttgactacgtcgtaacaaaaccgaaccccccccttgtgcattggggggcttcggcccctcatgtgtgttttgtatattattgttcccaatgccgtttttgtggccttgtgccgcaggaattgtattcctgtatattattatttaacttaaaaaccgccttgcggagaaaaatttaaattttgggaggaaacatgtattagcgagaaaaatttatattgtatttttatttaactcaaaaatacgttaatacattggtacacacacattgtcaactaaccaccatcgtagggccgcccctacttgtgatggtgtgtgaaatttcagtgcttgaatgactgagagaacctgtaattgtttggttcttaactttgtgtggacagatctcttctaacgccgatgctttaaaagcagcagaggttactaagcggagatacttaattgatctgacagtctcagatgagagactagctggctggaaccagcgaagctaagatcagcctcggaggaaagaggtgaagaggacctaagagggtctagcagatggagtattagcatcgctaatgcgtagtgtagaattgcgaatcttaaatcaatccccccccttcaggtaacgaaggatcaggaagcattatctcattttgctttactgctgctacaaaaagtcagattattattatttgccttatctagtttgtcagtcccccatc

SEQ ID NO: 2538 - DNA, 916 bp, unidentified
  source 1..916: mol_type = unassigned DNA; note = unclassified RNA viruses ShiM-2016 sequence
gggcgagggtaattttgggtgtacgcttccagcatgccaccaatgtctcataaagcaataaagagaggcagggtttgtggtgtgttgcaatgagcggcccattgcatgtcagcattttgctgagtctttttccgcggtccgtgccgcgatgaaggggagccaccggaggataatgccgtgtggtgagaagaccgctcgtcgactataagggggaatttaccgtctcgcccagtgctgtcgtcgaaagccttgatccagaggttaggtcatccttattcttcaatcccgaccctgtctgcagcaggagggttagagcctggaggagcccagcactgctcctgaggtgtggctttgcgtgtgcgtcgatatgggtccgacgtgggtttgccagcccgaaacacgtaccccgagtcctccctggatatggcacctcgagcgcgagaccattttggcacgcgagtaagaggaacgtcgaagctggttgtgcacgcgtaatcgtgcacagttggttaggggaccagaggtgatgactacgctcccgcaggcagcgtgcgacaacgctgcggtgacgaatgagagacgaggtgaaccaagggctgcgagctccgagccggcccaagtggctttgggaatccttgtcctgtgaggttactctcatgtcgaagatcccgctttcgcgggtgaccgccctcaagtcaccacccatgtacagcatctgcagcgtcgcgtttccactttttgtctaccacggattgtagagtggttgcgcgatggtaccacggaacaaaaatcaaataaacaattgaaaacctaaatgcaaagattcattgttttgtttcggcgcaggcgatccccgcctgagacggagtcactttgtgacagtttttgtttgttttaaagcgcgtcggttttgctc

SEQ ID NO: 2539 - DNA, 922 bp, unidentified
  source 1..922: mol_type = unassigned DNA; note = UNVERIFIED: Potato virus S isolate 18-1113-2, complete genome.2 sequence
gttcacaggtaaaagctcgaataaactgtttcacagagagaatgccgcctaaaccagatccttctagttcaggggaggtgccacaagctgtgccacctgcaccacctccgcgcaattcggaagggcacagatccgcgcaatcggaggcgccagggcaaaatgaagaagccatgctggaacaaaggctcgttcgattgattgagcttatggctaaaaagaggcacaactcgacattgagtaacatctcctttgagataggtaggcccagtttggaaccaacacccgagatgagaaggaatccggaaaatccatactctcgattctcaattgacgagctgttcaaaatggaaatccggtcggtgtcgaacaacatggccaatactgaacaaatggcacagatcactgcagatattgccgggctcggtgttcccactgagcatgttgctggcgtcatactgaaggtcgtgatcatgtgcgcaagcgtgagcagttctgtctacctagaccctgcaggaactgttgaattccccactggagcagtccctttggactccataattgcaatcatgaaaaatcgtgctggactgaggaaggtgtgcaggctgtatgccccggtcgtctggaattacatgctcgttcagaacaggcctccttcggactggcaggcaatggggtttcaatggaatgcacgcttcgccgcttttgacacatttgattatgtgaccaacggcgccgcgatccagcctgtcgaggggctaatccgtaggcccacgcctgaggagacgatagctcataacgctcacaagagcatggcaattgacaagtctaacagaaatgaaaggctggccaacaccaacgttgaatacaccgggggcatgctcggtgctgagatcgtgcgtaaccatcggaatgcagcaaacca

SEQ ID NO: 2540 - DNA, 922 bp, unidentified
  source 1..922: mol_type = unassigned DNA; note = unclassified Ampelovirus sequence
gtattgtcctagtaggtatcgaacccgacaatcccaatcctaccattgctttccatttcagatctgaaatccactcttcttctctgctctcagctctcgggcatctcttctcgctttccttcctcgttaagacgcgctgaactacagttcgtctgtctttcctcatctcaaccgcttcttttcctttttctctcgtgtcttaactacgctctcctctagctcattttctccctttactttttcgtttcctttctatcaggggcgaaggtttttcttcatctcttaacctgtcttttcctcattctgctttttcctttctttctcgtcttctttttgtgtcgtaatacttcttcgcatactctcttccgctttcatttcctttcatcactctttctttttggttttctcatctcttctctttctactgcttttctttcttattcctttcttatctctctttacctttgtttcttctctttgttttacatatctctttctttttattttccttatttcgttttgtttcagcgggttttttcttcttcttttctctcgcactatccactgtttttccttatttcttcacttttctaactctcttttctacacgttttccaccgtctatttttatcattttcctttttgttcgtctaggttctcttcttctcttacccaggccttttccgcatataactaacatttcctttctctaaggatcttgggttttgtttaactgttgttacgttatcatctttgtgttcggttttcctttctttaattttagtttacctctttttcttcctacttacttcttttcttttattttaactttccttttaatttttctctcttgcttagcttttctttcttttcgtcgcctttatcttttactcttttcctttcattactttcaacccaaaat

SEQ ID NO: 2541 - DNA, 922 bp, unidentified
  source 1..922: mol_type = unassigned DNA; note = unclassified Riboviria sequence
cctcaaggcacgcacgcttattaacttatcagattatatggacgattatcactagtattgataccgctaaaccaaccctctcttcttttaagattggaggatgctttagtaggctctctactactgtttagtctaaatatacgctggtatgacctttatatatttaaatatccttttataattaagttaacaaggtggtaccttaagtagcaccattaggttaccctatagtcgtaagtataggttaagaattttcttcttaaattatatttaattttagttgtagatacccaaaaaaaataataaaattataaaaggctttgccacaaaaaaaattacatttagatttttgtttatttttgtatgcatattttttgtttgttcttactaatagaattaagaatcaaacaataaagtagcgctatattttggccgtttctgtaacagattccgcccgagtatagtatagtggttatgagtcggagttccactataaaccaactcaaagatcgcttagcaccggtaaagtgagcggggagtgaacagcgaataaagtagctgtaggcaaccttggctcggcctgcacgtacatgtctatgttgtaggtagtctaaccaactctattacccgtggtttgcatcggaccctctttggatgtttctaggaccccttacaggtattaaagtactgacaatgagagtaacactaaacactgttagacgtaggcgcggttggtttagcagcaggaagtagtaaacctgttgcgtcgcgctcaattgaggcgatccgtaattgctggtccccgttagattttatcgtagtcgaaatctaactatagtgtttattgtgaaatcgtgaggaaatttgtcttgtaagtagaaaacattcaccttcttttttctctttttatggttaaatatat

SEQ ID NO: 2542 - DNA, 926 bp, unidentified
  source 1..926: mol_type = unassigned DNA; note = unclassified Dianthovirus sequence
gaacaaacgttttaccggtttgtaaattggaattctcgaattcgccagtcgccttcttcgtatcaaggatctggaatttgaacggtatctttatcattttaatttctacttttcgtaccagtcatgggttttgtcaacttttcgctttttgatgtggacaaattgatggtatgggtgagcaaattcaatccaggcaagatattgtccgctatttgcaacttgggtatagactgctggaaccgttttcgcaaatggtacttcggtctcaactttgatgcacatatgtgggctgtcgatgcctttatgccactcatgccacattacacggagcagatggaacgcgtagtcggcgacctctgcagcgaaaccctagaatccaaattagaagactgtctggaattggacacttccgtcaaccagtattttgacgaagaagtgtacaaagaggatgacaagggcgtgatgaaactccaaaggagtgctgccaggaagcacattaaacgtgtgcgaccaggtatgatgacagcagccataaaagctgttgagacgaggatcagaaaccgccatgccattttcggagataacatgggattgatagacgaagctgcagttagagcaactgccagtgatatctgtggagagttcaaaataaatgaacaccacacgaggacattggtatacaccgcagcatatctttccatgacacctgaccagaagtccctagacagtgtcaagctcgcctataatccaaagagtcaagccagaaggactttagtgacagccgttcgtgagaacaaagctgttgctgggttcaaatcccttgaggatttttaggcggtccactcagctttccggttgaagatgccccatatcctattttaggcatcccggaaatcagggtagctgagaagcgggccagtagagtc

SEQ ID NO: 2543 - DNA, 928 bp, unidentified
  source 1..928: mol_type = unassigned DNA; note = unclassified Sopolycivirus sequence
tgagaaatacaacaaattttgtacaagctagtttaactattcaaattacacttgctatgactgtgatgcgaaagttaaatatttctaagatttacgtatatgacaattcacacttctttgacaatgcaacgacacacattacagacaacgtacgatactctaaaagacaggaaaattacgctgtcctttctaaagccgcccaacaaactttaacgaaagaaaactatcgatctcatacgaatcatactcttctttcagatcatataggtttatatattacattgtaagtatggatactttgatcgcagtttgcggattgttatccattaggttaggaacagtaagcccattgctgtggttcagtaatgcgtttcatctcaacaatcccgtaaggtttgatggttgagaacctctgccttggcgagctttggtctattagttctagtgcaattgctgcagtacagtcagggacccagagagtaatcctctggtgttctaaagtcctgaagttgagaaggactagcaatccggatcaaccagagtggaaccctttaaacgtggacgccaccccagagagctccgtttatcgtgtcacctgcagtaatgaatggaatgaatgatagaagcgacccacctagggacccctctaggatagtcatggtatgtcatgaaagactccatcactgggttagaacgatctgttcaactggctttggaaagcttggcttgagcttatctagtctagggccagtataaaatataagccggcttcgtactgggacacacaagccgttagacttctttttgctagtctgtgagtacccaatttttacctttaaatttatgctgtcttattgctatctttgtgctgcctttgctactttactgctgttatttgtgccaaactactgctagaataatcgttgct

SEQ ID NO: 2544 - DNA, 930 bp, unidentified
  source 1..930: mol_type = unassigned DNA; note = unclassified Iflavirus sequence
gtacgtatttcgtacgtacagatccttgtaggagtttcaataattgttaatttcagagttagggatattcccgccgctagtattcacaatgaatctagtcgccagtttatctaaacctttggggtttctcagttatctttcttcttcatttccttttccaggatctcacaaaattcaatttgttaacttcaattttaattttcaatttgagattttaatctccaaaatttcttctaaattatgggttttctttcccgtgtaattttcaatgttgttgtgttttgaaaatcagaaaatcaaacaaagatgtgaatgtgtgtgtgaatgtgaacaagtcgagtgattctcgacagcgtatttctgacgtttaatacttatattaagattagttgaaaaacagtcgtcctgagtagcagtaagagcactagggccattttcaaaggcttaagagatgaactcctgtttctaatcaattctatgggagacatgctcttaagttgactggctaattgaaattgagtattttagtttggattgtgtggtctagttggacagacccctaagggaagtgccagtacctagaaattcgtaaggctatctttgtaccagctatatcgattaataaccggtatagttacgtctgggacccctagagggtttgggatcggcgtaccatgcagttttagtggcttcggcacttacttaaagtatgtgggaaccccatggaacttaggtagagcaagcgcattaattttgcgtagtccaatatagggacgtctattcctcctagagggaataggtagagagtcaacaacgtcatagacgaggtaattccgccataatatagtctggacagctagaatatggaagggcatctctacatgtagggatgggctctcaaaaccgatccggtgacgcaaggctgcctta

SEQ ID NO: 2545 - DNA, 935 bp, unidentified
  source 1..935: mol_type = unassigned DNA; note = unclassified Riboviria sequence
taaaattttattcgcgatgaaacgcctccttcctgatgcacatcaggatacggagaagatctctgagattgttagagataagaatacaacattgtacggagctattagcgaggttagtaacactgacgccctacaggttgatctctcagagttccgagctcttctccgtcgctttaatgaagacgttgaagagtttcggggtgcgcaaaagttcttccagaccactttggattctttaggagggactgtagatcgcctgaatggttcttttgtggacctcaatgcttccttaaatgttgtaaaagaagatgtcaaacagctagatatagctgttgatgacaattcaaaacaaatccttgttttgatagacgagaataaaacatatgagtctaagttggaagctcttgataaaagagtttctaaacttgaagattctaatgtctcgataaatttggggatttaatcatgtttgattttcttaaaccatattttaaacccccgcctcgtaaggttttctctcgccctatggcccgtgctgccaaggatgagagtatttctgatgttataaaagaacgtaaccttactgagtatcaagctattgaacaagtgttctctgaacgcttatcatcgatagagaccttctccccgtccagacgatttcttcctctacacgacgaccagaaatataggttccatagcctaaaacttgagcgggattatgagtatagtgttatcaaaggtgttctctttgatcaggtctttttcggtacaacaattaagcttgacaacttctctgaagttattatttacccttccgatccagaagttgcaccatctgatcctaaatatttggatacagtgattattatcctggtgaaggtgaatggatctgacactccggcatccggagtgtataaaatttacagtctaatata

SEQ ID NO: 2546 - DNA, 936 bp, unidentified
  source 1..936: mol_type = unassigned DNA; note = unclassified Iflavirus sequence
cgattgtatcagagttttcaaattaattaatgagtctcttaagtgagttttatatttcttgagtttcatgttccgaaaaggttcgatgattatactcttggataatatttaatgacatttttggattggctcattattaagtcttttctctgtacttagttaaggtttatttgcttttaaattatatatattatacaacttatatgttttaaaaattgaaatactcggttcagaccggggctatatctaacaacttgtaataaagaatttacctattttcactatcggcctctcttattagtcttttagtagcatagagaaatagtgacatgagcataatcacccctcatggcaacaagtagctctttattttctattacaagtatgatttatagtgtataaaaattaattttaaggcaaggcaacataatattgtagatgtctatgagtagataaaacgtagttggaatgtgtgtgcgataaaatggggacccctccaactggctaacaccagcgcctactacatttcaacatattgcgacataatcgaaaatgaccgctctatgtgttatggttgtgaccactattctgatttattttggaggtagtgttaatccggctgagtttatctcaaaacctcgatgacaagtgtatccttggacttcgggcatatatctctaagatatagtcggacttctgaaccgtaaatttgcggaggctttaagtacgaagaataagcctgtccattttcttttttctttttcttatggttacaatctcagaatatactaaagcgttttcattgtttattgttatttcaattattctcaattgcaatcctattacccctttgttttatttttattccaaccttataattcttttgctaattgtttctcatactgattttaaatttgtatcaaaatatttttgaag

SEQ ID NO: 2547 - DNA, 942 bp, unidentified
  source 1..942: mol_type = unassigned DNA; note = unclassified RNA viruses ShiM-2016 sequence
tagttgatgtttaaacatcaactatacgcgatatatggagcttggtatgctcctaccaatttaaaactagtaccaaataagggctgaaacaatgctacggtgcttattggaacaatactaggtaattactactacttgctgaaacgtaagatacggtgagtactgtaattttcactttggtttcaccaaacttgggtaacaccataaccttcagtatgaattttgtatgaatgtatgaatgaatattgagtacggtataccgaaagagactagaaagttgcataaattcttgcaatttggtgggattatgacacgaccaccacccttgagtttacgaaccgaggctttgtttgaaatctctctaggtattactggctgtgggtatatgaacttataagtaacagcatatggaactcttagtacgcttgggtagtatgaggagccgtggggaataaacttggtccacagggagtagcccgaacgctgacctgacgataggctgctatgtccgactataaacctattcaattaggggtggcacacaccatgcactagtgcgggacaggaacggttgacaataaggaggccttctctaagcccttacgggggtgaggaagcggaacttcagaacagcttgcggaaaagaaggaaatatggtctgagaaagtaacttatatgcgacgccggcccttctagttaaagggaattgcctatggacgagatagattaggtaattaccatcggcggctgggtgcaccgatacatagtacggagtgcgcttcacagtggacttatctacacagtggagtggatcttagcttagtggacagacagacgtactaagcgacctagatctcccaaagataacgactttatgggcgtagtccggtcgtgcaggggttaccccgcggacaacgcaaattttcttccaaactttcactt

SEQ ID NO: 2548 - DNA, 945 bp, unidentified
  source 1..945: mol_type = unassigned DNA; note = unclassified dsRNA viruses sequence
gcgaccgttctttagatctttcgttcggacccccccagcccctggcggggcgtcaactttccacacgtcttagtttgctaagcggaccagccacaccgacacaaagagcttcggctctgggaaacagggcagactaccgcgatgtgcttacgatgatttgtggttagagcgcgcctcttgctaattctgaggtggtgccgcgcgagctttaggcccttttgttcggaactccaaaaataacttggctttccgctcagccctgagacaatagggttatccaacgacttggctattaatataacatcctccccactaacgaatcgcccttacactaacttagggtctttccgggggaaaggaacccgtaccgccatatttcaaaacacatggcttttcatggtccggggtcgttggagtaggtatgtgtgttagcggcagtgagtatatgaagcggttcatcgcggatttcctgctgagcaccctacgcccgaatttttaggaagaatggctcttaagaactaggtagccattctgcccttaaaatttgagggtgtggttatacgcgtccagcatgacgttaaaaggcacacttcgccttaggacggcgaaaaactcagctctgtagatctagcccgtgatccttctgcagtatcaacatatcgggaataagcatcctgtcgagttctggaaagcttgaactcagcggtggggtaaccaaggtacgaacttgggtgtgaagccattcaagacgtggatggtggagctaacgtattagtggatgtcatggtacggggtataggtccgggattaaccacccgggtgaacactaactcgccactacgaacgtgccagccttcgggttggtggacagactgacactcaccgcgccaagtcccggctaagggcggcgcagcaaacagtcggcgtgggaattattaccgcgtg

SEQ ID NO: 2549 - DNA, 945 bp, unidentified
  source 1..945: mol_type = unassigned DNA; note = unclassified Riboviria sequence
ggtcaattaaggtgacgaagatttcgtcattacacgaactgccggcgccgggaccgaatgtccaagtcttgtgcttcaaacagtccgaaaagaaggagttgaagcatttgaacgcagtaactatccatgaattttagggtcaggaaagtgcggtcgtctggatcgtgagactatcatcgctacctaacgaacagatctgcaagagtgaagaacatcaggtggtggggattacaagacataagaaagagttaatatactacacggtcgtagaagacgatctcgcaagattattaacccaccacatagacgaaaccacactcaactccgccgttgggtcgttgaaaggaggaatgcttgaaattcagagagacgaagctattcttcaatcatgggactgtcacgatgtctctttcagagcggccataatcgattgcggggaagaggacctcccgtcgacaaaaatttcggaacccttcaaggaaccactcgcttgtttcaagcccggtcacgttactgcagacatattttgacgatctttttcctggaagatcagctgagatccatgatttcgaccaatacctttgcgaaaattccactaaatcatatgttttggaaaatgccagttttgggggaaaaggttgggtacctagggcacagttatatgataagaaaaggccctctctgttgacatccattcaatcaaaaagggaaaattccctaaatgaggtcttacttgcctttcaaaagcgcaacggcgcggtaccggaattggctctggattccgctattgaccaagaagcgagtgttttggtaaaaaactttgtaaacacagcggtggacaagtcaagattggatttgctgagacagtttcgagaggaccaaactgtgctaaattcggcgcagattcgagaatggttggactcacaaccacccggagtcgaaaac

SEQ ID NO: 2550 - DNA, 946 bp, unidentified
  source 1..946: mol_type = unassigned DNA; note = unclassified Hepeviridae sequence
gaccatagcccatgggagagttggacaagggatatccgcatggtcaaaaacaactgtggctctgtatggcccgtggttccgggcgattgagaaggctattgtggatcgactgccagacaatgtcttctacgcagacgcccagaaccctgatgtttttaatgcggcagtctcaggtctgacaggctatcaggtctttgagaatgacttctctgagttcgacagcacccaaaataactattcgctgtcgttggaatgtgcccttatgactgaggccggcatgcctgagtggatggtacgcctgtactggctcctccgatcagcctgggtcctgcaggcgccgaaggaggggctcaagggctattggaagaagcattcaggtgagcctggaacactgctgttcaatacggtatggaacatggccatcattgcatactgttatgattttgttggagagtgtgtatatgcttttaaaggagatgattcagttgtttgctgccaacgttacatccggcacggccgtgcagacgtcttgatcactggctgcggtctcaagttgaaggcagcctgttcttacataggtgggtatgccggctccatcgttgcctgcgggtgcggcgttgtgccggatatcatcagatttgccgcccgcctgacggagaagaactggaaaatcgctgataatgatgatggtaagagggcggctgagttaacaacagcagtgaaggatttcctggcaaaactggagaacgtgcatcatctggccataactttgggggcccgctatcacaacaagcctgtcgggctgctagtcaacctcgtcggtgccctcaaaacaatcgccgagggcaaaggccacctgaccaagcagattttaccaatcttgactctattgaaggggtttgaatgaataacatgtctttttgtgtggtatgagtgggtgtgcaga

SEQ ID NO: 2551 - DNA, 946 bp, unidentified
  source 1..946: mol_type = unassigned DNA; note = unclassified Riboviria sequence
tacacatagtcaataaagaagaatgggcccccatccttctttattgactatgtgtattattttatgactagctcgtttaaccttccagcggaagctctgtgccagtatttttcatttaggtgcatgttagcatttttcttatttgcccacgtactctgtaattcattaaccgaccagcggtcgctctgttggattatgactgtgcaattttgttccctcttgacaatcttattcttatttgatgacgactttttaggccctcaattcttggattgatattttgttactacccggatattattatgatcttgtatcagaaccacgccgataagctcggataatattatccctggctctgcaatttattatgacgactattgagatgaacactattggactatgacttgacttattatttgttatttgtacgttagaatcaggcaagcttgcctatcctgtttacttgtcgattaatctaggactgaacgttaatacgaactacttatcgagtaggtaacccactaccgaaattgtggctaacccgaaacattaagtagaatttttgtatcgattattaagaactttgattatgaaaccgcactcagtgacgcaagtaatactatgaaagaagaaacggcttttatagtgattaggacgtgaacgcaaaatcgtaatgtttgcctatacattgacgatttgttctgtctgagtagttattacgttatagaattcctaaagtatcttggaaccctcgtattactctcacacttgaggaggtgtgttagtattaaggtaatccattgatatgtgaagaattcgactaacggtgttggtatgttaccggtaaggtttgtactatgatgtacttaagggaccagttaggttaactcttggtgccacggccaagacccgctcaacgcgcataccgcatgaatggaaatatttt

SEQ ID NO: 2552 - DNA, 950 bp, unidentified
  source 1..950: mol_type = unassigned DNA; note = unclassified Negevirus sequence
gtgtcattctgacacacatcactcctctgtcacctatgagttttacaacatgacctttgtccctcagtcccttgctctgcgcgaacctcttcgtctctacaacaaggagtttaccgtcttgaagaacctcgttcccgtttccttcttcgagtggttcttccttgtacgttcagacgataaccgatttggtattgtgcccaggatttgtgacgaactttttcgcaactcaaccaggttgccaaagaatgtgcatgttagacgtgagggcaacgagttctgttttgttgaggtcagccacgactcctatacgtgtactcccaaactttacccgaatgttgcaactttgatgatggtccatgactttcctgttgatttcgacgacgtgcctttctcgcagggctcatacgcgtcgaccaacaataaggctatgggcgctgatcagtacctcgccaacaacgtcgcttctaaagtgtatgtcgttgacaaggtgggtgggtcttatatggtcacttatgacccccaagactactctggtccccgcttcattgttcgcagccacgggcatgttcccacggagaaaccgttctgttttgaccttgctacacactacgcgtcgcccattcactctatctttgcacacgtgacgaagttttttcacgaagcgctggtgtatttgttgcagttcctgaaagagatcgccgccgatctcgccctggtcctcttcaaagtcatcagcgaactatttgagattctcatgtcgatcgttccgtacaattcacatttctacactgcagggcttgtgtgtcttttcacgtatttccttttgcgtgacttgctcatctcgtccgttgtgtttttctgtgtgtacagttttaaaatctacactgattctctcatataaatgcttgttgaaactcttctcattttcttcgcgatcctcgcatactgcc

SEQ ID NO: 2553 - DNA, 950 bp, unidentified
  source 1..950: mol_type = unassigned DNA; note = unclassified RNA viruses ShiM-2016 sequence
tatgggagcgcttttgcgcttccatatttctattttaaatacatcttcggtactttagggctctcctttaatgttcttgccttgttaattcaccaccattactgcacccctatcttatcagagtgactcggttacttagatgttctacttaaccttgccccttatggcaacaggaaaagttccaaaactgctcgttccgggagattcccatccggtaaaaacccaagaccacactcaacatccggagtgtctaaacccaaggacgaccattgataatatttgtaaaattcatttcaacgtacttattttaaagcatcaagcgtcattatgtcagttgattaattagtttcactgattaattgagataacaaacaacttcctaaatttattttaagtgttttgagttgaagttcacaaatattatgcgatcatattactaatcaccgcctatttccatatcttccgatgaattccgtacaggaatgtaataatttttgttatttgtatttaatttataactttgatctatgctcatcccaccgtttagccattattaggttctgttatgaaactagtaattattgtttgaaaaccagtagttccagcgcgtcgtggcctattgacccccaaacaaagtctttgtctttccctaaaggtttggtcacctataagtctggctctaacatcgagtacagcaagtctgcccaacatttgttgcatctgactctgggggcaacaaatgtggcgggataaagttacaaacctgataacacaggtagctttagcacaaaaccccacattcccacccgagtaatgtcaattttattattttatgcactttataactatgttatggcaaatttattataaaaatgtatttcaactatccaccttcttctttcacctttactgtcgaaactcttttccagtcaagaaaatcttaatgaaaa

SEQ ID NO: 2554 - DNA, 952 bp, unidentified
  source 1..952: mol_type = unassigned DNA; note = Beihai weivirus-like virus 21 strain BHZY60867 RNA-dependent RNA1 sequence
gtccgctgccgtgcagtttaattaattcttttcgtgtgagctgcatgagtcggctccccctgtggggggcattttgtggctacggccacacaattacccatcggttgacacagagccggtggggtccgtgcgttacggtgtgtgcttcgacgggcgcacactggacgaaagagtgccgctggcgcacggatgcgagtaccgttccgagcttagagctttgctcggataggggtggcggtggcgagccattttggctgagtgacgtcatcggcccgagccataccccgaaggttgccttatgcctcagtagccgagggtagttcggtgaagagcctggaagccgggtagcgccggcgacggtgagggcaccgctgttaaccctgcgcgtgggttggccccttgggaggggggctgtaaaatggcggttctgttgtgcgagtggtggctcgaaggttctgggacctgctagtccggctctgcggcgttcactgcgtcgcatccgtgaagacgtggggaccgttccggatgttccgttcacgtagcgcgcgtgggtggataatcgccgaggaagccattttggcagaaggcgacgcacaacagacaaaatggactggcgggggttacggcccgcttttacgcgttgcaggaggacgccccctccatctttcgtggctcacacgacctagttttgcacgcccggtatgtttgtgggagtagtgacccgtgacagacccgtcgacttcaagtcggcactcaggaagagactggctcacccgtggttttgagcctgcttccgtaattaactacttaccctaaaacgagccgtgatttctctggtgggggccagagatttccttcaaggtgtatctgtgtcgcactacggctcatcacgttgcgtgtctggctgtctttgtcatactgacgccggatttgtcgtgctttcgttgtgaca

SEQ ID NO: 2555 - DNA, 955 bp, unidentified
  source 1..955: mol_type = unassigned DNA; note = unclassified Rhabdoviridae sequence
agtttcctttaaccctatctctccaacctgaacaagcaaacacacacgctccgccaacatagaagacagagagccaagacaagtacaccaacgcaaccagcaacttcttcactttcaacacaaaaggaaaatcaacacggaatgttcctgcgaagcatcattccccccctccgcacacccccaattttgggaaataaaatagctttgatcaatagataatccctcacccgaaatcggaataccgcacaacaccctcgatcccaattccctgcaagctccaagcgatccagtttaagccaaaccacaataaaacccttcaagcgacaaagataaaggaccgtcaaacatagacaaaagttcaccagacccgtcacaaaaccaaagataacgacactccgtatccagccatccagttagaactttatctacaaacagttgtaataattcttatgatctctatggtctcattatccccagaatatgtctctcacaaagcaatgccagaaccacacaactatcacaccaaaaaaacctcggcacaatcaggctcattaaacaaaaaaccaagaatttcgcaaagatccagctccctcgtcaaaactccaaaataaaattagcctggcaagtccacaaaacaccgtcacaaacacatcccagtatatcaccaatatctgcccccacacacgcccctccccaaaaaagacacaccagatgtgataagcaaatccctgtcaattttcggcaaacaagaccccttttgcttctttcacaaccaaaagcaaacaatcggaaaacagcccacaaagcgaacacccatcagcatactccggagttcaataaggaaatttctaaaacagactgtttcatactgcaacagtccaattgaacattacattaccaatttatttgagaggaaaatatataaattgcacaatagacatttaagaaaaaaact

SEQ ID NO: 2556 - DNA, 959 bp, unidentified
  source 1..959: mol_type = unassigned DNA; note = unclassified Picornavirales sequence
tggagatccctctatcttgcgagtcactcaagttcctggtcgtgtcgaatatgattggcctggttggagatttggccatccaaatttttcttctacaacatctgaaattttggaaaaaccatttaaagcggctcaagcgttagcaagtggtggtgttcactttgacaaaaatggacacgctcgagtggaaattccatattactctaaattcgaacgcttgtttactcaatcaactaatccgtcgaataaggatgaccctaacgggttccaaaaatctatatctttaacagattctattggtatggtgtatattactgggtcttatcaaatcgatggtacactcacattttatccgcgagtgaccctcgagattaatcaggcgattggagatgatttcgaatttcaatatccgaaagcagtgccttgttttattgtagaatggtagttgttatattatgggttcttggtcttgctctgttattatcatgtatccttactggtataataggttattattttttaagattagtacatagaacatataattatacatgcagaaaaatacaaaaacatacatttagcttaggtgatgaggagatggcgcctatttataagccaactactcatagtgttcttgttccagtgcccttgtcctgacccttagtaccttacccagcatgaacgatctaagactaaccgagtggggtgcgagattaaaacttggtaacaagttctctcactatgaagccggggtctgatttagtagtgtgacaagtgggaacctggtgttcagcgtgctggagtccataacctctcccaatgtaaattctgcgtgaggcattggcaaagttgtgggtggctctggtggtccagtccggagggctagaagtcttcgagtccggagggtatcgtcaccgcccaatcttgtgacgtctttcttttaaatttactctacaatc

SEQ ID NO: 2557 - DNA, 969 bp, unidentified
  source 1..969: mol_type = unassigned DNA; note = unclassified Riboviria sequence
ggttaatcccgtgcagcgctctagtagtatttcaaattttgaatcgttacagtgcatttttgttgactaattttgttatctagttcattgtcagttcgatttatcgttcgtgactataatgttcgtagaattttcacctttagtcttcgttaaatgtattgtttgttacaaaattctttgactactaaactttaggttagttatatattatagttaagataatttatatatatattataacgaaatatagtattaataaaatataaaatacaaggtaccgaccttggctatctctaacaactattaatgtaagtgttatgtattttcactgtcggccagtccaagctcttcatgggcgagacaaacagtgacaggagcacaatcatccctcctggcaacaagtacctctcacacttttattaatagaatgattgatagtgtataaataataattttaaggcaagattcagattgtaaataatgtttataagtacatcttatactcctagtaagagtccttaatatatatagacggtatactgggcgtaataatggggacccctccaacctgcaaacacaggacgtaaccagtgacgctagattatgagtataagacgaaagtgaccgcttatttatagtcgtggatgacagaaattctattagatagattttcttaaacgcgttctgatcgtgagaatacttttgcgagttactcatggcggagatcgtaagcagatccagactggttacggtacaatacctaaatgatcttacagtgataggtattacgtgtcttactggcatcgagttcgactgttacgcggatgaagcagcgtagctgaatttttcattttctttcttttatggtgacaagcgatattgaaacattttcgatattttccaagtgattaattgcatctcttatttcatttttaattgtgacttatattatttcaacaatcatcaaca

SEQ ID NO: 2558 - DNA, 970 bp, unidentified
  source 1..970: mol_type = unassigned DNA; note = Larsen virus isolate Antarctic83 RNA-dependent RNA polymerase gene,1R sequence
cattttatgaaattacgacagaaggctttatcaagctgggaaaggccaaaggttttggtttttcgcagaacattggtaagccataccatcaatcatatagggatctgtattcaatcgaatggttggatactgtgacctgctatgagtggctgacgactgagttaacccttattaatccgaaggccgcttacgctaaaagtttgggcttaacaaacccatttcttatagtgaatgacctgatcccctggtcctttgtagtaaactactggactggtcacgagaagtggctatcctcactggatgcctttctcggactgaaacgtgagaacgagtgtaaaacgacaaaaatcgtttactacactgagtactcacgttgggataatcggaatgatccgcccactagggaggattatttaggggactacacgaagttcgatagaactgtcgaggagataaaagctcctgggcttacagacagagtgaaggcttggcctttctcttcgcagaaaagggccgtcaacatgtctgtcttaatcgcatcacaatttagaaatctttaattcctaaaaggagtacaattatgcaagctaaaagctttacagttacaggcggatctggtgaactcgaatttgaggttctatgtccagcgggcccaaaaagccctgctgaatttcgccttaagaatgaggagaaatccccactcttagcaccttacctttcagttctggctgacaaagtgaatcgatcttcctcacggaaggtttcaattctcttcgttaagccaattgaacaagaaggacaacgtgtcggtcaaaacgtttttaccgttcaagcaaaacttgatctgcgtagaagcgtcaccgatgcgaaaaaggacgttgaagatctactggctatcataaaccaggacgacttcaaagaaatcctcgcaaaagcaatttcaccaaattaacaaccggagttatttatt

SEQ ID NO: 2559 - DNA, 971 bp, unidentified
  source 1..971: mol_type = unassigned DNA; note = unclassified Iflavirus sequence
tctttaactcatcaactgtgacttacatatacgcaagtatccctgtaatttcatcacattgatgttaaaatcatagttaattactgtaagttgaagtatccctctttgaaatactatacaactgagtaaccctgtctatgatcttaggtttaagacttagttttaagaaatttttatttttaataaccaatttgtatgaatgttttcatgtatgatacgctgcaactccaataaggattgtacgtgaatgaatgttttccaaattgtgtgaatgaagcgaagctcaaagaagtagtacgatttattccgaagctttgagaagtagtagcttttgtatgcttgacgtaacgtatgtttgttttattattaatttgtgtgttttagttttaagaagttctcaatttattttcttacttcatttgctccaattatttgtttgagccaatttgaaactgcatagtctttattaagttacaaagtttaatttatgcctaatactgctgattcccagccttagtagatcttgatggcaggcttccaacttgttggtaaaacaagatatcaagatctcttcttctacttttacagagctcagccttacgaagcgatgtgatagtttatacttgtgcctagagcgtaacctctgtactcatagaaatactagttagaacttgtttcttgcgttataacgtattgttgagatatcagagcatcgtgtcgacttgttttctattgcaccgtgagatgtaaaacctggtaaagctgtaaaactagagaagaaaaatacttcggaccggataagagtaaacttcaggataagtccccccctggagctaggtatattttaacacttataaagattgtatgttttagattgaggatggattcttttgtatcacgaccactgctatggaccttgactaagggatgtgtgcttgcactgccctaattttttgaatttgttttatgaa

SEQ ID NO: 2560 - DNA, 972 bp, unidentified
  source 1..972: mol_type = unassigned DNA; note = unclassified Sobemovirus sequence
gtaggcacggcgatcttgtgtacatagcagtagcagaaaggctaatagcgctgtccgaggccgacttggaagcccatccgaagcccagcgatttagttcgtttgggtctttgtgatcctgtgagattgtttgtaaagaatgagcctcaccctgccaataaggtgcgggaagggcgatttagactgatctcatcggtatcgctggttgatcaactagttgaaaggctgctattcgggccccaaaacaaggcagagatcgctttgtggcagtcggtgccttcaaaacctggtatgggattgtcacagaagtggcagttcgaggcgctgtggaaagatttgcaaatcaaacacgccagtgcccccgctgctgaggcggatatatcgggttttgattggtctgtgcagaaatgggagttagaagctgatgtgtgcatgagaatagaaaggggaaacttccctgcaagaatgaggaaagccgccttgaaccgcttcaagtgtttcgccaatgctgtgttccagctaagcaacggcgagttaatagagcaaggcttaccgggtctaatgaagtctggtagttattgtacctcgagtactaacagccggataaggtgccttatggctgaaataatacaagccccgtggtgcatcgccatgggagacgactcggtagaaggatatgttgagggggcccgtgagctctacggagaactgggtcacacatgtaaagattacatcccgtgtgctgctgagggagagatcctcaaggaagtgaacttttgctcacacagcatagctgcggatcgttgctatctccaatcctgggctaaaaccttatttagatatctggaacaccctgacgactttgaggagttggcagtggaattgcagggctgtccgcagtggccgcggatatacaagtacttacgtcggattggaagagtctccgacaaaattcccgaaccaagagaagaaa

SEQ ID NO: 2561 - DNA, 973 bp, unidentified
  source 1..973: mol_type = unassigned DNA; note = unclassified RNA viruses ShiM-2016 sequence
tgcagggttaataaccctgcacctcgcgattgacgatttggttagattgtgcgcattatgttgaagattcgggctgacttatctttcgagatttttcagctcttcttattttcatatttttgcgtaactttttagctttttctgatatcctagggcttggaagtgtgcccagattttctatacacttaccttcagctccgttcgtgaacttgcacgttcggttctatttacactctcatgaatactgtagtgatgagtaaacaacacagtactaaagcttcgctattcattgaagctatgacaagataaatgtctaaacaaaatgacggtaaaactctacttagaagtgattccgtaaccatacgatttggtaaatatgaatagcaatttttgtatttttaatatccctctaacccagggatttgtatatgtatatattttacacatgttgtagagctcttgttgggctctttaaagaacagatgattactagtggagataaaaataattcgaatgttacacaagtttttaaataaaatctaaaaacttcactagttggaacctcagcgcggatagcgattactgatcgagaaattcgtaccactttgtgccatcgatatatcgatcttatggaaagcagcaaaccatggcgatccggaggggatcaccgcgttgagaggatggtgtgcaacttgactcgtggaggctgctttgcagtcggtcacgtaagagatctgcatgtcatgaggtaaagtcaagcgtgacctaagcgcttgcgaccattgatcaggttaaaagttcgggtggggcagctggtacagccaggccgtaggggaacgggattcggagaataccgccaatcaagcttcagatttcaaagaagcattcggaagccattatctatttgagttatcttttcattcaaaatcatcaactattataatttgctgatatcaatgaataagacaccaat

SEQ ID NO: 2562 - DNA, 975 bp, Rubivirus rubellae
  source 1..975: mol_type = genomic DNA
tccgcatttccgcgcgatccagaagatcatcatgcgcccctgcgcccgcaattccttgtggccgctggccatacggagcccgaggtcgacgcctggtggcaggctcattacaccaccaacgccatcgaggtcgacttcactgagttcgacatgaaccagacccttgctactcgggacgtcgagctcgagatcagcgccgctctcttgggcctcccttgcgccgaagactaccgcgcgctccgcgccggcagctattgcactctgcgcgaactgggctccactgagaccggctgcgagcgcacaagcggcgagcccgccacgctactgcacaacaccaccgtggccatgtgcatggctatgcgcatggtccccaaaggcgtgcgctgggccgggattttccagggcgacgatatggtcatcttcctccccgagggcgcgcgcaatgcggcactcaagtggacccccgccgaggtgggcttgttcggcttccacatcccagtgaagcatgtgagcaccccaacccccagcttctgcgggcacgtcggcaccgcggccggcctcttccatgatgtcatgcaccaggcaatcaaggtgctttgccgccgtttcgaccccgacgtgcttgaagaacagcaggtggccctcctcgaccgcctccggggggtctacgcggctctgcctgacaccgttgcgccaatgctgcgtactatgactacagcgcggagcgcgtcctcgctatcgtgcgcgaacttaccgcgtacgcgggggcgcggcctcgaccacccggccaccatcggcgcgctcgaggagattcagactccctacgcgcgcgccaatctccacgacgctgactaacgcccccgtacgtggggcctttaatctcatctactctaaccaggtcatcacccaccgttgtttcgccgcatctggtgggtaccccactcttgccattcgggagagccccagggtgcccga

SEQ ID NO: 2563 - DNA, 976 bp, unidentified
  source 1..976: mol_type = unassigned DNA; note = unclassified Iflaviridae sequence
tggactcgtattttgacctcagccgatttgctgtttgagctagatctgatagaaatgcaagataactggcgtctcgactgttgtagtcaaatgtgttgctagatctgaaagaaatgtaaccttttgatctttagttttaaggaattttaataaacttaaataaactattgcgaacgatctccaagaagtaattttttgtaaagttttgtgtcttgttgaagccgaagcgaagtagtaacgaaagtgaagcgcggacgaagcagtatatcaagcacatgttttaaaattcaaaattaacatatagtcacgacctatttcttcgtgtatccattgtgcatatggagaaataattgttgcatatagtcacagtctatcactctgtgtatcctggtttgtatttgcctcaggagaaataattgttaccaaatacatcccaaaaaggggttaaagtttatccctggccatttgccttaaactgattctcgtgcgtgtcacaatttggtcaccgagatgatgtaaaactcttcacaataaccttttgtagcaatggaagttgtgtaagtattatgagtagctacctaggttttgcaagtgcgtggaataactcgtcatcttttagtgaagaactctgcaccgtaggaatcccttactgatatcttagcgctgataggcttttgtttacggacaaagtcgacagttaagatatgggctgggcagaacttaagagtaggcctgagaaacctgctctgagttgcggctcctgtacgatattcatttgatgacttgtgtttctataatcgcaaacacttagacgtcccccgcgcggtaccggctggacgaagaagtacctttatggtaggccgttctcccgtcgaacgacgggatcaaacacccaactaggtcctgtgtctcgccgttctcgtcttctcggcgactcactttcatctcaatttctttttctctatattttttcaaa

SEQ ID NO: 2564 - DNA, 982 bp, unidentified
  source 1..982: mol_type = unassigned DNA; note = unclassified RNA viruses ShiM-2016 sequence
gccccccccaagatactcacccaagtgtttaacaatcttgcttgaactgactacctacaaaaccggctgctacagtgactgtaacagtgtgtgagacataaagtcttaattactcactcttgccttaatcactgttatcaaagtggatttgacattctatataatcctgttttacgcagtattaatagccatcacatttgctctgttatactgctatatgaagtgattatgggccacaattcaggagtatagggtgtcaccaaacactattggacaccaatgtctggttgcttggatttaagttcagcactagaactggtatctgtgagggaatttgctgagaggattaataaggaggagtcaaaccttcaatcctttgtgagactattttattatttgaggaacaaagggttgactagtgaattggagaacgaatatagtagtatagtgaaaaggattgatgtgctgaggcctatacaagttctaggagaaggattaaactgttatacactaaatcaagaagtattatctaaatttgtcgtaagattgactattcattcagtggtgagtgatactggcttcagtagtaacagagtgaaggtagtttgtaagggaggaaagacagaaaaggtaaccggtatacaagctgtcagaaaagtactggaaccttgctataagaggagtagattgctagatagactcagcagaggctgtgaagcagttgtactttgtcagaagtggtttgtgacacttaaggtcattaaaagaggtagtatcagtaaactgcactgcctttgtagggatataaacatcacattgaataagaagcagctgagcttcttaggtatttataaggcaggttacgactacttctgtggggaattaaacttcttcctaactctgctagattatattagtggaggtagttttgatagaggcagtaacagcacacacataaaagaattgttgggtaaactaagtg

SEQ ID NO: 2565 - DNA, 983 bp, unidentified
  source 1..983: mol_type = unassigned DNA; note = unclassified RNA viruses ShiM-2016 sequence
tgcatacgtacatatttgaacatattttaacgtaatagtgtgaatgtttctttatattatgtttactctctttaagtatgatagtgttattaatgtattgagtggactataaaaatcagtgttatattaatttttggtatgaatataacacgtttatttgcgtatggattttgcgtccatatgaatgattttaagagaggctattgagttttatatattacggttttgatgttcaatgacaatgggaaagactataaatttcgttttagattttataattaatgtgtgaatgtggtagttcaagggattttatactcctgaatagtaacaaaattataaaataaacaaaaatattatgttagatttagttagtacctagacgatttaatattagtaagatgaacggtacgttaagattaagtttttacataagaacaagcttaattattatatgcttatcccagtgagagtatattctttgagatgtattatacataaaataagtgcagacagtgtaacaaaaatccagttatgctgcgttataagcaagttggtaccagatgactttataactttctggcacgaaggattattccccgacttcgtggtccccttattctatgtatgatttcatttttttgaggtatatttcttgcgtaggatttttaattctgagggtaagtacgctgctaagtaatcagaacgtattattgatcctgtgggaaagctagactggatcagagaacaatagcctttaatgttcttgaatgtatgtatttgttccagtataatttgtaggcaggcttgttacgttcgcagaggagtctttagtttaatgtaatttacatataaatcctcagacggtgacggatggaaagacatcattttccttttttatgcagattttatattgatttttcttgtttgtcgaagttattctcagtgttttatccctttaacgtttttctttaatattttgtata

SEQ ID NO: 2566 - DNA, 984 bp, unidentified
  source 1..984: mol_type = unassigned DNA; note = unclassified Sobemovirus sequence
agaggcacttagaattagttgctttgtgtgttaccgagagattgttcttactcagtgaagctgaggatctacacaataaatcccctgtggacctagttcagatggggttgtgtgacccagttcggctgtttgtcaagcaggagccccatgcttcccgaaaggtgaaggagggtagatttcgcttgatttcatccgtttcgctggtggatcagcttgtagagcgaatgcttttcgggccccaaaaccagcttgagatcgctgagtgggaacatattccctcaaaacctggtatgggcctttcgctgcaacgacaagccaaaagcttgttcgacgatttgagagtcaaacattctcgttgtcctgcggctgaggccgacatatcgggttttgactggtctgttcaagactgggagttgtgggctgatgtagagatgagaatagttttaggaggttttggacagaagttgtccatagccgctagaaacaggttttcgtgcttcatgaactcagtcttccagctctcggatggcacgcttatagaacagcaactgcctggtattatgaagtctggttcttactgcacttcctcgacaaactccagaatacgttgccttatggctgaacttattggttccccatggtgtatagccatgggtgatgattctgttgagggttgggttgatggtgcgaaggacaagtacatgagattaggccacacgtgcaaggattataaaccctgtgcaacatccatttccggtcgcttatacgaggtagagttttgctctcacgttataagggaagatcgatgttggttggcgtcgtggcccaaaactctgtataaatacttgtctgagggcaagtggttctttgaggaccttgagcgagagcttgggtcttctccccactggcctagaatcagacactatgtagtcgggaatactccatcgcccgacaaaactagattagaaaatttaagtccgagct

SEQ ID NO: 2567 - DNA, 985 bp, unidentified
  source 1..985: mol_type = unassigned DNA; note = unclassified Riboviria sequence
actgccagacagatgaattcaccgtgccaccgtgcacggttgctctgaatttgtagggagcgtcgggggaggaaatgcccctggcggagatgacgctgtgcacacaacgcgactactgatctaagcatcagtgagtccgggggattcttaccgtctcgtccgagcttgtgcactgaagggggccgcacccctagtcagccttgttcttctgccacacttttcactgtgagtgtggtgagagcctgtagtggcgtactaagctctgcgcctgaggtgaaggcctctgggaaactggatttaacccccggttgggactggcctcccttaattcccatacccgagacggacaatgcggtaggcacctcttgatgccccacaccagatgtgagtcggcctttttggacttgcacaggtggatgtagggaacgaggagaagtcgaagctggtcaccaagcagtaatgcgtggtgtgttggctatccgtccagtgttgattggttacggtaccgtggcccggcgtttttccgggtgatgctatcgagcatgtggttagagctccgacagaatgaggaaccggtcaccgaccactgttgagccgcagggaacccttctgttccggcttgtttgacccacgtgattagagaaacatcggtttgtatagaaatcagtgacgatgcatgcatccgaagccccaaataaataaaatatagcggcttctgtgtacagtgcaggcttggtccatccccacatgaactccttcgtggttaagcgacattcgatgcgttcggaaactgcttctgcgcggggtatgattgtgtgggggtggccagactttgcccagggttggacgtctatcacgtggttaagcgacttccgatgcgttcggtcactgcttctgcgtggttatgcccgttctgacgctgccaagcgactcccgcttgagacgtgtatagttttttcggccttgccgtctgtttatctgagtg

SEQ ID NO: 2568 - DNA, 987 bp, unidentified
  source 1..987: mol_type = unassigned DNA; note = unclassified ssRNA viruses sequence
catggacgtaatgtccatgcagagaattataatacttttatcagatatatctatgatattgtttcaagagttcatcttgaaactttcgtatgttagagcttgtatattgttgtcaatgtatgggttcttcccatacaacttcatatacaagatatttttcatacgctaagtttcgtaattgatagaatctcttgttgctttaagtagaatatttgatgaggtgttattattcgccccagttttctatctgtttacagctacgacttaaccattagtcgataacgcaggctgtatcctagttcagtaaagtacatagaatgcaaagatatttagactacttaagctactgataaagtttatactttcgcttttgatgtagatgttcatttacttaagtatagcgctctgaaccgagcgcttttgtttatgaaagaatttaatcaactctttcacccggccacacatctttagagatgtttatgacagtattaatttgtttaatactcgaggccaaatttcggtgtttttactaattgcaagatgtctacggactgccaaaatcttgtgtatttagtataaattcctctcccattttagttttaactatgaaattcttttattagttgactatttaggtttaggactttaacactgctcgaggaatccccctttatatgtgaaaattgcgatttaacacatactcgccccaaagaagggtttagagatgttagtaaaagaataacattttagagaagaatcggtccttggaggtgttttaatggaacgtaccccaagatcttattataaccggaatatacaaaggatgtatgtataatttaaggtatagttaccgctatgctagggccgacatgcccgatttttaattacctctacccgatgttgaccagtcaatatttttaaactaatgaattagttttattctaactttggaggaaagttatttggcacgccctttctattttaatc

SEQ ID NO: 2569 - DNA, 988 bp, Sanfarnavirus 1
  source 1..988: mol_type = genomic DNA
aaaataatgcatgaaatatagattttatctatatttcatgccacatttgtgacccttgagaaggtcataccgcattatgcggttctaagttaataactcacttcagtccagaagactgttaagtagttctgacggtggaaagccgtcatctgttacattattagttataataggatgtgtactcctaactagacgatctctacccttaagtcggaagccagcgtttagtgctgagtgcttccgtcacctttggatgacaaatcgtctacttcgactcattaatccgaaagttacctaattttcgtaacccctgtgtctgtgttcagtaaatgacagacagtttgagataaactaaaaatctcccaagtctccacaagtgacatcaatgatctgaactttatttttgacgtttgagatggtgaatgaaggccttgtgcctgtcctcactcttctttaatctttagtaagtcagtgactaacttgtgttatcctagttgattatactaggcttatcgttttctacaaaattttgatgcaaaatcggaacgaatttattcgtaacccgtgagcgtttcaaggtctttgcccttgatcctaaattttttgctatatttcgtgtcgtatcaagtcattttattaatactttttgacttgcctgaacgatgatgtctcgtttgggaagctgcgtaagcagttaactaacaaggtataccagaggatgtaatccccttccagttaccccttgtgttttgaagtactttttcgtaacttcgtgacattcgacctggttctaactcagatgtttgataaactttcgaactatcactgtgaaaggtgctttagcaccttacttgaacccgtcgtctaacacggacatcgttaacgtatgtagaatactatgagagatgttaaattcctcttattgaccacattggaaggcccttagaaaaggcccacactatagactggtgtctaagtccatcccgcc

SEQ ID NO: 2570 - DNA, 989 bp, unidentified
  source 1..989: mol_type = unassigned DNA; note = unclassified dsRNA viruses sequence
ggcccgatagttaccaagcgcgcggtaatagactttaccgcttcagcaattcacgggtgcctacccctagtgtggatgaaggtgctcgcatttataatatagtacataaatatttgcctaaccacaaagttttaactggaggtcttccttcaagtagacgagctggtctcgattatttattgccacctgccctgaggagcggcaacgaaacggctggtccgttggcaggtagtacgctggacgtacgtgctcgaggcggtcctcgactcacggtcacgaagactgaggtcggtgttactgaggtaggagaaaatgttcacggtcccaagaatgaggatagagccctgtccccgcatgagactattacacgttctctttccggtgtttcgctgatcggaagtagtcgtggtagtgatgacggttctgcttcgtccccacggccgggtggtgttaccacctgccaacccccctcccctactggattatcgaggcaggcagtcaaagataactatgtgggcggtgtcgatgaaactacccaagctgcggatgtgacatcggcacgtatcggcaagcaagctgtgacaccggaagtatctgataacgaacaacctccaagtggtatcagatgggaacccttacgcagacaaggggcaaagttcgtcctgctcatcccgagtggagaaggtaaaacatatttggccgagacgtatcctgagatcttcaccgatcacgatgccctcgaggattacacaattgaggtccaaccgtacattgagcaggcacgcgaaagtggcgactggtcatacatcgatgcggtccaccgccggagtagcgccaagtgccaaacacctgtactactatcgtggaacgtttcgacatacgatcatacccgcttcgtgagtctaggtgcgtatttattgcgccaacctactaacattcgtgaaaacgagaataaccgtgccgctctgatcgcaacccacgattattgt

SEQ ID NO: 2571 - DNA, 992 bp, Halfbeak nidovirus 1
  source 1..992: mol_type = genomic DNA
ctgaaaagcatcccctaaacttcagttaaacgctgattccgagaaagaaataccctgctttctcagctacaaaatctgtctggctcatagtgctggttaatcacatcccccgtggtgtaacactgtgacacatacaatttgtagtccctctccttactctacccccgagtgtctcttatcggttactcaaaagttgtgtttggtttgtccgcttttcggattttgtgttagaattacattataaccttatcctagtttgtgttgtgattatatgtaaaaactcttcgtgtgaaagtttgaaattttgtgtgttcttattgtacctctttaacccacatatataatttctggcctcttgccttacctgtaggatttccaaagcctaaagtataatctccccgctagaggtctgttgtgtgaatcagaccattctttaacgtaaagtcacccgtatcgacgctaccatcacacagtaggatcaagattagctccggcagccctggggcgtcttctttgatacaacatcacctttgctggtgcttgcaccgcttgggtatatttttcggtacttgcaccttcgggtgttgtggcctcttactagtttttctcccccttacgtaccttcgccccttgggcccggagtccctgtaattggcatcgcaattgtggtgtcaccctaggcactgcctttattggttctgtctaggtcggtgtggtaagggtagaaaggcgataaacaccgtacattgtttattctattttatagctttcgctactgacttctatgactgattccctcctgtacttagcctcccacccggcggcacttgtcactcttacggctgtggttcttttcctttacctgtatgctggttgtcgtgcattgtttttagacggtgtgaagttagctagatattgtggaactcctctttgttggggtgttaagtgtctctgttgttttgttagaagaggtaagtcacctcgccaagaag

SEQ ID NO: 2572 - DNA, 994 bp, unidentified
  source 1..994: mol_type = unassigned DNA; note = unclassified Hypovirus sequence
tataggtgctgtaggtctccccgtcgctcaccattacggtgttagcgtacgagctcgtgcgttgtatgcacgagtaccctacagacttcttaggtcttgtcgaccctgctggttgcgccgtcgtcgttagacggactctattcggacgtcatttgttttcgtccaaccccccttccaaaagactgcgtggagcggtcaatctagttacgggctgacagtagtggtgctgtcactaaggaacaccaggctggcctcagaggaaaagctgagtaataacaaacccgttaagtgatcacatagcctcgctagcatgtgacacagcgctatgactctgatgcgtcaggatgcactagcatcccaggaaagagtacgtgagacaatatgaacacagtgcgtgacctttgttcacctgtgcgattttggctccctagctgtatgccgcagcgacttgtcttgggttgatgtcgaataacccacgtagaatcttatccgaaacctctccacacacaaccgtcgacgcagcgacgttaaatacccggctatgcggaagtaccgaaagtcgggcgggcgtcaaatctacgccttaaggtcaaccaaaactttgcaattgcatcgtgtgtcagatgacacgaccatgagtcctcctggacacttctctagcttgctagagttgcccgccaccacagctgttataggcccttcggggatggtgcgactagtgttagcacccgtgtgaaagagagggcgcgttacgccctataaacgcttgttaggatagctttcccctggagaggagggactagtgtcgatgaaaacctcacaactcgaaagagtattgaagagcctcggcgcgtcaatcttaaaccaaacacccagtgccatttaaaacccgaaaagggtggatggtataaccaaagttctcaaaaggagccactgtgtggagtgcgacgtatagttcaccaggtcagccatagggttgtttacaaaacaacaa

SEQ ID NO: 2573 - DNA, 1000 bp, unidentified
  source 1..1000: mol_type = unassigned DNA; note = unclassified viruses sequence
tcattccacagtggagtgtttgctgacggtgagttaaaatttttgcctctattcttcttcgcgaagtgtgttgatggtagcatatgcatccattattaaagacaagctgtgccgggtgtttcgttatatgtggacacgaagcgggtaatcctgtggaaaccacccccatcagaagtagcaccaaccggttatcgtggccgatttggtagttagtacctcgcggtagggcttcggcccgcgtaagacactagcattaggcagcgcagagacagtcagaaccatggaggccgtaatagccgttgaagtgtgatgatcctccagtgctcgggcgacgtgcagtacctaggcgaacgcgcgtaaatcttttgaaataagggtataagtgatatgacgaggcgggtagcttgacaaccacctagataagtcgaagaatatggaagaaggacgagaacgagtaagaaaatagaaaagcccaactttggcaagtttgtagaggatggggtgttttaggtcacaaatatggagtagggagcttcggcgaacctgcaaaacctacacatagtgctataagcgctgcccagcgtgaaaggccgtgatcataaccgtacgagggggcatcgagactggacctgtcgttacagcaagggtagacatttggggaaaccggcgatgctcatcgggtgtcgtgtcgctcctacctaaacttagagatgttaagttctggcggggggtcaacctatgtcgtgtcatttcgggtcaatttcactcattggaagtggaatccgctaacagagcatgcacggacgacgtctgtggtcaagcaacctttgtttgggaagaatcctgttatacaacttctacggttccttcgtctctacgaaccaatcgaagtctactgtttacctatctcgatgttactttacgacacacctccacgtgatcagtccgtcaagttaggtcacccatggtgaaaggcgatgtatgctaagaactcgaagcc

SEQ ID NO: 2574 - DNA, 1000 bp, unidentified
  source 1..1000: mol_type = unassigned DNA; note = unclassified viruses sequence
ggcagcgcagagacagtcagaaccatggaggccgtaatagccgttgaagtgtgatgatcctccagtgctcgggcgacgtgcagtacctaggcgaacgcgcgtaaatcttttgaaataagggtataagtgatatgacgaggcgggtagcttgacaaccacctagataagtcgaagaatatggaagaaggacgagaacgagtaagaaaatagaaaagcccaactttggcaagtttgtagaggatggggtgttttaggtcacaaatatggagtagggagcttcggcgaacctgcaaaacctacacatagtgctataagcgctgcccagcgtgaaaggccgtgatcataaccgtacgagggggcatcgagactggacctgtcgttacagcaagggtagacatttggggaaaccggcgatgctcatcgggtgtcgtgtcgctcctacctaaacttagagatgttaagttctggcggggggtcaacctatgtcgtgtcatttcgggtcaatttcactcattggaagtggaatccgctaacagagcatgcacggacgacgtctgtggtcaagcaacctttgtttgggaagaatcctgttatacaacttctacggttccttcgtctctacgaaccaatcgaagtctactgtttacctatctcgatgttactttacgacacacctccacgtgatcagtccgtcaagttaggtcacccatggtgaaaggcgatgtatgctaagaactcgaagccttggttgattgggccgctaccctctggggtccgtgcacggtctatttagccttggttaggggacaaccctgcagcaaactcaccctctggagaatcctttctttatgtatgaattacgcggatacaaaatctacaaaactacctaaagggccttgcaagcgggaaagccaaaaacgtcgatttcgaggcactcgaacggagagttgggaacagcgtgatctacttctcgactcccgtcgtcgaagtcggcgtgact

SEQ ID NO: 2575 - DNA, 1000 bp, unidentified
  source 1..1000: mol_type = unassigned DNA; note = unclassified viruses sequence
ctaaatcgcttcaaactgatggtgaagggtgatgtgaagtttaagggcgactcagaagcgttggaggagtttgctccgggacaaaacattgttttccacagccgactagtttgtgcgcacttcgcaagcgtattttgtgagctagtgaacaggttacgctcaatatgtgctccaaacgtaatattattcaatggcctatccttcgaagactttgcggcacacgtggactcatgtttggatggtgaacccctctataatttcaagagtgacgaaatagacatttcaaaatacgacaagtctcaaagcactttaaccaaagccatagagcttgaggtttacaggagattgggactggatcaacgcattcttgatgtgtggggatcgtcagagttttatggtagagcaaccacgggttcaagaagcttctctgcggagatattcgctcagaggcgtactggtgccgccaacacctggataggtaacacgattataaatatgtgtttattggcccagagcacagacccgagactctttaaggtggcgtgttttgctggagacgatagtctactaatctatcgaaagaaacccaccatacactttgagtactatgagacaaagttcgacttcgacgtgaagtattacgactctgcggcaatgtacttctgtggaaagtttcttatctcagatggggagaaaactcgaattgttccagaccccatgaaactttttgtgaaattgggaaaagagcggccctgtcatgattctgtattgttggagaattggaggtcattttttgacgtcacgaaagcgtatgcaaataacaccgttttggaacgtttggtggagcaatttgcattgaaatatacagaatcaccacaggcttatgcagccttttgtgcagtgaactcaatcagaagcaatccagaacaattcaagagattgtggttttctttgtatagtgggttttcgagcgacatcaagcaaagattgaggtgacttc

SEQ ID NO: 2576 - DNA, 1000 bp, unidentified
  source 1..1000: mol_type = unassigned DNA; note = unclassified viruses sequence
tggtggggggttgggaaaaaataatccaaccccacagttgacaaaccaagcacagcgcaagaccaacaaggaaaattagtgggttattgtaagtgaacccaatcgagtatattgatcgagcgaacgaacaagatgtgatgtggcaaggcgtgtcgatgtttctaccatcctctgaattatagctgtgtgcggagtaattatgatggagctaagtcgtgcacttcccttgtgtggttgactggtggccgaggcgatttatttcgtgggcggtacagttaacctagtggtaatgcagcacggtagaccttttagtacataagttgccgtccggtcctaagcccgggtacatgcagaaggacacgcgttaagctgtaacgcgggttatgtcacagcagactccgacagaatctgcagccatccttcggcccccaatgcgcgggcagatgagtgtgatggatgcgggacactaacggaggttccgggtaatgggtgaaaccgagccgacgcgaaagcgacaggccccccggacatagggagcccactgaccctgaccgccaacacaaaggatgttggccagggaggagtggtaaactatgggtagtgacaacatactagagcaaggtatgttgattgcaagacgcggacggctatttaggggcgaaccctatctaaaacagtctagtgtaaccccatgcaacatgggcgcgctagctgggcaacgggaagggtggttctggaccgtagttcgtcgacatctgacagggcaagccccttgagatgtacacgaggctcgagaggacagaggcgcgcgtcggtctccctgacaaggaggcttaaggtgtaaacagcgtgtttgggagttagtggatattgaattctgtggatgcttacatcgcctaggtattaaattacggacgatggaagtgttcacaaagttccttataccctgcggccacggtcattgaccctaagcccgagctcccttcatgactgacattcg

SEQ ID NO: 2577 - DNA, 1000 bp, unidentified
  source 1..1000: mol_type = unassigned DNA; note = unclassified viruses sequence
ctcttgacgccagagttgctagtctccgtggtacatccaagaagcactctggggagccaggcaccatgcttttcaacactatttggaacatgaccgctgttttccacaccaccagtttcactagaatgaccctctagctcttcaaaggagatgactccgttgtgtgctgtgactccagcatgcccaccccaattgctaaggagttcatctctcagaacgggctcgtcatgaaacagaagacgtcccacctcggctccttcacatgcagtctcgtcacccgcacaagttatgtcccggacgtctacaggttcgcttgcaggctgaacaacaacgacttcacagataccaagcgcatcgaggatctccagagggccacagacgatttcatcaagagagcgactgtcaccaccaactacgggttccacttgctcgatcaacggcagatactacgtgtccttcggacaccattgagtgtgtcgttggcttcctccaagattttgctctcaccggaaaaatagacctccaaacatcatacaaaccaattttaaaatattaaaataagagaagaaattaaataagttggacattagttatgtgcgcttgagatagatacagtcactatggcagattccaaagcagtcgctccttccgtacaatctaaaccacgtcgcactaggcgtccaaagatggacccttctcagatcccagatacagtcaaaaccttccgtctcacaaccgaccctattatggcacctccacctggtgaagttgattcacttctctacacatcaggcctttcacctgcagttgtcctttccttctccccattcacctcccccgcagttgtcttcgccgccaactatgagaatacaagatcttatctttcaaagctactgtcctctccctagcaccagaagctatttccagttacaacctctctgtcgtctggttcccagatgcatcagaagggcccacctctcttcaagctacaaacttgtcc

SEQ ID NO: 2578 - DNA, 1000 bp, unidentified
  source 1..1000: mol_type = unassigned DNA; note = unclassified viruses sequence
cccgtgcgggtttttctggtgctccttatgcaatgggcaacaaggtttacggtatgcatctgggtgcttcctctgaaaacataggctacgatgctggctacattctcatgaagttgaggggtttgaccgagtcatcaactgactatttcgagaaactcgtggacaacgctagacgccgcgggcgcaagcttgtggtgcgaaacactggtgatcctgacgttgttgaagttttcgtcaagggtcactacgtgcgtcttgaccgcgatctcttggaaggttatggggatgaggttgagtcagccacttactctcaggagagtgttagtcagggaaacggaaaggggccccgtgcggatgcgcggggccctgggcagaagacctctccggtccctgctcccgtcccgagtgggcaaagttctcccttaaccccgaaacagccgcaagctgcgacggaggagaagggtacggagtcccccgcatcgacgcctgtgccatcaagcagtcgttcgccaaccacgtccgcatccgtgaagcccaaggctctgctcgaccagcagggacgattgtcgaaagatgtcttgactgtcttgagcaaactttcggcgaatggaggttccggcctcaactcggccgaattgaaattgctaaggcaatacgcgaactcgactttacctcaacacccggttattgtcagttcagtggctacggcccaaccaacggtgccatcttaggatgggacgggttggactttaagcgtcgggatgtctatgaggcacttgtctctgcggtggagtatcgacttgggcaactcacacaaggaaaactagtctatgatcccatcaagcttttcatcaagcaggagccgcacaaacgggctaagctggaggaaggccggttgcgacttatttctgccatctctttggtggatcaggtcgttgaccgagtgttgtttggccgattggtggagagggttctctccactgttggccgaacaccttgc

SEQ ID NO: 2579 - DNA, 1000 bp, unidentified
  source 1..1000: mol_type = unassigned DNA; note = unclassified dsRNA viruses sequence
gtttctaatataatgcaaaccccgtaagttacgatgactggctcggccgttgtaactgagtatgttgttgaggtgagtgtaatgagcaggaccgcccggagaggatagtatttatccctcattgtagcttccaggatcacgaacgttagtctaagtattgacggttacttgcagtatttagttctggccggaatgacacacatggaccgtcctttatgtggacggagggcgttacctctaaacctagactctgcgctgcgagtcaggatgaggatgctacttcaatgtatcttcagcctgacactactgcagtgtcgggtctaggtttaaattgagccaccttagtgggtttcaccagtatgaaagaatatactggcacccgtgcaggcaccgtttcccttgggctgggagaaaaacgcatccggttcgaaacaccctaattggttaggcttctgcctttccggccactcatccgtcattgagttctattatgtttccttccctcgtagaagccgggggcacatcatgtggcaacgaaactaggcctccgtagcaatctcacggttaagatgattatcgcgcggctgaaaatagggacggggcgccgtacccgcgcattactgttaggcgtctaggcaaatattgggatagaccccagtagtttccacgcgcggtagggctggccgctaaatataaaacacagtcaaagtcatcgcggatagtggcctaaccagccgctagacctgctcaagggttccggaattcgcaagttttctgggtgtgctgtgtagtagctggacagagtagctgcacggtgctaacgtatgcttaggctgtccgccctaagtagaacgtgccgaaaggtggtctatcgtacgtaacgaaggagggacgtactgggtttaatcccgaggtagggagcgcctgtaggtggaacgactgcccctgagttgaatgcacggttgtgcacgcggaacagtctgctgggcatcccccagtg

SEQ ID NO: 2580 - DNA, 1000 bp, unidentified
  source 1..1000: mol_type = unassigned DNA; note = unclassified dsRNA viruses sequence
gcccgtgaacaccccctgtcttcctcactgggacgatcccaccagtataaaaataggtccgtctggctgcatgttaaacagcccaggtcagcgctgtcacgctgggtttatcacctaacaatacgacccctcgcatcacgtcgtaaaactgtgagagctcgtccattgctggcgacgaattaaacagcgtactgcaggcatggggtgtttaaaaggtaggttgcttaggctgtatgttgccgatatgatacagaaacccttcgcgctgatcaaaccactgggctcaaacaaaccagtggatgctgcagtcggtcaaattcacttcgttgaagtgcttcgggtaactcccgaatcatgaggtaactagtggaccgtcaacccctcatttactaccacacttgggacttttgagagcttccttgtgtggatatgttataaaatgagtgttggttcggcgtttgcgcgtcgaatttctaagattaacacctggtgcgcactcctccggcttcggccgggggtgtgcgtagcaggagtttgttttagaaatgcacttattcaattaactcaagtcctaggtatgacttaaaactacctccccccgccctaggtatggcataaaactaccttccttggcaccgtgaagtgtttaaactagcaacctcggtggcgtgggtagatatgctcagccactataagcgtctcgggcgtgacggttattactcaaaaatcgccaaaatccatcgtgtgagcgggagatgaccctgccggacgggaggtaacctagatgtcaactagggtgtgaccacaatgcggccaacgttgtgcgagctatcgtaaccagggacggtctggatgtagcgtacgggtgcaatctctaatgcaccacttctgttgctacccctggggaacgagccatgcttaggtatggtggacagactgacactcctgtcgctaagtttcatagcgcaccaaacagtcggctgggtctacgggcccagtg

SEQ ID NO: 2581 - DNA, 1000 bp, unidentified
  source 1..1000: mol_type = unassigned DNA; note = unclassified dsRNA viruses sequence
aaatctcggacggtgccgcgcgatcctaggcacttttgttcggggcgttgtatctcactcagcgtcctcctcagccctgagaccatagggttatccgacgacttggctataaatataacatcctccctttagtggaatcgcccttacaccaacttagggccttttccagggaaaggaacccgtgccgccgcgcaattcgcggtttaccatggtgcggggttgtcggagtaggtacgtgtgctagcggtagagagtatatgatgcggtttttcgctgatttcctactgagcaccctacgcccgaatttttaggaagaacggccctcaaaaacgagaaagctgttctgccccgaaaatttgaggggtaccaccatttacgtccagcatgacggaaaaaggcataccaaactctggtcactcgcgccctgggcacggcggtaaactgcaccatttgcgtgatctatatggtcgaaatagtcgcacacctcgttaaacctcctactgcacagctctattgatcgagaaccctttagtgggaatgcagagctcacactcggcgtgtggtcaggataggtgaggttggcttccgtttcagcgcatcctgtggtgagccccacacacataagctcaaaaaccagagtcctgccgcctaatacgcgggatataaaggaagcggaggggtcattcgctataataaaattagatcaaaagcatcgcggatagtgggctcaccacccattagacctgctgtagggttccgattcggagtaatccgatagggtgtgctggtagctagctggttagagtaggctatcggtgctaacgtatgcttgggctaaccgacccaggtagaacgtgccgaaaggtggtctctgcgcaagcccgaaggcgcggtttgctaggtttaatccaagcggagggagcgcccgtaggtggaacgactgccccacagttgacgcaaggttttgcacgcggaccagtctgccggacaacctccggtg

SEQ ID NO: 2582 - DNA, 1000 bp, unidentified
  source 1..1000: mol_type = unassigned DNA; note = unclassified dsRNA viruses sequence
agttatcagtctctcatgttcgtagcgagtacatgagtatcacagctgaccaggtggcaggctaagaggaattcgagggtaaaagcagggtatccaacttcacccatcaagcaactatcttcgtgttcatttctccatcgtgctaaggcgacggtgtgtcatctctaattcttgattgtggtagcgattgtgctaaccatacaagataaaagccctcagttataaaccctgcagcctattacgtacatagccaggggcgctaactttaaattgagcgctgtaactgtagcctgtcaggatgggagcagagtctatatggcggtagtcgtcgtgatctgcgcatagccaacctctgtacatctctattgtgtcgcaacccttcagtgggaacggagagatcgcagcgaccgtgcggagcgtctggtgtggtgaccttcttctacaactatttccatctgtctcgaggaaagccgggacgtcagtaaactaggcccacgcatcaaaggcgtctaacatgaggctactaatgacaaaggcttaatcattagattcgacacgctgcccggccgtgcagccgctgtattcataaatcggcaatcgcttcgtctagtgggaactaaccattcctacgtccggtgtgagggttctccttttggaggtgtccacttcagatatcgcacaggagtttctgatttgggctaacgtatgcgtgtagctgtgcgtctacaagtagaacgtgccgaacggtggtctctgcagtgtctcgaaggcgcagatacttaggatagaatccaagcggagggagcgcctattaggtggaacgactgcccccatttccgatgtacggttgtacagacggaccagtctatcgggcatacccggtgaagcgaattcatatcatctagtggtgtccttaattaacggcgtcactttaatcccaaaaattgttgattagtgaaatttaagttagaagcttattttacgactctcttcacccacc

SEQ ID NO: 2583 - DNA, 1000 bp, unidentified
  source 1..1000: mol_type = unassigned DNA; note = unclassified dsRNA viruses sequence
aaatatgcacgccccctccctgaagcttaatagtagtgatacccttggacctgtccagggccgcacgctgggcccgaagtagtcttcctgaaggcttaagagtttaggactcacagccgaggtaggtgactgggcttcaacacctctatggttcttttccctcctttggcacaggggggaactgattaaatagaggcatagcggtgacaatcgctatataaatatgacctactcgtagggccgcgagtataaataaggcttgccaagagcatcgcgtattcaggattaccagacctgaagtcctctgtcggggttccgtccctagtcatgctgcatgggttgccatgcggtaggctagcacacgggtgtgtttctaactggctatgcagagtaggttagaaatgctaacgtatgcttaggctgcatgtcctaagtagaacgtgccgaagggtggtctctggggcgagatggtgtcagctgctgggctatgtaaatccggggtgtcttagcttaaccagtatgcgggcgtgtgtagggtagtggcttgtaagtccgggggtagtcgtccaactaacagtgtcggctacatgcttagccttaagctaccttgcatacatctcttaaccggagggagcgccttagtaggtggaacgactgcccctgacggtgacgcttggtagcgacgcggaccagtctgcccggcaccaccgggtgatgctcttatgccatatcgccgagagataacgaacggcgctagcccctagatccgggctggctttctctccgcatatgctagggtggccagacgtcccttgactggtactcacttccgggccgcggcggcctttgtcacttctttgtccttccacggatgccagccccgttcaccacatcctcatcccctaggaaacttggggaaagtagccggtgtatagcaactctcaaggggtagtgggaggagatcggaaaaatcgagtcataaaagcctgcacgaaacatt

SEQ ID NO: 2584 - DNA, 1000 bp, unidentified
  source 1..1000: mol_type = unassigned DNA; note = unclassified dsRNA viruses sequence
ttgggcgcgaatccagctagtgtagtagggggcaggaaagaacgaagtacgtgttaactatatgattcatccaacttgggtcatatacagcgtattgctacccaaggtgtcaaggtagtgtgtgcgatttacaacagcagcactactaaaaaacatcacagaccttggggcctactacagagagtacaaccgttagggtaggtaagggcaggagctacaacctcttgatctcttaccaggccagcggctctcagcccctgttttatatttactcctccccggtctagcggtgggggagtggtataaaatgagcggtcgcgctcacttgaattaatcttttacgtttacgcgcataaaatcaggacacatctcttgtatactttagtatatcaatgatgtttttgttttatgcgattaatcgtaagagaacttctttccatccgcctgtatgggcgggataataagttcaccgccttggtcgaggcgcaaacttgtatgtgcaaaggtgagctatatgctcgaaatagtcgtaactaacacacagccactacctgtagagctctattgatccggaatcctttagtgggaatgcagagctcacaccggacctgcgggtatcttcggcgttagggacttctgtttcagccttgaatcatttacctttataccttctctgaggcgcctgggccgggcgcgatattaagtacaagtcaaggacatcgcgggtagtggtctaatcagccgctagtcctgctggagagttccaacttagttgggtgtggtgcatactagctggatagagtaggtatgtattgctaacgtatgccggaggctatccgtcctcggtagaacgtgccgaggagtagtctctgcagacccccgaacgcgtggggtctttacttaaatgtaggcggagggagcgctcgtaggtggaacgactgcctcccagtcgaatgcaagattttgcacgcggaccagtctgcccggcaattcccgggtg

SEQ ID NO: 2585 - DNA, 1000 bp, unidentified
  source 1..1000: mol_type = unassigned DNA; note = unclassified dsRNA viruses sequence
gcactaaattgataagtgaggtccgcaaatttgcagctacgccagcaatggcgtatgctgaacagcctcccgtcctggtgcgacctaaccaggggagttacaaattgccagatggcaagactgtgcgcagagcgcgggtcgtgtcgtctggtggtaacgccactcggaacagtgaggtttcgagaacttccggcccccgtcggaacgttaaaggtgcagtgatcgggggttccggtggagggggatcgtcctttcgcgcgggtgtggggaaggagagtggttctcacacggacgtgcagggtatcgtaagcggcgcgcttacgatggccaagcacccaagagtgatggcgaagtcactcttggcgattgggcgcgcagccctgaatgctggcagcgaggaggccttggtctcgctagccagatcgatccaagcaaggcaaaaacctggagtaggcttgggtccaaaggagcgggtgggcttatctgatctgatcagagaaggcatcggttctggagaactaagagtgggtgatgcaagaaacctgctcaagatagcgccggaggttgaaccggtgctcccagctgagattaagaatcagctgggaaattacaaatctttgtcgtttggcgaggttgaggtagaagttctatctccccggggcgtcgaggaattggagaaagccagccctgagttgactgatagcgctgcatatgaggcgcaatttgacgcagctgggcaggcgacggattttgctttcgagccaatagcagaaggcaagggccacgcggtgggcgcggcttataaagacgagggtggtgcccgactgggggtgctagatgatgttgaagccgatccggctttaaactaatctggcactcctcgtgcgcaccctttggcgaggcgcgtgcccgattacttttcaaatttgcctgcccactatttttaaaagaaatagttggttttttggagagtctcggttgcgatagaaccattacacgg

SEQ ID NO: 2586 - DNA, 1000 bp, unidentified
  source 1..1000: mol_type = unassigned DNA; note = unclassified Hypovirus sequence
agtcttatctagtcaataagacacaagtgcagaaggggagtttatccccgcctgttgttcagctaatcctctcaaaggaggctcaccgctgggaagcgctgaggaattcgcgattaaataccgcgcgttcatgaagatgacggagtaaaccgtcatgctgttcatcataaacattaaatcttttggaacttaaaggtggattcaaccaccgagtgtgatttgagcctaaaagccatcgaggctgaaatggaaagctcagattgtgcgagcccccttagggggattttgttctgttcaaagtcgttaaaacaggagattcaaccgcagagatgattacgcatcgagctcaaggtggggggaacaccggtggtttcaagactacgctctgcggatggttgcctggactagggcagttgacgatgtcctcctagttcacgatgaatgacgatgcttttgactatttggcatatactaaatagtgacgctataccgggatacgaaccggaacccctgctcggagagctcgtttgatccgacccaagttgcctatacgacttccctaatcttaagacaccaacgcgtaccgtgctttgcctgaattctgacgctgagactcttagagtggctgaagataatctggtccaacggccttaattgcgaacggtcattgcttaaagccccccgaaggttcaaccacgtagggatctataaaggcgatgaatgaaatagtgccaggcacctcggtgtttgttggccgttcaatgtttctggtttaattttgtggtccaccattccgtaagtgaagccccaatcggtgggttaatacggtcgcgaatgtccaatgagtgttaaggatagtcatggttataatgctaaggattgaacacggttttatatcgtctggcgccctctccaaggatggcaatttgttttgcgaggaaccctagctataagaattgggagtccctcaaatgtacgcaggccaatcatcgatgcctgt

SEQ ID NO: 2587 - DNA, 1000 bp, unidentified
  source 1..1000: mol_type = unassigned DNA; note = unclassified Picobirnavirus sequence
gtgtagaacaatggttttacacaaaattgaaaacattcaatcaattctgctcctcagccacgcagttacactgtgtgtttgtagcagcagaataagtcagaatgtgttaggaggtgacacttatgactaagaatcaaattgagtatctaaaattattagaaactcaaagatcaaatgttgcaaatgagaagctcacggcaacaagagatcaaactactcgagaattaggatttgctaatctcgcagagactagtagacacaatcgccaaactgagcaacatgccgttaatgttcttggagaaactgcacggcacaatcttgctcaagaagctttaacttcaagatcacttgatgagcaggagaggcataatagagtctcagaggatttgggatatgccactctggacgaaacgtctcggcataatcaagctgtggagttggaaacttctttgcataatagaaacacggaacgtgagcaagtccggtctaacaaggcaaaggagttcgaaacttatcgatcaaacctggctaaagaagttgaaactagaagggcgaacgttgctagagagcaggaaactgcgcggcataacaaagcaacggaaaagcaagcttctgctgaactcgagtattcctatgccaacttggcagaacagcgcaggtatcactcacagtccattggtttgggctactctcaattggaggaacaggctagatctaaccttgccagagaggctgaaacccgtagatctaatatctcccaggaggcactacggggtaagcaactggctgaagaggaaagatccaatcgccaggatgaagccttgacctcataccgaaaccgtgagcaggctaggcacaatcgagagtctgaagagctagaggagatcagaactagaagccaaagggttcgcgatcttacctcaggatacaataatctaatgtctggtgcgatgagcggcatcagaagcgctggtatgctaatacccttattcggactgtc

SEQ ID NO: 2588 - DNA, 1000 bp, unidentified
  source 1..1000: mol_type = unassigned DNA; note = unclassified Potexvirus sequence
aacaaaaagaaaattggtgaaatcctctttgaaaactataagagagccatgcaactcccaaatgacccagtagcattctccagggagctttgggatgtgtgcgccgacgaggtccagaaaacctatctgtccaagcccctccacatgatcaagaatggccagaacaggcagtctcccgactatccaaaaaacttcatcaccttgttcctaaagtcacagtgggttcagaagcttgagaagctcgggctcccaaagattaagcccgggcagacaattgcctcctttcatcagatcacggtgatgctctacggtaccatggctcgctacctccggagaactagagaaacattccagcccgccaacatttttatcaactgcgagagaactccggaggatatgtccaagtgggtccgtgagcactggaacttcaccagaacctcctacgccaatgacttcactgcctttgaccaatcccaagatggcgcgatgctccaatttgaaatcatgaaggcaagattcttcaacatccccgaggaagtcattgaggggtacattgacatcaagtgcaacgccgaggtgttcaccggcgtcctttcaatcatgaggctgacaggagaaggtcccaccttcgacgcaaacactgagtgcaacatcgccttcacacacacaaagtataacataccaaaggaatgtgcacaactctttgcaggagatgactctgccctcgacttctcaccagaagtcaagcccagcttcaggctgattgaaactgaactgtcactgacagccaagcccgtacttaaaatgcaaattcagggacaatgggctgaattttgtgggatgctcattacccctctgggcgtcgtcaaggacccaatcaaactctgggcttcatgggtgagggccaggcaaacaggcaagctcaaagaggttgcggacagttacgagcttgacctttgcctagcataccaacaccgcgatctgttgcaagaggtttttg

SEQ ID NO: 2589 - DNA, 1000 bp, Tomato blistering mosaic tymovirus
  source 1..1000: mol_type = genomic DNA
tggaaagcttgccaaactctggccctcatgcatgattacatcatcttaatccttggtccagtcaagaagtatcaacggatcatagatgccagagatcgccctcctcaaatttacatccactgcgggcacactcctcagcaactatcctcttggtcccaatctcatctgaaaggctctgttttccttgccaatgactacacatcttttgaccaatcccagcatggagaagctgtagttttagaattgctgaaaatgcaacgcctttcttttcctcctttcttcctctctctccatcttcatctcaagacttccattgagacgcagttcggccctctgacttgcatgcgcctcacaggtgagccaggcacctacgatgacaactccgactacaatctggctgtcatttattcgaaatactcgatctccaatcatcccatcatgatttctggggatgattccgtaatctgtggttctcctcctctcaatcctcagtggcccaatctccagaaactgctccacctcaagttcaaaactgagcagtcagaccggcctctcttctgtggctattatgtctcccccctcggagcatgtcgcaatcctctggccctcttcgccaagctcatgatttgcgtcgacgacctaaccttgccagacaaggtcctttcttatttgtctgaattctcagtcggccacgctttaggtgactcagtcactgaagtcatcccatcgcacctcatctcctattactccgcttgtcatgacttcttctgtcgcaactgctcaccttcccaaaagctcatgctgagccttgatccaatcccagagtccaagctcatcaagttaatcctcaaagttcgctgggcttcaaaaagtttcttttccatgctcccacaaaaggccagagacatccttgtttccactcattctttccaatccatgccttttgatcctaaagtttcccaactagagtcggaattgcttcccaattacaattgacacg

SEQ ID NO: 2590 - DNA, 1000 bp, unidentified
  source 1..1000: mol_type = unassigned DNA; note = unclassified Benyvirus sequence
ctttactgtccattgctgctggtgggagcggcttgtttttcgcgcgggcaaaagtaaaggagttcctgctgaagatgaaaggcaatctgttcaaacgtgatagtgagcctgacaacacaggcggttttaccggcgactggccgtccaggtcgtctggagaaatttctttacaagagttgagtagaccatcaccggagttccaagctccacggcccctatctccgagagtgagggacattttagacgatagacacctggatgtcttatatgccctccgtaatggtttggcgtattgtgccgggttgtatgggttcacagacaaattcttggcgatcagttatgcgttacaaaccgacaagactctaatatctctcctggaggacgatagtcccttggacgcgatcaagccatcagaagatgccatattggcgaaccatgagtctgaaattgcgctgctacagagggagctggagttggaaaaactcaaaaacgagttagcgttggaaagagctagggcagagattgaaacattaaaaatgcggaaagacgtgcaggcccaagaagaactaaatgagttagccataaaggaacagagactgaaagccgaaactgcagagttttcacggaacaaagaggaggctctcacaaaattggctcagatggacgcagactcatatcaagctagacacacgggaataaccagcgttgctagtattaccggtggatatcttatgggtagggccatgcgcgggcctaagatgagtgcgtacactgctggggttcagggggtttccaatttaagttctattgacagcagcagggcacgcgctaattcaggttctgttttaagtgggtctagggcttcagttgctgcttctgttcctattcagcctgtaacagctagtactgcttccagcagtagggcggggtcgaacgtttttaccattaaggatctaggtagtggtagattacatacacctccacccttttcacctgcagg

SEQ ID NO: 2591 - DNA, 1000 bp, Orthohepevirus A
  source 1..1000: mol_type = genomic DNA
aaggtgtgtggaccaaaagaaacatttgtccccggtcggcagctgcagttctatagacagtgtcgggattgggtgtcagcaggtttttatgtggaccttagagagctctgcttcgatcgtgagtacgcctgcccatgcctcccttttgagcgggcagtgcgtaaaggatgttgctgtgtcgcccgtaagttgaaacaggtttgtgggtgctttatgtctgatgttgtggagagtttagaggactcgtgtgaggatctgacagccgacttttaccccaaaccagaggtttacgagcccgctggcttggataattggaccatccgcgctctcacggacgccttccatcaggcctccctgcgcgccgtgaggaccggtgcaaaactggctgggtggccggagatagggttggcattctatatcgcccccgtgggtattgtctttcgcggcgagcccctactaggcccccccggtcgccgattagaggcggggccttattgggctgatgcgccgccgccgcccacgccggatgaagcgccatatcaaacaccggtgagcccggacggccctcccccgcctgcatcttggacgccggggccgatctccccgaggtacgttctccctacacctgttacgtaccgtgggcatctccccgggtctgcaggcttctgggagtcgtcctccgcttccacacttgagggctctctgagtcgtcacacatccctccagagtgtcaacttggaccccccccgtaaccctcgagtccagccggtccagagggtattactggagttgctcccggatggggcggcagtttatgaaggggatcttttcaattcagattgcttctggcttgtcaatgcggccaacgcccaacacaaccccggagggggcgtgtgcggcgcgttttacggacgctttccagaggcctttgaccgaacccaatttgtccaccctaacgggtcggtggccgcctacacagtgacacccaggcccataattc

SEQ ID NO: 2592 - DNA, 1000 bp, unidentified
  source 1..1000: mol_type = unassigned DNA; note = Hepatitis E virus rat/R68/DEU/2009, complete genome.2 sequence
actgcggttctcaacttggatttcactgataaggcatgcactaggataacattctttcagaaggactgcaacaagtttaccacggatgagccagtgctacacggcaaggtcgggcagggcatttcagcgtggtcaaagacccttgtggctctgtttggcccttggtttagggccatagagaaggcgattgtggacacactgcctgagtggtgtttttatggggattgtttttcccaggagaaattggaggacgccgtggccggggcgaaagcctgccgcgttttcgaaaatgatttcagcgagtttgacagcacacagaataatttctctttaggccttgagtgcttattgatgaaggaggccggggcgccccagtggatgtggaggttgtaccacctgctccgttcggcgtgggttgtgcaggctcctcaagaaagcttgcggggtcgatggaagaagcattccggtgagcccggtacattgctatggaatacagtctggaacatggcagtcataatgcattgttaccgttttgatgggttagctgtggccgcatttaagggtgacgactccattgtgtgctgccgattctatcagcaagagcctcgagccgcagccctcatcaccggctgcggcctcaaattgaaggttaacttcggggatgttggctcgtacgcaggcctgctagttgcctgtggtcttggggtcacccctgacgttgttaggttcctggggaggctctcggagaagaactggggtccggtgaaagagcggaaggaagaccttgaacagtccgtgcgtgacttcgtggcaaggttgcgcaacgtcactgctctgtcgtgcctgctcgccactcgcttttacaagctggagcccggcctggccctcaatgcagtcgcaggcttgaaggcgatcgctgaaggccgcatggagctgaaagagtatacctggcctgttctccagctggaggggaagaaggaataacactctggcccgtagc

SEQ ID NO: 2593 - DNA, 1000 bp, unidentified
  source 1..1000: mol_type = unassigned DNA; note = unclassified Tobravirus sequence
gatgtgaaacctaagactgatttaacaccgcaatttgaatactcagctctacagactgttgtgtatcacgagaagttgatcaactcgttgttcggtccaattttcaaagaaattaatgaacgcaagttggatgctatgcaaccacattttgtgttcaacacgagaatgacatcgagtgatttaaacgatcgagtgaagttcttaaatacggaagcggcttacgactttgttgagatagacatgtctaaattcgacaagtcggcaaatcgcttccatttacaactgcagctggagatttacaggttatttgggctagatgagtgggcggccttcctttgggaggtgtcgcacactcaaactactgtgagagatattcaaaatggtatgatggcgcatatttggtaccaacaaaagagtggagatgctgatacttataatgcaaattcagatagaacactgtgtgcactcttgtctgaattaccattggagaaagcagtcatggttacatatggaggagatgactcactgattgcgtttcctagaggaacgcagtttgttgatccgtgtccaaagttggctactaagtggaatttcgagtgcaagatttttaagtacgatgtcccaatgttttgcgggaagttcttgcttaagacgtcatcgtgttacgagttcgtgccagatccggtaaaagttctgacgaagttggggaaaaagagtataaaggatgtgcaacatttagccgagatctacatctcgctgaatgattccaatagagctcttgggaactacatggtggtatccaaactgtccgagtctgtttcagaccggtatttgtacaaaggtgattctgttcatgcgctttgtgcgctatggaagcatattaagagttttacagctctgtgtacattattccgagacgaaaacgataaggaattgaacccggctaaggttgattggaagaaggcacagagagctgtgtcaaacttttacgactggtaat

SEQ ID NO: 2594 - DNA, 1000 bp, unidentified
  source 1..1000: mol_type = unassigned DNA; note = unclassified Alphacarmotetravirus sequence
gatctgagcaggtgggacatgcacgtccaagttccgctactcaagcgagtactggaaatatacagtcagcacgtgacgtgcccgctactgctggacatgtgcagcaacctcctcaagaacgtttgctacacaaacaagggtatacgataccacgtcgatggaggaatcatgagtggggatatgacgacgggcctagggaattgtattgcagtacttgttatagttatgtccttccgggacgttataagaaggcttgctaccacgagcgaaagcaacacgctcgacgtgctgggggaactgccctcaagtacggcaacccaagatcaggagttagtccggaccttattagagataagtccccgtcttcgggccgctcagttgacactggggtggctcagcatattagacgatggcgacgaccacgtgataatttgcgagaaacaacatacgtggatttgcgagctagtcctccctctgtggtggacagccatgggtcactccctgagagtggacggcacggcggaagacttcgagagcatagagttctgccaacacaaaccatggaatggtgcaactcggcttaccatggtgcccaacccagcaaaagttttgcccaagtcttgcacggtgacagggaagtacatcagcaaaccccagtcgtatctacgtactgtgtggaccgcccgggctatccttcacgtggatatcccgcttttgggcccatttttccagaacaacgccagacagttgtctggggcccctctaatggaggtcatcagttcggagtttcagcacatcaattcgtccctacattacctaatgagataccacgcgagtggtatgtacctgccagcacagcagaaggtggacgagatggacagggtgctgttttggcgaatgtgggacatttcgccaacggagcaatgtaaatgggaaacgacacttgctcccaaaaacaccaacgtttccgatattgactggccgtcagggtattgagatc

SEQ ID NO: 2595 - DNA, 1000 bp, unidentified
  source 1..1000: mol_type = unassigned DNA; note = unclassified Tombusvirus sequence
cctgatgtcaaatcactagggcagcagctcgactcgttccgtgctacgaggataaactcgcattggggtcagaggtggccattgatgcctgaccttaaacaaacgccggcttggctcgactggcccccgtagaggggctaacccccactttattacaattatggctacaactacatcgaacccagaaactgcctccgtttattctttcgatgctcctaagcctacaattcgtttgcgccttcccgggaaaggatgtgccacttgtggcatgtccaagcctgtggaagtagcgccagtggtggtacaaaacgacgctcccgtgtcgatggagcatcatgttcaaggggtcaaggctcgtgtgggaccgtggatggcttttaagatgttgttccgtggctatgttagcccggtggcacaactgaaggccaagcacgccctcgagacttacgacaaccctgattatgatgagccctctgatcatttcacggatgtcgtcagcggttgccgcaaccagggtgaggaggcgatccaggcgaagcgcaagcctcgcagggataacacttcctggtggacggtttattctctgcttgcacatgcagagtttaaccgcccctctttcacgcgggcgaacgaaatggtggtgtctacttggattcgcaagcagatggctgccgacggggttaccagggtagactgtgccaaggtgctgggtgccgctactcggatggcatttgtgcctaccgagtcggacatctttgccgcacagatggctcagacccctgcgttccgcaagagagaaggtgaggcaaacaccaaatggtggactgcatggtgggattgcagaccgcgtggctacgaaagtagccaatagggtggcccagttgctgtaccaggaagggaagccggcgtttcgctggcccccaccccttccagtttggtggtacatcgcaaagtgggacatgccaatcgcgttcgacgcacgtacttggtggggcaaggg

SEQ ID NO: 2596 - DNA, 1000 bp, unidentified
  source 1..1000: mol_type = unassigned DNA; note = unclassified Tombusvirus sequence
aagctgttgatggcgtattcggagagacgacgtgcattaagggatacacagccgatgaggtgggtgcaatttttcgggagaagtgggataggtttcataagcctgtcgccattggtctcgatgcatccaggtttgatcaacactgttccgttgaggctttgcagtatgagcatagcttctacagggccatgtaccctggcaacaagctcttgggcaagttgttggactggcaactccacaataaagggaaaggttatgttcctgatggaactataacctaccgcaaggaggggtgccgtatgagtggggatataaacacttcgttgggaaattatctattgatgtgcgctatggtacacgggtacatgcgtcatttggggattaatgagtttagtctggcaaactgtggggatgactgtgttcttatactagaacgcagaaatcttaagcaggtgcagaagaccctaccggagtatttccttaatttgggatacactatgaaggtggagccgcctgtatttcaattggaagaggttgaattttgccaggcacaccccgtacagtttcaaggtggttggaagatggtccgaaatgtccgcactgcgatgagcaaggatgtgcattgtgtcaataatatacgcgatctggcgacgaggagagcatggagtaatgctcaacaccacggtggattagcactcagtgctggtatacctgtggttgagaggttctactccaggttcgcactatatgatgtgcctcgtaagcatcaacgcattgacactgtcactaatgttcacaagtggcgtggatctggtggaagttatgttgtgactcctgaatctagggctagcttttgggctgccttcgggttgacgggggatgagcaactagctttggaggaccgtctggatagatgggagatggatctgtttggagaggagggtgttgacgctcatgagcccagcatcctcgactccgccgtagcttgaccaagcgagac

SEQ ID NO: 2597 - DNA, 1000 bp, unidentified
  source 1..1000: mol_type = unassigned DNA; note = unclassified Polerovirus sequence
gtgagccttgttgatcaactggtagcccgggttttattccaagaacagaacaaactggagattaatctctggaaagctataccaagcaaacccggaatggggctgtctactgactcccaagtgatagagttcatcaattctctgtcccacctcgtgcaaataccagttgaagacttggtatacaattgggaaaagcacgtggtgcccactgactgctctggttttgactggagtgtttctcactggctattgacggacgaaatggaggttcgtaaccgtctgacacgcaacaacaataccctcacaagaaagctgagggattgttggttaaaatgtttatccaatagtgtgttggccttttctgatggaagcctgtatgcacagcgtgttcctggagttcaaaagtctggaagctataatacaagctcgactaactcccgaattcgtgttatgtgtgcttattatgcaggtgcttcctgggccatagcaatgggagatgacgctttggaagcagtggacactgacctatcagtgtataaaaatataggtttaaaagtcgaggtttcaggacaactggaattctgctctcatatctttgagaagcctgacctcgccattccggtaaatgtaggaaaaatgttgtacaaattgatatatggctacaacccggaatgtggatcgattcaggttctcaagaattatatcgacgcttgcacttcagtgttaaatgaattgcgtcatgatcctgaattagttcagcttctctactcgtggcttctccatccagtgttgccacaaaagtaagcgagtaagagaagcagacagatagccggtatcagttgttgcaatagccggagtcttagtcaacgtacaatcgtgaaaattgattataaatttctcgccggatttaccgcgggtttcgtgacatcaattccaatatcagtttttgcgatttatatcatctacctcaagatttctgcccacgttagatcaatagtta

SEQ ID NO: 2598 - DNA, 1000 bp, unidentified
  source 1..1000: mol_type = unassigned DNA; note = unclassified Luteovirus sequence
cagcaacggtgctcagtggttacgataattttaaacaggggagattgatcgctggtaagtggaacaaattcaggaatcctgtggctattggagtagacgcctcccgcttcgaccaacatgtgtcgacggaggcgttgaagtgggagcacagcatctacaacaaggtttttggggaccctctgttgcgtgacttgttggactggcaaacagtaaacaagtgcagtctttttgttgaagacaagatgttgcgcttcaaggttaagggccacaggatgtctggtgatattaataccagtatggggaacaagctcatcatgtgcgggatgatgcacaactatttccgtgaacttgtagtgaaagctgaactttgcaacaatggtgacgattgcgtcatcatctgtgaacgcaaagacgaaaagaagttcgacggattagggaaatggttttgggagtacggtttcaacatggctattgaacctcctgtatactccctagccaagcttgaattttgccagtcccgaccggtttgtataaatgggaagtatagaatggttcgtcgtcctgattcaattgctaaggacgccaataccatgctcagtatgcagaatgcagaagatgtgaagagtttcatgtctgctactggtcaatgtggtatgattctaaattctggtgtccccattttagacgcttaccattctaatttgtatagaggttcgggctacaagaaggtatctgagagctttattgatcgagtcatatcttatgggacagatgagcgcctccagggtcgacggacccgtgttgaggaaccagtaactatggaaaatcggttgagttactgggatgcttttggggttgatccgcaaacacaggtccttgttgaacgttatctcaacaatttgcggatcggatgcgaacccctgggagtgaagatagtgactcctcttctcacaagcacgttgcttgaaataccttattttaaacctcttaatttagcacc

SEQ ID NO: 2599 - DNA, 1000 bp, unidentified
  source 1..1000: mol_type = unassigned DNA; note = unclassified Luteovirus sequence
aaagtcccacaattctttccggttacgatagttttagagtaggtaggatagtggctgcgaagtggggtaagtttcgtgaccccgttgctattggagtagacgccagtcgtttcgaccagcatgtctctcgacaagctttgaagtttgaacatagtgtttacaatgggatcttctgtgatcctattcttaagaaacttctcaagtggcaactcagaaatgaggttgtcctttttgtcgaagataagatgctacagtttaccatcgatcgaatgcgaatgtctggtgacatcaatacttcaatgggcaacaagataatcatgacaggactcatgcatttgtacttccgagatttgggagtccaggctgagctgtgcaacaatggggatgattgcgtgattatctgtgacaagaaggaccagcgtaaatttgataatcttgccgcttggtttttggattttgggttttccatggctattgaagatccagtttacgaactggagaagcttgagttctgccagggacatccactgtgcatcaacggcagttacaggatggtccgcaaacccgagagcatgtctaaagacgcgcactctatgcttagcatgaaacaccacgaggatgtcaagacattcctcagtgccacggcacaatgtggtctcgttcttaactctggggtaccgatcctggaggcgttccataggtgcttataccgtacttctgggtacaagaaagtctctgagggtttgataaagaaggtgatcagttatggtcaagatgagcgactcggtggcaggcgtgccattcgcgaggaaccagtaactatgggaaataggatgagtttctggaaagcttacggagttgacccgagaacacaggtccttgtcgaacgatatttcgacaatttgacggtcaatatcgaactccgcggtgtaaagaacttgacacctcttttacaaagcattcttgtgggagtccctgacttccctgatttcagccaaat

SEQ ID NO: 2600 - DNA, 1000 bp, unidentified
  source 1..1000: mol_type = unassigned DNA; note = unclassified Luteovirus sequence
atgcaaatggcgccacctggaatgtaggtgagtacaacaatgttaaaatcacaaaacttctcaacacctcttcttggaagaaggggcataaagacgttgtgctcaacggttgccattttaatgacggtcaaatcattgaacgcgattcaaccatgtcgttccactgtgaagtgggacatggcggaggtacaatcctcctggttgctccccctgtttgtaaaagtgacaagtacaactatgttgtctcttacggcgagtataccaccaaacacatggagtttgggtccattgctatatgttttgatgagaagaatgatggagcaagagcagggaaattcttgggcgctcctttcccccgtgcaggtcacgtggtgcgtgagcaacaaacagaaattgcccgatttccagcaggtagcgacgtcccgattgtaaagatcagtgacaatgactttgctacctctacacaaccagctgcacatattctccctgttccttcatctgttcaacttcctgacgatcctgtctctaagaaggtgcgatcttggatcgagaattcgagcgaggatttgcgcctggcgcgtgaagctgaacagactgacagcgactgggaaccccttccaccacctgcaccccctcctggacccaggcaattgcccaccgacacctcaggtgccactcaggctatccgcaaccagatcctgcgtgatcatacgcagccctactctggccctggtactccgcccgtcttcgatgatattgaggatacgaggtcaaccacccgtactgaaagttcgcggcggagttttctcagtggtgtcctcagaccccagctcaaaccaaagagtaatttgcgtccgacttcctctctcccgcgtaagctaactgctgaccaggaggcacgagtgaaggctgtgcgcgagtcttttgggtctgccgctgctaaacgtcttagagacgagtttcttgaggggaaggtcagtcccgatcagatctactgacc

SEQ ID NO: 2601 - DNA, 1000 bp, unidentified
  source 1..1000: mol_type = unassigned DNA; note = Torilis crimson leaf virus isolate RL5 genome assembly, complete1 sequence
ttaagtgccggtgtgggggttcctttcatctcgtatgggaaaagaacacaccgtgattggattgaaaaccctaccctcctccccgtcctcgcaaggatgacttttgatcgattacagaagatatcagaagccaactttgaaaatatgacgcctgaggagctggttcagaatgggctctgcgatcctatacggcttttcgtaaaaggtgagccgcacaaacagagcaagcttgatgagggacgctaccgccttatcatgagtgtgtcattattagaccaattggtagcccgggtcttgttccagtctcagaacaagttagaaatagcgctttggagagcagtaccctctaaacccggatttggcctttccacagacgatcaaactgaaaattttgtagattgtctagccaagcaagtgggtgagacggctgatgaagtaataaagaattggccacaatatttaattcccactgattgctcaggcttcgattggtcggtctctgactggctactcgaagatgacatggaggttcgaaaccgcttgacccacaactgcacccccctactaaggaggctccgtgcaggttggctcaaatgcatttccaactctgtcttgtgcctttctgatggcaccctgctggcccaaacaaaacctggggttcaaaagagcggatcttacaataccagctcttctaattctcgaatccgggtgatggctgcttttcatagcggtgcatcttgggctatggcgatgggcgatgacgccctggaaagcgttgacacggacctatccgtgtataaagatttaggctttaaagtcgaggtttcagcacaactggaattttgctctcacattttcaaggagagaaacctcgccattccggttaatgtcaacaagatgttgtacaaattgatttatgggtacgacccggaatgtgggaacgctgaggttttgtcaaattatctcagtgctgtggtctcggttatgaatgaattacgtc

SEQ ID NO: 2602 - DNA, 1000 bp, Ollusvirus culvertonense
  source 1..1000: mol_type = genomic DNA
caagtaatcacctataacaaacttgatagacaagattatctaacttatcaccagctctactatactctaaactttgtagctacccgatttgtgagctccactctacaatagatactagagtaggttatctctcaactggatcagagacctcatcgcgtatgcttgtgagtgttctaaattggttagtcacgacaagtgtactagctcctctgtacctctactttactgggttgagatttcaagacctatttgtgtacactccgatacccgtaggtatcgaccaacataccgaactggccacattcggtgcaagtgattgcaccaacaccgccaacacggtagcggctacattttccattactccttcagagatctgctaccttagtgcatccttaatcacttgtgcatcactatactttctatatcaatcttggaacaccatgcataagtcagtagtaagaagcttagaggagatccgccggaaagcagtggagcaggaacagaagttgccccaggtgtccctgactggtctggaagatatttcagctcacctccagggtattaccaaagagctgaaggagatacgcttgcagttagaattattaactgatcaagtcaatcaacctcctactagattggcagcaaccgcaccacctttaccggcatctacaccaccagtaatttcttactatccaaacttaaatgtcccatgaatagtgctgagggataaccctggactgataacacggatttgaccatacaaatatgaattgcttcatccattgcttctctctagttattacttagattttagattctatgctttaccttactccaccacgaagctatactggtttttttagttgctattaatctcccttgtatttgttctctcccctgcttgctttttaaaaacttactatgccaactctaacaacactcagttcaaatccatcagtaacaaatgtgatagacaaattaactattacaaaagatagta

SEQ ID NO: 2603 - DNA, 1000 bp, Human orthopneumovirus
  source 1..1000: mol_type = genomic DNA
caaatcaacttacaacagatacttcaacatcacagcacaggctgaatcatctcctcgcatcatgctacccacacaactaagctagatccttaattcatagttacataaaagcctcaaatatcgcaatcaacactaaatcaacacatcattcacaaaactaacagctggggcaaatatgtcgcgaagaaatccctgcaaatttgagattagaggtcattgcttgaatggtagaagatgccactacagtcataattactttgaatggcctcctcatgcattgctagtgaggcaaaacttcatgttaaacaagatactcaagtcaatggacaagagcatagacactttgtctgaaataagtggagctgctgaacttgatagaacagaagaatatgctcttggtatagttggagtgctagagagttacataggatctataaacaacataacaaaacaatcagcatgtgttgctatgagtaaacttcttattgagatcaatagtgatgacattaaaaagctgagagataatgaagaacccaattcacctaagataagagtgtacaatactgttatatcatacatcgagagcaatagaaaaaacagcaagcaaaccatccatctgcttaaacgattaccagcagacgtgctgaagaagacaataaagaacacattagatatccacaaaagcataaccataagcaacccaaaagagtcaaccataagtgatcaaaatgaccaaaccaaaaataatgatattaccggataaatatccttgtagtatatcatccatattgatctcaagtgaaagcatgattgctacattcaatcataaagacatattacaatttaaccacaaccatttagataaccaccagtgtttattaaatcatatatttgatgaaattcattggacacctaaaaacttattagatgccactcaacaatttctccaacatcttaacatccctgaagatatatatacagtatatatattagtgtcata

SEQ ID NO: 2604 - DNA, 1000 bp, unidentified
  source 1..1000: mol_type = unassigned DNA; note = unclassified Orthorubulavirus sequence
caaagagtccagccaggccgatggttatgaatatgactcttacttagcacaaaatgcaaaaaccaacattctcaaaaggtggacagatgtaagcggggatgttgagccgatcccgatgaaccccgaagtgtttaagaggggggcagacctcaccaagcccacaaatcccaatccaggtcatcgccgagaatggagcattgggtgggttgggtcaacagtcaaggtcttggagtggtgcaaccccacctgctctccaattacagcaacatcccgatactatgaatgtgtctgtggaatctgccctaagatctgcccccgatgtgtcggagattatggacatgttgagacggctggacgcaaggattggctcagtagaggcgaagatggatcggattctagcagtaggggcgactgtgaatcagatcaagaatgaagtcagttcattaaaatcgatcactgccacaatagaagggatgattacaactgtaaggatcatggaccctggcaccccgagccatatgagtgcaactgaagtaagaagacagttgagtgacgtcccactagttatcagtggacccggtccagtcccccaacttgaccccagaagagacttaattgccttagatgagcttgctaggcctaaggttgtgcagagccccccggttgcttctcccgcaccctccatggcctcccagctaagtgatggcacccgcatcatgatccttcagatgataaaagaatgcgtctctgatccgcttgaacaatccagatttgaaactaaattgagcagctgcacaaccgaggaccaagggaaagcaataaagatggaaatcttacggagagcaacctaaaaactagctgacacactgctcaacatcaaccacccctgcaacccacccacatgcgcaaccgcagcccagagcacacacccaacaccgactcaatcaattaagaaaaaacataggcccgactggctgcaaacccagtcggaaccccggcc

SEQ ID NO: 2605 - DNA, 1000 bp, unidentified
  source 1..1000: mol_type = unassigned DNA; note = Bat Paramyxovirus Eid_hel/GH-M74a/GHA/2009, complete genome.2 sequence
agaacaaatcaagaagatccctgcaatggagaagaaactatcagacattgaaaagcttctgcttaaaaccaatactgcactctccaccattgaaggacatatcacatcaatgatgatcatggttcctgggaaaacagtgaacgaaggagagatacaaataaatgagcagttaaagcctgtaattggaagaaaagatggtgtgtacgacaaaatgatactcccacgagtagacaagaaaatctcacttgtgactgatcgtacacctctttgtgatgatttcaaagaagatccttacgtgttaaatgagaagcttatccttgaccccatcaatccaagcgtaaccaatgcctcggcgttcatacccagttacgacaatatatctcctgctgttcttcgatccctcataagaagcaatgtagaagacagagagacacgagtggagttgattgagttagtgaatcaagcaagaaatgattctgaactcaatgagatactcgcattagtcaatgacattatagattcaaatcagtctggtgtgtgattcccaaaatcactcaactaactcaacaaacaacacacaatacccgaagtagaaaacaatgacactagatcgctacataactgtttcgcagtagctgcaatagggacacatgtaaatcaccaccgattacacccaccaatctcaaatcacagctgttcacgcatctttactcactgcttaagcaatgatatatgcaagtataattaaacaaaacttagggatcaagcacgatccaacgccggagagcgacaaagaaaaaccaaaaccagagaaacaccaaccaatctcccaacgaaactaagaggaccccacaacagcgaaacccatccaaaaggaagaagtcaccccaaaacccaaacccgaaaagacaaagaccgtcccaccgctacatcagcagcgcaggagtccaaccagctgaggtcaagaggaggaaggaacagaagtagttctacggacgaa

SEQ ID NO: 2606 - DNA, 1000 bp, unidentified
  source 1..1000: mol_type = unassigned DNA; note = unclassified vectors sequence
agcaatacccgaaaacgacccccctcataatgacagccagaaggcccggacaaaaaagccccctccagaagactccacggaccaagcgagaggccagccagcagccgacagcaagtgtggacaccaggcggcccaagcacagaacagccccgacacaaggccaccaccagccatcccaatctgcgtcctcctcgtgggacccccgaggaccaaccccgaaggtcgctccgaacacagaccaccaaccgcatccccacagctcccgggaaaggaacccccagcaactggaaggcccctccccccctcccccaacgcaagaaccccacaaccgaaccgcacaagcgaccgaggtgacccaaccgcaggcatccgactccttagacagatcctctccccccggcatactaaacaaaacttagggccaaggaacacacacactcgacagaacccagaccccggcccgcggcaccgcgcccccaccccccgaaaaccagagggagcccccaaccaaacccgccggcccccccggtgcccacaggtaggcacaccaacccccgaccagacccagcacccagccaccgacaatccaagacggggggccccccccaaaaaaaggcccccaggggccgacagccagcatcgcgaggaagcacacccaccccacacacgaccacggcaaccgaaccagagtccagaccaccctgggccaccagctcccagactcggccatcaccccgcaaaaaggaaaggccacaacccgcgcaccccagccccgatccggcgggcagccactcaacccgaaccagcacccaagagcgatccctgggggacccccaaaccgcaaaagacatcagtatcccacagcctctccaagtcccccggtctcctcctcttctcgaagggaccaaaagatcaatccaccacatccgacgacactcaattccccacccccaaaggagacaccgggaatcccagaatcaagactcatccagtgtccatc

SEQ ID NO: 2607 - DNA, 1000 bp, Human respirovirus 1
  source 1..1000: mol_type = genomic DNA
aacgaagagtcagcagccactccaaagaacaaccacaaccacagaaaaacaagatacacaacaaacaatgcaaacaacaacacaaaaagtccaccaactcccgaacacgacgcaaccgcaaatgaagaggaaaccagcaacacatcggtcgatgagatggccaagttattagtaagtcttggtgtaatgaaatcacaacatgaatttgaattatctaggagtgcaagtcatgtatttgctaagcgcatgttaaaatctgcaaattacaaagaaatgacatttaatctctgtggtatgcttatatcagttgaaaaatcacttgagaataaagtagaagaaaatagaacattacttaaacaaattcaagaggaaataaattcatccagggatcttcacaaacggttctcggaataccaaaaagaacagaactcactcatgatggccaatctatccacactccatataattacagatagaggcgggaaaacgggaaatcccagtgatactacaaggtcaccatcagtcttcacaaaagggaaagacaataaggtcaaaaagacaaggtttgacccctctatggaagctctaggaggtcaagagttcaagcctgacttgataagagaggatgaactgagagatgacatcaaaaatccggtactagaagaaaacaacaatgagcctcaagcatccaatgcatcacgcctgattccgtccactgaaaaacacactctgcactcactcaaactagttatcgaaaacagtcctctaagcagagtagagaagaaggcttacatcaaatccctttataagtgtcggacaaaccaagaggttaaaaatgtaatggagctattcgaggaagacatagattcactaactaactaaacatgaatctacaatttcaaccagcaatcaaaatcaatatccagagccaactcaaaaagctccctcaaaacaattaagaaaaacttagggtcaaagaaattttgcccggagaaaggaa

SEQ ID NO: 2608 - DNA, 1000 bp, unidentified
  source 1..1000: mol_type = unassigned DNA; note = unclassified Sobemovirus sequence
gagctggtagagaaaggtctctgtgaccctgtgcgcttgtttgtcaagaacgagccacacccacggaagaaattgcttgaacgcagattcaggctgatctcttctgtttctctagtcgaccagctggtggagcggatgcttttcgggccccagaacaacaccgagatttcgacttggtggcagtggccctcgaagccgggcatgggtcttctgacccctgaacaaatccgtttggtgtgggacgacgtgttccagaagcaccaggcccaccctgcggctgaggcagacatatcggggtttgactggtccgttcaggactgggagttgtggtcagacctcgcgatccgtataaacagagggaatttccagggaaacctcaggagagcggctatcagccgctactactgttttatgaactctgttttccaactctcagatggaactctcatccagcaggaattgcccggactgatgaagtctggctcttactgcacctcatctacaaactcgcgcattcggtgcctcatgggtgagcttatcggctcgccgtggtgcatagcgatgggcgacgattcagtggaggggtggattgaggggggccagtccaagtacgccgcgctaggtcacacctgcaaggagtactacccatgtaagaccagagggcgcgagctcttggaattcaacttctgttcgcatttgatcaggaggggtcatgctgagctaacttcatggccgaaggcgttgtttcgctttctgtccagcaagcatgaggactttgaggatctgtgggttgagctccacacgtgcggggtgtggggccggatcgaacgatatctgcgtgggatagggcgtgtctcccacaaagatagccaggaagggcaagaaaaccaaccccaaccaggggcagcaaggaaagaagaagagccggcgtccacgtgggcgttcggcggaaccccagcttcaacgggctccagtggctcaggcctcccggatatctggg

SEQ ID NO: 2609 - DNA, 1000 bp, unidentified
  source 1..1000: mol_type = unassigned DNA; note = unclassified Barnavirus sequence
cgtgcgcaatggcgcgtgtgatccggttaaactattcatcaaaggagaaccacactcgcagaagaaaatcgttcagggttttcttcgaatcattgcaagtgtatccctatgtgatcaacttcttacgcgtacgattagtgcgcgtcaaaataagactgagatcatgaattgggaaacctgcccgtcaaaaccgggtatgggtcttcacgatgaaggtcttgccaaactctccgagaatgctcggagaatactaacggaaggtcgcatcatggcgactgacctatcaagctgggactggacagtccaagaatgggagctggaggtggacgccaagaggcgtatattactggccgggattgatgaagatcacccaatggccaaactcttaatggcgcacgcccacatcgtcgccaactcggtctatgtggattcggcgggtaacatgtttgcccagacaattcctggaggtcaactctctggggattacaatactggatcatcaaactctgcgatgcgtgtaatcgcgactcaagctgctaggcttaaggtaaatcaagaactttaccttgagcgcatttcggctaaggagttgcttgtatgctcaatgggtgacgatacactcgagttggaagtcaccggcgtgccagaggtcttagaggagatcgggcatattgttaaggatgtggaattccatgagacactgcaagatgtagagttctgttcgcaaagatttaatgcggacggttcagcctatccagtggattataacaaaaccctttacagattcctttcgcacgctcccgacgacgtagagtactcctcctacaaggctcagctcatgtacatattccgacacatgaatcaggaggctcgcgataaaattgagcacacagcactagtccgggttgagcgggctagaaaattattctgtgagaaaaacaaattgtaagttaatatacaccatatctactgtgcttcgacatatatttggtagcttgca

SEQ ID NO: 2610 - DNA, 1000 bp, unidentified
  source 1..1000: mol_type = unassigned DNA; note = unclassified Polycipiviridae sequence
tcagattcgagttatcgtgaagttcagcaaaattcttttattcccgcagatactagcatgttccggcatattgagttgacaatgccatatgaatatcccaccccgtggtatgatcagtttgcctggatgtcccgtagagtaactccctcgcgttatgttagaagtggtgacatttctttcgacacattcgcagccccccttacaaatgagcctcatggtgacaatttcttcgccatgggacttcgtggaaatcttgcagccacccaagaaggagctcagatcgagttcgagttagaatatcgagctgtggaagggtttcagttcgctgatccttaccttccaccagcatattttgcaagtactcatcgtgatctcctcattaatgactttgacaagattaagcgggttccagatccgactttgacttcagatggtcttagtaaaatcactaaaacaggttccaggactgtaagatctgtttcatctcaatctatagctcaaaggagaaaggctgatttgaagctagatctttctggaatagatttaggagaagatactgtagaccccgtgatgcctagtggatatggatctcgcgaacgggaatttactttttagagtttaggtcatttttcattcatgttcattttcagttttaaaatgaaactcttcatgcataaccatgagttggctaattacgtgacggttcctagttatgagcaatctaactccgaatatagaggtgaaactcttgacggccgggaacaagtagcgtgctttagtcgagcccgtaagattgaccaacgcaattcttgtatcagaaaaaggagtttttatccctagactcattgtatgtaatgctgacctagtcaagtcttaggacgcgctgtacaataaacgtctatgcaacgtctcggtgggcgttgcattcagggtgcagtctaacctgcattactcccttgatctgtgtcggagcagtagaattgtgggcggactaattaac

SEQ ID NO: 2611 - DNA, 1000 bp, unidentified
  source 1..1000: mol_type = unassigned DNA; note = unclassified Polycipiviridae sequence
atctaatatggtaggtagtatatttggacccgcaggagttttattctcctcaatcgcttcgccctcggatttcgcatcacaatttaatacaaattatcaagttgaaacaccatctggcgcctttgtaaatgctcaagatggatcaaatattaatgcagatagttatgtcggtagcaccagttagaactccagcacaggcaccattacagcctatgcaaccaaatccccagacagcctgcggaactttggatgacggatgtgtttataacactatggatattcatttaggaggacaacaacctaatgaacagttttgggctgcacgtagtgaatattgtaatcaagtacaatggaccactcagcaggccataggaacgaccctggcaacgattgatgttttacgttattgtggagatgatatgaataaccctgacaaccttaatgcaaatggaggattacaaactagatccagagcatatggtagagtaatatggccaagatggttaattacgaaatcgtcgacttatatctctgtctctgttaaatatgacttctggcttcataaaccagtaggtccagtagtaggaggtaagttgaggatatcgtataatcctggtataagaaagaattggaatactgtgctaaatagcattggaagcactattgattcctatcaagattctctgttcagagaaaatttatgggaatgggatgtaaaagcttctgatacttttagtgtcacacttaatggcaatataccaactaaatacattactagtaccataccaagtacaagattttcagaggttgcagatccacgcgagtgttttccagcatttatgacaagttttggaacgttagagattagtgttttgaacaattatgtagcaggttcagtttttgctgattctgtatttatatctatttataaatcatttccgtctttacaagcttatatagttcgtggccaccgaaatgaccaattcttaactgcaattta

SEQ ID NO: 2612 - DNA, 1000 bp, unidentified
  source 1..1000: mol_type = unassigned DNA; note = unclassified Sapovirus sequence
aagcaatggaaaatggggcttcaccatcacacctccttccacgcaggctccagagggctcgtggcaacagagctggtggttatgccgtgggtatggtgattgttggttcggcacaccaggtcaaccgccacttcacggcgcttggcacaacttttggctggtccactgctccttatgagccaatgcggtgtgcgtttggtggtgtgcacactggtactgacacctctcccaaaattggctattattgggaagtcgggtccgaccaacgtgggcccatatttccccatatagtcaatcattggccagattttgctgtgaacaacacctactcatggccaggctcggagtttgtccctcaaaacgccattgtcggtacacttgtctcctttgctgacaatggtgatgtgtccgagaacgaggtggtacccgcatttgcggttacaatgaacactccttccaccagcactcgaggcaccgtccgtggctcatttgacccatccaccatgcatttggtgcgtactaacagcactggacaaccatctgggtggccatctggcccaaacaatgggaatggatatttcacaccaatgtggggacatggtcagggcaatgctattaatgataaaatcaccaacatggagggtgtgaattacaccttcggaggctctggccaaaacaacattgtcttgtggattgagaggatcttctccgaccaccccggaaaaacaaccctgtactcatctcagctggacagtactgccacaatatttcaatctggtcctgtcaacatccctgagaacatgatggccgtgtataacgtcaccactaacggagctgacttccaagttggcattcgacgtgatggctatatggtcacttctggagcaattggaacacagcaagagcttgaccccgacacttctttcacttatgttggacttttccccctttctgcctcacttgttggcccacatgggaatgctggacgggcacacattgc

SEQ ID NO: 2613 - DNA, 1000 bp, unidentified
  source 1..1000: mol_type = unassigned DNA; note = unclassified Iflavirus sequence
tcaaaccttccaacctttcttagttttaagttgtatcgattgtatttgtgtgattattcataataattgcccatcttttctttcgcaaatacatctcttctctaagtgtgaatgtttctgaacgttgtatgaatcagtttttctcttccaatttatcgaacttgtgtatatgtgagtgtgaactaatttttgattctttcttttcgtttcgatgactaggactgattaccctaccattgatcctaacaatagtcacgacgggatagactccgtgcagtgtttttagaaatccggttggactccggtagcacatacgatgacaccacactagccagagtcggcgtagtcgtattgtgttgtgttccctactagagacccaaagcagcgttctcttattcattatattcttgtgattctgaaatgaggtttgttgatttgcttgtggtagtgttgattgagacccgtttccggtaagctgcttggtatcgtgatggcatagtgatgcttgatctgaaatcacagactcgtgttgtcgcccgctacataatttaaacgtattatggaactgctagacatctactggtcaaatgggagaagcaacatgaggtttgtttcttttgtttgggatcacggataaacagcttttaagaagtccctgcgctccctagcttgcagctctatagcgataagtcaagtgaagttagtaaactcttcttagctggtaatgagtatgtgctatatatcctggataagtcccccccagggttgatgctaatggtaggtgcacaacaggcaggtgcacctttgtcgtgggatgtgaattcgttctgcccgggcaccatagaatgactagtgagtagcaatcgatgtagtaccctttcaatccatatagtctcaaaattacctggcagttgttttcaacgtgaacacaactgctttcgttctgcctaatcctatattttaaagtttttttttaaattttgtttgtttgtgttacaat

SEQ ID NO: 2614 - DNA, 1000 bp, unidentified
  source 1..1000: mol_type = unassigned DNA; note = unclassified Iflaviridae sequence
aggtttattttgaagcgttttgttcgattccgatcgaccatagaaaaggtatattatgttcgcatctgtatcatcgcttcaaatttaaagttttaaggctttttattattggagaacttttgaaatttatttggtgagcctttagtctttgagttcgatacttagactatttaatttccagatatctatcgtccaagtagaatctgaggggtttaaagcaggagccgtgagtcagcccagacaagcgtagtactgttttattccgaagtttgcgttgagcgaccggcgtcggtgcgtcaaacaaaattccgaatggagttgtggttcgagcgagtatctatacacgcggatcatgtgggaagttttgcttactgaagttttcaatgatatctaacattggccctcggatcaacctaaagactggaagtacccgaccaacgcccagctagtaagagtttaaatactcgcgagcagttagttggcaatgttatttggatttgtttatgaatgtttgagactccgtacctatacgatgcgttgattaccatcagaaaaagctctagtaatgaaataattatagcggtttcctggactatggtgtaatttcagttacatagtgactactttacaatcaaagcctaaacaggcattactataaaagaaccgtcgtgttagcattgtgtttggctaacatcccaacgatagttggcgacattgaactgagagcaacatacgttaccaattcgattatcgttcaaaaagctctgggcaggaatttgaaaaatcaaacttcctgctaaagttaaacacacaaaccttattttattttcctaatttaacgtttacgttattttatgtcagttgttcgtttgatagaagaagttgaagaaaacagtgaagaaatacatccgtttcaacaacgattacaagaagcaagtacaaatttccaattacgtcgatcaaattatccaataggcacaacaagattatacaatcaaca

SEQ ID NO: 2615 - DNA, 1000 bp, unidentified
  source 1..1000: mol_type = unassigned DNA; note = Iflaviridae sp. isolate rfb094ifl1 genomic sequence.1 sequence
aggttatttaatcggtgacagactgtgctctgcacttattatttagcataacttgtacatatataagaatctaattttaaatgaacttacgaaaatcaacagtccacctgaagattgattaggtttagtatagaggttttaaatgatttcgatcatttatataaaagatgtattatattcgtatctgcatcatccttttatttttaggttaaacagccttggtgacggcttgagttctgactatgtacacccacgtagccgtggtaccgcttttcagaatccaccctggcctctctcctttttaagggagtttcctggagagagtaatttgcaccgccagtatcgatcttacgataactcctcccttaaaagcaagacatagtttgagtatatcagacaaacgttatattatctagttgcatcctcaatgaacaaggtattctgcatccttaactcgcaagggttattgaagcctcatatggacgagtccaacccatatgaagtgtccagttactttatttcgcctctcgcaagggaaaagtaaagtaatgcactaatattgaccttcaaggttgttggttattattagtagagcctttgataatataatcgtatttgaattctcctaaatattgtgtatgtaaggcgctcacggtcccgttggggtttatgcatcatgtcggccacgtgagtatgaagtggttctagtttactatgatactgcaaggcaggccggtgtggatacaccaaaaaccaaaacataaatacacctttagccatcttttgccgctttctgcgagttttctgcgagttttattattccccaaagccattattagctaccttttatgtcaacagtgcgattaatagaagaagttgaagaaaactgtgaagaaatacatccgtttcaacaacgtttaagagaagctagtgcgaattttcaactgcgacgatcaaattatcctattggaacagctcaactttatagacaaagagaaca

SEQ ID NO: 2616 - DNA, 1000 bp, unidentified
  source 1..1000: mol_type = unassigned DNA; note = unclassified Picornavirales sequence
gcagtgagcaaattccattgcagtcgaggtttagcctcgccattcgtcttttaaaattagtttcttttaagatgctagaagataaaacacggtaaaaaattgtatataacgatataggtctggagtatagtaatcaatgttaattcgttgcattggtgataacgacatactgtatactcccaactttcgcgccggacgattccggatatattgtacgtgataataatgtcttcttaattgagactgactttttaagtcaattaaacaactctaccagagcctacgcgttctatctctgacacgggatagttctcagggttgaagattccataggtcttcagcctgccgaaactctgtgctgtaatgtagggtcgactaccatctacctatttaggtttgaatcggtctgagataatttcaatacacgaccggccttaaaatagttcttcagagccaccggatggttagtttagatgtggcatagcgaaaaacgcagcacactgatgatattctttcaaacgaattttgttccctcacgatcggtgaggacctgcttcaagcaggagataatggatttttgcttgcccctgttatattagggcaagctcaagaaactcatgtacatggacctactattgtacgtgattttacagattgggacgcctttaatttgtggcaggtcccagatctttattatgatggtccggaagcagatttagctgaacgagatggttttaataactatcaaaatgaagcaaatttgcgacagactataactaccgtcattgaaaaagatctacctccttatgaggtgttgatttttagtgatgaagaagaaagttctcgaactttcttttcctgtgagtcggataatgaagggtacactccttcgtcttctgattcacaagaacagatgcctgatatcatatatcagatgccctttacagctacttctatacaaaaagaacctgaccaggttcagcagaagttagttaaaagg

SEQ ID NO: 2617 - DNA, 1000 bp, unidentified
  source 1..1000: mol_type = unassigned DNA; note = Picornavirales sp. isolate H4_Bulk_Litter_22_scaffold_31 sequence
ccttcaatagaaaatatgcgtaagttaatttgtatgttttaattttagactaaaaatataaacattctgtactatcaagttagtatatgtaaaatctttatcagacgatcaatctgattataaaagatttgtacatataaaaccttgtgtttgtacacgcttatgacgtgagaaagtgcattgagcgatatcaatgtggatagcttactatagctatccgttagtcttgaacgatcaaattcaggagctataaatggacattagtccaaggtctttaatcatgtaggaccttctttttaagtaaaggaaacatgagaaccacacatgggaagttattgccctcatgtgagtccagctaaatagtttggcattaggtaaagattgcagtgagcaaattccattgcagtcgaggtttagcctcgccattcgtcttttaaaattagtttcttttaagatgctagaagataaaacacggtaaaaaattgtatataacgatataggtctggagtatagtaatcaatgttaattcgttgcattggtgataacgacatactgtatactcccaactttcgcgccggacgattccggatatattgtacgtgataataatgtcttcttaattgagactgactttttaagtcaattaaacaactctaccagagcctacgcgttctatctctgacacgggatagttctcagggttgaagattccataggtctttaacctgccgaaactctgtgctgtactgtagggtcgactaccatctacctatttaggtttgaatcggtctgagataatttcaatacacgaccggccttaaaatagttcttcagagccaccggatggttagttcagatgtggcatagcgaaaaacgcagcacactgatgatattctttcaaacgaattttgttccctcacgatcggtgaggacctgcttcaagcaggagataatggatttttgcttgcccctgttatattagggcaagctcaagaaactc

SEQ ID NO: 2618 - DNA, 1000 bp, unidentified
  source 1..1000: mol_type = unassigned DNA; note = Picornavirales sp. isolate H2_Rhizo_32_scaffold_97 hypothetical1 sequence
acaagatagtggagcttctcaggttagaccgtgtaatgacgttacctgagtgatatgtatcccaactattgtttataacaatgaaccgggttcttggtatggtgtgtgagggtcagcctcaccggagtaatgaaccgtacgaccaagaactgctggaatgctttgttattcacacttaattgtgtgcaattgtgagttgccatacaactcgcgtatattaaattttacttgtttttggataaacatgataacacatatctttcattccgattatcccatgtcggggatatgatagaataaaggagtgtacttgatatctatggcctggagctagtatgtccaggaataaccaactatcaaatacggcaggaggaattattgtctagccgacaatcctctgaagatttaggttaccagccaatttagattgaaagattatgacccagaagtcgctagagctactaagctcgcgcacgtccgtgttttacaacaacaaagagaccagttcctttctcataggaaggagcaggtccaagaatttggagccgattttgtcttggctcagttcttaaataagactgtagaacctatatctacttctccgggcgatataccagaaaagtataggagaggaaactttccaattcgagataattatttgtctttatcgttacatgatgaatataaactcgatagtgactctattcgtcactactccttaaacgaccgaagctcgaggagtcaaaaaagagctaatgataaattacgtgaaaagtatgatcctaaatacttagtagcagtggttcgggtgctcaaaaaacctgaacctaccgaagatcagttacgtcgtcttcgaagattttggaatctccttgagggggttccagaatttgatattgattcactaaaacaatatttctttactgtaaatcatattttgtttaagaacaattggttttccaaagttgaaacttggaagtcaagaagtttctttacattt

SEQ ID NO: 2619 - DNA, 1000 bp, unidentified
  source 1..1000: mol_type = unassigned DNA; note = unclassified Picornavirales sequence
ataggagatacataacaaagaaaataataaaaattcttttgtacatatcaaaggtattggtttgactgagcacttggcgagcgagtgcaaggttgcaatgtcttaattcacggttttgaacatgttccaccagggatcgtacctgcatgttttgtcgccttaagtggcggactataaatatactatactcaagtggtgtgagtgtatgtttgtagcgcagttcgagagccgaataattcttaatattgaattgtgatgtgttatgttttgtgtagtttgtattttaattgtatgcgtagtaccaaacgctcttttgtgtgtttatgcgatcacacttactttgttggagcgatacgatcaacgaagttaatgtcttaatctaaggcctttgccgcatgtggaagaaccaatccggcatcgtattataccccaaccgctaatgaggttggatgagggcaaaatcgtagctcatctaccttctacccttttaaaatggaggagagatgctatactagggccactacaggggcccgacccccaaacctacgtggtgatgtgtgactttggcgagatggtaacttgccttgtccggtaccatatgagctacttctacattagatatagaatgacgcgtttagctgaagacccttagtacctccggtgaaagttgtgcccggaatgtggttgaatatatcttgtggttttagagtagttatgtatgggctggaactgttgtacacactttgatgagtgctccgcattttccctttgcgaataagagcacaatgattctatacgtgaagctgatacattttcagagacttatcgtgaatgatatacgtttttgtagatttgaagggccctgaaaaggtttaccctagtctgaattcctatgtcttagcggtttgagatggaatgttgttgcctatagtacgtaaggttgaacattgccataggcaatcctcaagggattggcttggcgatgtgggaataaacttca

SEQ ID NO: 2620 - DNA, 1000 bp, unidentified
  source 1..1000: mol_type = unassigned DNA; note = unclassified Picornavirales sequence
tgcagtaaccgctgcagtgaccagtttttaggtccctatagtttgacctagaggtaatctaacagcaaatagggattctccgttaaatcggaggccagctaggaggccaatctttgtggaagccttataggtggcacactggttgactatcggcctatccatgtggaagctatcccggtttcataccggattctatagtggcatatgtgtagactaggctcgtaatatccaaggaggcctgttgcggtcttaaccgtagcagactatcgtttgttgttcttaggctctttgcgttctttgggaagttttttctttgtccatttgacccaaaaacccagttcggcccttatgttatgttgatccggtcctttaggcctttgtgtgtgtaccacgtagtttaatagtgcaccttatcgtatggataccaagtgcgattcgtattttaagattggaattttgcgccacacgtcgtatgttgcttcacgtgtcttgtagtgtttatacttagacattattcgtagtttaataagtagagagtgagcctcgatttattcgtgacactgctctcacaatcattgactaatatacaggtattggaactatcttcttatgtttcagtaggctgatgtctttgaaatccctttttatgggtgtcccccacttttaggctgtcagcgatcttgctgccaggcaaaattatagagggctccgattgggtgaattgtgaattaccccagtatgagtttaaacaaatacccgcacagcaccatctcaaattattgatggagcgcaactcggtcgccttgtaaccgatacccccgaaacaaccgcgaatggtaacaattccctggtaccccccccggcccttatcaagcacaagaagtctgcagaagaaattaaatttgaatctgtagatcctactttatttgatgagtggattcaaaatgttgagattgagcaagaacctccaaaatctattcatagattgcggaaatgtttg

SEQ ID NO: 2621 - DNA, 1000 bp, unidentified
  source 1..1000: mol_type = unassigned DNA; note = unclassified Picornavirales sequence
ttgtcctttttaaacataaattagattgattcttctcttttgagatgtagaactatacctggttactaatttaagtcgattttaatttcattattttgcatttgttttagagcgcatgaagctcactgaataaggtttcagtcaattccttttcagctcttatttatataagatataaacattttcattattttggaaaataacgtaataaatttcagtattttatatgtgtgtaggccggtaccgaatggataaatccgatgtcctgatcattatataccttattgcttgtagaacactatatgaccgaatttgaagaatagggttaagaaagttccccgttctatcaataacaataaaccacccttcatgagaaaaaagttacttacagaaaataaacgaattattggtggtaatattgacaacatgggttttattttaaaagaaaaaatggacccatcctccgcaaaggagacgcgacgaattaagtttcgacgcaaaaaaatacaacgagcgcgaagcagctcgcagaccttttaaaaataataaggtttggaaaaattcgcaaaaatggaaactagagtttgaaactcttcctgaactggatatcatttccgaagagtcctatcagccacactttggcttagagactatttcagcagcgtcattttcgattgacgctttggcaaaatttgccaatattgatattccagataaagttttaagagaagtagaaggagttattcttcttctagtaaatctttcacaacaaagtacaccattgggtgtcattacgtcagttttgacttgggctcaaggtcgtaccacaaaatcactttttaaaacagtgaaaggatttgttgaggaacttctcgtttcaccacaatcaagcgcaaccccagattggttggattgtcttcgtgatgtccgccaaaattggcaattgtgtaagactaatagagcattcaaacaagtgtcaaaacttcttggttgtctcgtc

SEQ ID NO: 2622 - DNA, 1000 bp, unidentified
  source 1..1000: mol_type = unassigned DNA; note = Picornavirales sp. isolate H1_Bulk_30_scaffold_14 RNA-dependent RNA1 sequence
gatgatatcctctccttagtgaaagtattctaccgtttgtaattgaaaattgtaaagttggtaaggtatgtcggattcactggtattttaatacctctaccgctgatcgaatggtgtaagatcagggtcatgcggggcagtgccgcaatgctacaccatgttcaacccttttgtttgacgcccccagggcttccgaacacacatggaaaaactaaaccccccctcctctttctcgattgaagttttgaacagagtaagcgctctgccaaatgtggatttgactgttgatggcaaaatgctcccagttgttggttcaactggcggtggtcctcgcaagccaaagttgcctgccaaggacttgtgcctccgtgaatgtgcacgtgaaggagaaaggaaaggtgcagtgaacctgaaagagaaatctagtaaggccttttccaataggggaagcgttgagccggtgggttttactcaatcccgtttgaaagcgaaagcaagtaatagggagcagagtcttcaaaggcattgggatacgtcgggcattactgccccccgtcaacatcgtgaaatgctgcagcgtttagctgcagagagacgcgttgttgaagaatggaagagcaagggaaaagttgaacgtaagcgagagattctgcttaagcgtgataagcgttctggcgttgggattgagttccagagaggtaggtttatgcctgcttcgccggaagatttgttgcctgatgcagaagctcaggcgaggactgatattttacatgcgtgcaccgagaataaaatgccgtttgttcgtgatgttcgtgacattttgcacacatctgcgatggcacacaggatgatgactgagtatggcgaaggtgaggatcacagtgagttatttgagtttttaccaaaacatattagttccaagttgaaaccccgttcttttgagttacttgacgttgaatggcagtctggtaaggttttaccagctgttgcaggagtagcc

SEQ ID NO: 2623 - DNA, 1000 bp, Auricularimonavirus auriculariae
  source 1..1000: mol_type = genomic DNA
cagtggcggaagtccgacaccagctcggccaggcaccgacgcaggcggtgatgaatgctcttgcagctcgcggggagaccgcatcccagacggccccgacgccagagtggcagcccgaagagactcgcgaggctgacgacgaggacgacgcgttccaccacccctcatcgaacgcggacatgatggagaggatagagtcgctgtcgcagcagctcgggagcctcaccgagtggaagtcctccatcgaggagaagatgcaggccctccataacgatagcaagagggccgcggacaacgcctcgtcgttcgagagtcgcctcaaggaggtgaacaagggcattcatagccgtctcgaccgcatgtcggaggccttagagagcctcgggaagtttgtcaacacccagcggcagatcctgccgcagcgaccccgcgcgccggaagcacaagcgccagcgtccctacctgaggacgtcaaggtcgaggtcatccacccggacgctggctccctgctggatgcgcctggccgcgcgtcgcaccaggagcagctgctcccgaggtccctacgtcccgcgccgaaagcgcctgagacgtcgaagaggacgacggccgaggacaagaagaagttctcagcagacgctgcggcggctctagcaactcgccaggagtcgtcccctcgcgcccgcgccgcgggagcgaagccgttcgaatccacttcgaggcggaccgcgcttccccccccgcctccccctatcgctttcgacgactcctcggacgaggaggacaaagaggaagtgggtgcggtcgaggggtacgacgaccttgagtgagctacgccctgccttccgtgcgtcagcgccacgatagcagctcgagaatgtacttgtaagattagacgcttgaggatgccggcctggacgcgcctctatcactttgatgatctcgccgcttagaaaaaaccaagagacaaatcgatagatattgtctctggtatctcgccgtg

SEQ ID NO: 2624 - DNA, 1000 bp, Auricularimonavirus auriculariae
  source 1..1000: mol_type = genomic DNA
agttgcttgttccctttccgcagatgttaaaaaccaaggagacaaaactgatgattgcgtcttggttgaacgctcagcagccgcgcgccgggataagcatctccggagggaacgagtatgtggagcagtccgacttcgggtccgagcccgctctgaccggccagatagatgacctcagcgcgatctacagcttgtaccagaagcctaacaaggtcatcgtgggggcggacgtactgccgaaattcgcgcactcggtggatcaagacgctcctcaccccgcccctcatctctggaccgaggatatccgtgctggcacctggcatcgtggaggtctaaccctggctcagtgcgacttcccgaatgtcgatgctgttcgacgagagctcgtcaagcaaaactcttccgagatggagcattggaccagaggactgacagcaattcgcctcgtgaaacgcacgcacgctctcgtccggaagattcacaacctgcttaagagcactctctgggccttgatgactcgcgtgtacatgaacagcacgacggacgctgacatccatcgtctgctcgaggagaatcgccttgagtctcactccctggcggagtacacgacggcgatcaaaggatacacggagcatatgcacgagatggtaacgacaacctcagtcgtagtccctcagtctgctcctccgccgtcgtctgtctcctcgttgtcttccctcccgccgcctgatgcgtactcccccctccgaggggctcctctcctccctcacttccaggagcatcgcaaccgggcctcaacccccagcactcctcgagctcgctaagatgatgtgataaggcgttgcgtgctctcgttagaggacgctcgcgtacacatctgatttatgatctgttagaaaaaaccaagaggaacaaaaatgcagctgcttggtctggtaccacacagcgtgagacaaaccgacaagcattatcgcgtctgtcgatcgcgcctccggccact

SEQ ID NO: 2625 - DNA, 1000 bp, unidentified
  source 1..1000: mol_type = unassigned DNA; note = unclassified Riboviria sequence
gttctgctccccctgatgagctgggaccgaaataagctggacttatcggggtttagactgttgtccttccacacttcggtgaccaggatcgacatctgcttagatagccagatagtgcatgtgtgttcgagcatcgtttattcgattggctcagatgttcacaatcacttacaaccctatctatttgatcactaattccgtaccacccgtagcactaccgctaggtaagcgcagaacatcgaggttgtcccagttatgggcgtattggtaggggagtcactgttgtctatgacgcatcgaactcgtcccagcgatccattaccctagggaacctaactgcatgcgaaccatcaggttttaagctatacatgggtggtaggttatattaaatagaggtatcagtgctgaccgtctagtcctcagtatgacgttaaactactcaccgtctgtatcttgggacattaaactacaagtaggtattctagcgagcatgctgatccggcactcgtagaaaaggaggttcgcaaccttggaacatatctcgttccttaaccagtattgaataccattccatccgttgaccggggctatacggtccatcagtgtaattagtataatagcgagtaatggacatgcggtttaaacttggatgtagaataagtagataactgctttctattatggacgggctcacctactgtggttacgttgttctgaaacatgttggttctaaatcatgattggttcagtcttcttaagcacttacaaagtgaccgacccttccccataatatgttagatccaaacagttaatcgaagtatctcatcgacataacgattaaaaatcgtgtttaaacttagcataataaagttactttaagttatatgaacgcgcaggtattttgatagtttatcctaaatattaaactatctcggccggcttgttgtttgcggggctagaaatacgaagcaaggatcaccaaaaacttttttactcaatc

SEQ ID NO: 2626 - DNA, 1000 bp, unidentified
  source 1..1000: mol_type = unassigned DNA; note = unclassified RNA viruses ShiM-2016 sequence
aggtttgcacatttgcatcaagtcactcttgctctccacttgtgttaatccgattgattgttaggaaaactgaaatcgtccagtattcatccccctttgtaacatatcttgagtctctcttgagttccttagggcatatgtctctgacgtccagatacgggattagtagtgttttccctgaatctgagactaggcccggaatgggtagacctacaccttggtggatctcatatgcttgtcacgctactagctgtcttgccgttgagattggcgttttaaaagagaattcccaacccccaatttatccctacctatttagggcgatgtatttgtgaaagcttgcatcgccaccattttacacacctttttgattagcaaaaagaccacacatgaaatatcatcttgttgcactcctatgggtggttagtcttggactagcaatttgataattttcatcatacactatgtttacacattttactttgttcgtctacacatttatatgtttgttttcgttctgagagacatttagtgcagatttatttgcctctctaatacatgttattaacttttagtctgtatctttctcttctactatttatatttcctttatcttgttttagaattgacgctgtagagtggtctcattccccttcagcaagtcttttaagacatcctcctactatcgatgacgaaaattgtcccccaagagttaactagttaacgacactcttgggtactgaagttccgttcgattgtaagacctagaagcctgttttatgaatactatcttagataagaggcgttagaattagtcattgattagtttacaaataacgttagatgcaagtaggacctacttgtatactattttgttgtgaataatcaaagactctttgctaaaatctctcgactgttagtccatttcgtcgcggacaactaagataagatcatattacaatgctgaaatttaactaggcatgtagagcgcacataccgt

SEQ ID NO: 2627 - DNA, 1000 bp, unidentified
  source 1..1000: mol_type = unassigned DNA; note = unclassified RNA viruses ShiM-2016 sequence
taggtacttggaaggaatcagatgattagctagaaatgagtctgaccccgatagatttcgggacccaacacttgcgaacttatgctttaattcgcagcatgtagggaccgtggacttagtcttgtttgttctgagtgaacttacaattctttgctccccctcatgtaggaagaaagcaaaacgtagaggtacagtttctcctattaatgtacagaagaaacgaaaattctcaacgatggtattgactatgtcgaatccatgtccaactggatcaagttgggattttgatgggcttttagtttagccctttagtacagtaaaactacagcaaggtttgattagccttgagaagttcaattaatcacattgtttattagagaattaattattataaaactccagaaaaatatgtgtattattagtgtagagttagcatcactcattagaagatgccagttcgtttactgatcactcatccgaatagaaatagatatgagagaactatgtcctaattaaggatgcgtcaataaggtgctggagatgctggtagatggaaaattgtccgccagcgacggctatgcttgtataagctccctggtaaatcaagtgtagttacctcatctttgcagtacggaagtaaactgccgaatttctttcccagggtcgggaggggccctagcgggcacctcgtctgatctcaggactaaagccgcttgagacgacattctttttcaaatgcggatacccgtatcctcgtgagacctttgtcaattaagttcagttatttaacactgcgcgcattgatgatgaaactcaggaacggattctattcttggatcgtaagaaagtctgttttaaataacaatctcctggttaacggtgattaagcctggggtcgccttgtggttttcacaatccccccttggggtattgtgttccgcaaggctgatctttcaagtatcagccgtggaacattgtaccctcccactttcatgagaat

SEQ ID NO: 2628 - DNA, 1000 bp, unidentified
  source 1..1000: mol_type = unassigned DNA; note = unclassified ssRNA positive-strand viruses sequence
ataataatggccatgttttagcttgtcaattttggttgaattgttgtgttgcaaataagattgccgttggactgtcatctgttcgttttaaaacacaaactgggagagatagtgtttttacgatgctaaagttttctggtgcgttgcagttttcaaagtatgaacgatttccaaatggtgcatcagtgagtcttaatacccctgctatctttgacacgttgtgtgctattgctgctgctgctgcttatagagatagacttttggagaaaacccatgggcataagatggataaaaggaaagataagattgtggaggacttttctactgctaattggtcttataatgattctagtactgcttatcacaagtctgtcgtgctactcaaatcacttttcagacaaaggtgtgttggtagaaataaatttgaacaatcttataatttaaaatgggtaccagctggcacaccaattttaacacttggtgatactcctacccttggttctcttaatcttgctttatctacttcttgtcttggactttggatggagggggcgtttctggttagtcaagacagattgactgatacttttaaatatggtgataacactttaatgtttccagtagatccttgggatactcctgttcactgtgatggatttctatatatccctaggaaaaatggaaattttgatgttgtaccgtataaatataagtgcagacagtttgtatttggagatatagattctaccattcgaggtaccagatctgatatgcttgctttcattgattctgcactacaattttataagtctaaggaaggagatgaaatcgaatgtcctggttggctcgatgttgtaaagaagatacttggtgacaaagccgccgaagaattacatgacacacacgataaggaggataaaactgttaaaccaccgttgggcgataaaacaactgaaattggtgaaacttctggtggtgtggacactgaatcataactgat

SEQ ID NO: 2629 - DNA, 1000 bp, unidentified
  source 1..1000: mol_type = unassigned DNA; note = unclassified Negevirus sequence
ccgaaaccgaacttgactgtggatgcaaccaaaagttacttggcgttgcagaccattgtttatcacgaaaaacccatcaatgctatgttttgctccattttccgtgagataaaaactcgggtcacattgtccctaaagaaacatgttaagatcttttgtgatatgtcagctgaagattttgagaatgtgttgaacagagacatacgaccgagatcgttgtccccttttctcgagaagttggaaatagacattagcaagtatgacaaaagtcagagagaattggcgctcgaattcgagtgtaaattgatgtcgtattttggtgtcgacgcggatatcgttgaattgtggttcaatgctcacgtgttaaccgaagtgtatgacaaaaccacgaagatgagagctcttattccgtatcagaggaaatcgggtgacgcatcgacattcattgggaacaccttgttcttgatggctgtcgtgtgtgatctggtgcctgtatctgaacttgagcttgcattgttttcgggagacgattctctcctatatggtcacgatatggatgtttatcgtgattcgcaacatttcggtttgaagttcaatcttgaaattaagtttttctcttttgaaatgtcgtatttttgttcgaagtttctgttagttgtcaatgataaatggacgtttacgcccgacccagtcaaattcatgactaagctcggtcgacacgatctggttaatcctctacatgttgaggagtaccgtatctcattcgttgacactgttagaaattatcgcgattatcatgtatgcagaaacgtggcgaaggctttaattgagcgttatggaattgtgactgatcacacatcttttttgatgtctctggacgatatgacttcaagagaaaatttttctctgttgttttattcgttgtcaggtgataaaatcgactactctattactttcaataaagacttctaatctacgagattcgttcatataagttaaa

SEQ ID NO: 2630 - DNA, 1000 bp, unidentified
  source 1..1000: mol_type = unassigned DNA; note = unclassified RNA viruses ShiM-2016 sequence
gcacatttttctgattgccctttctttgggcgtaactcgttggcgccatcgtgaacaaatttcgaccgacgtctgcctgctacgctttgaagagaaggtggcctcaattcaatgcttatattgcttcagcccgaaacgacatactcaggataagccctgtttattagtgggtcgttgtaatttgagatattgagttgtggtgtttaattgtctcaattaaactgtaaatatttttgttttcttttgttttgttcattttattagtacaatagttttatttttcttttgtttcatgccggtacctatccgcgtccgatgtgggaaagcacttcactagttgatcttagctttataaatctatcaagcggtattctagtgggctaggtacgtcttggtagtctcacttttgtgagtgcagtattaagcccggacctcgctcaggtgttgtcagtaaggggattcgtccttctgaaacttcgtaaggcgaaaagggaagtacggtttttgcaatagataggagaaatagcagtgtgcctttaaagtgctgcaaataaaataaaataaaaattttggtttaatacttcccgggactcatttagataaggcggtgtgcaggggtgacctcctatcggatcgaattatctccgactggaaagagagctgtaattgtaaacttcccgagggaacaggattatcgtgatcctggtgtgtaggcccattaacgttcgactgtcccaacttagcggcaggaaataagaaaaattcggcgttagtaaaacctatgatctttgtcccattcgagccaaagcatgtttatgttaggcttgacggttattgttgctataagaacctactgaagagatccccttccatcttttaaataaccagtaggtcgcagtatttcccctgggtgctctttggacttgtctgggggtttgggaaggcaactcatgcgcctccctcactctacgagcatactaataagcatggggccctcttc

SEQ ID NO: 2631 - DNA, 1000 bp, unidentified
  source 1..1000: mol_type = unassigned DNA; note = unclassified Riboviria sequence
gacctctcttaaatccaaaccaagagatcaaaatttggccatagagaaattgtcgttttgcaatcaggaagtccgcatgaaaggatatgcaagaacctcagtggtcattcgcctttctgaccatggatgtgatccggcggtggctcttcaatatgtgctaaaagagaaagcagaggatttgatgttgggtgacggcctttccatcgataagaaggttcattggttactaacaaaacatgagcccgcacgaaagctccttggggcactttcggcatcagcctacaactagcacatgaaaaaaactaacagacctcactatgaggcgcatttttggtcgcttgctgcccgaagctccgaacatggctgttgttcctgcggcccaagcaggcccggtccgccgggtcaatgaccccctggagggatgggggcgacaattcgtgatggtccctcccgacccacaacccgttcccaacaccgtcaccagcaccacctatgacattgtaggtgagctggtggtgaacacacccctccagtccgacgatctcgtcctcctcggccagatggccatgaatttccctcactactatcaaggggatatcaccatgaaacctttccacaccgctgtgttctgcctgttagtgtcagaactcagatgtcggaccaccctcttccatggccgcattttcgccagtcgtgtggcggaatgtgtgaccttccagggagaacccagagagctcccccatggctcatctgccctgttcagagaaacgttcacctggcccctgcgaggagaaccttacgtctgggccgtgaacatctcttggactagatcctacatgccgggggtcgccctccatgagttcatccgtccccacgtcaaccccctcatgtcagccctaggcgtttccactcgttggaatggagtggataactacctggtcctcgtggcctagggtcccatttgcaatatggaccatgaaaaaaactaacagtcctcacc

SEQ ID NO: 2632 - DNA, 1000 bp, unidentified
  source 1..1000: mol_type = unassigned DNA; note = unclassified RNA viruses ShiM-2016 sequence
accactctcttcaacagagtgtactaatcacactttttacgtagtgagatttgaaactgtaatcgacagtcgcatacttataatctcaagtatgtagtaattgagtagtcctagaatttggattcaattttgaagaaaatccgccacgtggccaaggcgaaacttggcaagtgctaagcatggccgcacgttactgatcaaccacacgtggtagatccgcagccgagagagacggcacccggagtatttttgtttgtaattagatagattcattgagaacttatttccttcgcgccctgtaaaaagggaattggaatttactcagagcgtcaactgagtagtacgaccgcggtatggagcagcggtaatttagaccaatgatgttcttttatgaacatttataccagacatttctgatacataattgagagatggatactcaatcttgcagtaatgttccggctagtaggcaataacccaaaggcttgagggtcgcctgactagtataagaaaaatccacgaatggcgctggggagggttaatagcccccctagcatcaaatagcaatgaagttactaaaagcgtaaaaaccggacgaacccctatttccaattggagaaacacgaatcaaagatactgtcctacgtggactttgtccactaggatcagtgaaaaggtggaagatggacgttatgtgtacctcgaggatattctgttttcaaacaaatttttcgaggattcatacacagaaaggtgtattaaagatagtttcttaatcgataagagtgtaaatcgattgaggaagaaagaggcggaaaagcgctctcgtgattatcacagagcgtgtattaacccgtggctcgctgggaagaagcgagtcaagaaaagacacagtgatagtgaaaggcgttatcgtaggattttggaacaagttcgtgaacttacagatgtttcagttggttccaactgcaatgacgattcaattgactggtctgatgat

SEQ ID NO: 2633 - DNA, 1000 bp, unidentified
  source 1..1000: mol_type = unassigned DNA; note = unclassified RNA viruses ShiM-2016 sequence
attttctcgtacattttaagtttttgcgcgactttattgtcgcgtctttcacacgcatctagtgtgtgtgtgtgttatttttctaaataattgtttttcagtatgtttttagcatacgcttttcaattattatatgatgtctttgtatgactttattgttgtacatccttttgaatttttagtgcgattttatgttcgcacattgtgaccaggtttatacctggtcattttattcagcacgatctctgatatcgtgcagtaattctttatgtttgttagacataataatgtagtatggaattttgtaaaatttcgctcaaaagattgtttaagtgcattgtttgacatgtgtgagactcgagtactcgatgttatacaaatatgtactaagactttctttaagtgattgttataagatctctagctttctggaaacagttgactacgaagtcgtaataagcacattattcctaatataacatgaagtggggaattttaaccgctatacagtcgaatttactttcgattctgagtggctgaagtgatctttgtgaagctacccttcttgaaatcttacaataacctggaactcattggagttccggatactattggttttcgttgtgaaggatgcaagatcttagaaagaaattcagcagtcgctaacttacctgctcacgacgttgaggaggtagatttgactgtaatatgttaaaaggactaacagcattatacctattatagaaagtatcaataaaatccatttggtatggtaggtatgtgttccgctctaactaagcgtgccgagaggcagtctttgtttgaggaggcgttgttcccaccgtctccaagtatacgcccacgcgggagagtatgcaggtgaaacataattcggggtcttccatgaatatgggagttggaaatcgactgatcggtcgagcttctgtaaaaaacaaaatagatcgctcaacaacaaaaaacaaacaacaacaaacaaaat

SEQ ID NO: 2634 - DNA, 1000 bp, unidentified
  source 1..1000: mol_type = unassigned DNA; note = unclassified Riboviria sequence
agagagaagataaaagactccacacgggtattccccgtgtggagatcaataaacttttatcagtagtaacaatttgttactcaagtctgcgaatgacttttattaggtattcgaaactctttatatacaaccatgtctattaggggttttcccctaatagttatttgtttttctgagtttcaatgaattgttaataaatgttatttaaacatacttgtttaatgtattgaaaattctattgatgtgtttatgatcgaacccaagttttttcatctgtaatcgtttcacttttcgttaagaaatttgtcaagctggcgattacgtagtccttctggacgccaagcttatttatgaaccgaattggattataactggattatatggcattagtcttagttgtaattgttctttaacatttcgattccggtgaaccccggaatttgttcaggccttctggccacctcaaacgcttgcactcatgcatacagaagcgtttttaaaatatgtctgtacgatgtaatactgtaattacagaacttatcaaataaggaagaacctatattgatatttcatctcgttgtaatgcttagcgcttgcaataagagccccctcgtttatacggctgaaaatagtataaacctagtttaatatcacgctaagatcctgtgatattcttaggtaacctatcttatgatatggggaccgacccttagacaagactcattagtcggcgtattgtctaaacttatagttaggaagtaatgaccctaatttcacttgagaattcttgttggaaaactattaagttaaacctttaccaaccgatgtacttagtgtagcgcctctgcctgcggcgaataatacatgcttaaagtacgtaagtaagttcatcctcttaactgagtggtgaagcaaagcttttgtgtcgaagcacaattggattaccaattttgcgggctttcgcgaattggttcctctgtgcttgtcgctttcaaatttt

SEQ ID NO: 2635 - DNA, 1000 bp, unidentified
  source 1..1000: mol_type = unassigned DNA; note = unclassified RNA viruses ShiM-2016 sequence
aatcaacagcgatccttcggcatgaagtaaactgaccaaaatagaacctgatctaggtgtttttaagtcatggtaagtccatgagaccaaaaacaggcgttgctaacccgttacgaaaaagcggaaattattatcatagggatgatttgcaattcccaatggttcagactgcatatgtttgcggcatacacaaattcggttgtgtaacagctgtttattttgattctttgtctatagaaaatagacgaacttcctcctgtggcgcccggtaatagggtaggaggtacattgggcgtggaaccccagtgtgagtgtgaacgacttggagctgtgtcccactattgtgggtttagactctatttgttagtcattgaatcaattgaaccagcttgcctatgatcttacctatccacgtaggtattgcatggcaagtgctgtccttgttatagctgatgaaggcttgagtcagcttaacgttcgaggtaagtttgtagctctttaagagctagtgggaagacctggcgctgtcgtggattaatcgtcccttcagcatcaatatagcattgaagttagtaatagccaaaatcttttatccagaccatctttttcttcggatttagaattgcctttatggctttttaattgttggttgctacttaatgtagcaattagtgtgtacactattccccgtgattgtttcatttgggatattgtgtatggtgtgtttttcatttgtgtttttgtattgaccatctatttgtatgtttacagcattttattgatttggaaagctatatttggtccgcggcgtagaacttttgaagaacaacttggattcaggttaccgtcgtttgttacacctgattttgttgcacgggagaccactctgctattagcgttgaaaacgagtgtttcttcgagtcggaataaggcaggtgtcatatcagcgttggtatcttacgcacaagctcacagtcaacgttcccttttgggtcactta

SEQ ID NO: 2636 - DNA, 1000 bp, unidentified
  source 1..1000: mol_type = unassigned DNA; note = unclassified RNA viruses ShiM-2016 sequence
agggaatttatattccctacataccctatactttttagttgtaatctaaatgatgactctcttttgcagagaccctgtataaagatcgagatctgcgtctcgtgtttcagtcctaggattacactaggaggttagcacgggagcatgaaccatttattttgctcaagaaatttatacttttattcttttgtctggtttgctgaagccgaaatttcagcaccccctttttgcctgttatcaaacaggcccccgctttcgagcgggtgattggagactgtacaatcttgtgctgtctccatgctccggttttccggagccgcgatattatatcgcaaatcctcaaccgaggataatatcggttggtcccaatttttactcatttggataatgagtccctatttttgagtaggtgattgaagtgatagcacttcacctgcgcttccgagcgcactgctccctttgggagctgcagtatttatactgcaaacccccagccgagggttgtttcggctggttccattatattgatgtatctttaataattattttacatttgtttttgaattgcaaacggctcttctataacattcaaaagaaacccttgattcaaatgtttacatttgtaacttatgttttctgataccttatatactggtaaaatagaggattagcgtacctctcctcaagtagtttcagctcactctctttgagagaactgacgtccatattgtgatctagcttgattgatataagcggtaagtcaattaagcccattatgatatgttcggaaaattgtacacataatatacaggaagactatgtcctatggtgtgtacttcagtaagaccttagccggtcgcaattgttacgtgaataataggtagtcacgcgtaacacatttcacttgtggttgactcccacgagtgatcttatctttattgttactaaatttttacaacccgcttttgatcccgtcttcactgattttcgggattcaact

SEQ ID NO: 2637 - DNA, 1000 bp, unidentified
  source 1..1000: mol_type = unassigned DNA; note = unclassified RNA viruses ShiM-2016 sequence
ttttattcgcatcttgtagtgttcgcgagaaagaatctactatttagtgatcacaaacatattgggttgtttgtttgtgttcacccgaggtacgaaatgtaccagtcctgtttattaatactttggggataaaaagcagaattttctgcaccgtatacggtattgaaatgtatagtcgatattttaaggacattattaaatggacgtgaaagtctgttgaaactgctctgttttgaatattgctgtttgagggttgggaaaccctacttttgttgcgatggtagcaaatgcaccgtttagaccttatgacatttcgagtcactattggcttctgggaaggttgattaccagagtacgtgagcctagatctaacatgaggaggattgtgctggagcttgagaacatttggctagttgcgcatgttctgacaaaaacatcaatggggaaaggcgttaggccccacgtataagacagaagacacgttgttatcagaatttctttaaaccacatttatcacgtcaacccactccacattatttgtttagtttcccgtaaaccaatttttataggcgaacagccttttgatgtttattatgcagattttaaatttttaaataaagtagcgtatgtagttgtttcatattgttgtccagtagaaacactaatattgacattaaatgaatatgtaaacaccgaattaatagagttagaagagccattttatggcaattattttatagattgtaaacccattcgaagcggtttgaccgtttgtgcttatggggatattacaggtaagaaaattacaactaacattggccgtttatgcggaggttatcgtgatccttatcgcttgtatcatattattttgcaatgtgagaaacaagtattattagagaccttgaaacttcaaggtgatgaagagttcgcagaacaagttcgtcaagaacaatataaacaggtgcaacaagataaagtttttagaaacatattgcgtttt

SEQ ID NO: 2638 - DNA, 1000 bp, Sclerotimonavirus alternariae
  source 1..1000: mol_type = genomic DNA
gatccttccacggaagattacctcttcgccgccaaggttgatccgatggaactcgcagcttatgctggaattcttgcatatgcgattggcaagcagccgactgcggagaacatggatgcgttcaactctcgccggcgcaacgccatctcccaattccttcctgcaggcgatctcaagatcttcgttgatgattccgagttcttgtccatcgacatccttggcaagattcatcgtgcgttcaactccgtcacgatcgatcgagcccttgtcatgagtgcgattgtcgacaaggatgctgctctagttcagggacgcgagaaggtcttttacatcatcttccgtctcggatctggtgcctcgctcaatccattgctgatcatcacgcgctttgcgcgcaagtacccgtacttctattccgagtttcccgatctcgagaccgaataccatgccgcggctcatgcactccagcggttctttgatgttcccgagaagcgtcgcatgtacctcaaggtcatcttcgggagcgcctacgttcctgtcgatcgcacggatgtgaacgaacttctcggcgtctctgtctttgcacttcagcagtcagagccctcgcttgccaattacaacggcggaactctcagtgtcgtccatcgccagaagttgattcgcctcttggaggttgcttcaactaatgacgaagaaatccccgaggagcaacttgctgagtaagtgtttccaccactcatctccttattaaatccaaggatttaataaaacttaggagtaatcaataagatgaagctcgctgatgcacttcgactgtatgtcgaaatgttcgaactgattaccgcactcgtccaacgcgtcatggacgataagacattcgaagatactttcgacattgtctcacttgactaagttcacgtactcagttgcaagagttatttaataaaacttaggaaataacaaacgcatcgtctcgcactcaacctactcattaagaaat

SEQ ID NO: 2639 - DNA, 1000 bp, unidentified
  source 1..1000: mol_type = unassigned DNA; note = unclassified RNA viruses ShiM-2016 sequence
tcccagatgccatcgcgcatctcaacttgaatcctctacggtgaaaagccgtaccacatcagcctcgaccgataattaaagtaggtcatccgttttctacgaccaactggctgatgtgatgttcaacgtctacagccggtccatcatgagtatggacgtgcaaaacctgagtcgccacctttcgaagttggtgtgatagtcgtaggccgaccctgcctagcagttaataaataaactagcgtgagcctgcgataagggccaatcctcgggatgatctacaagtgattacccgcactgaagtcaacaaatttgattcgtttccacctgatctggagaaaccgatttgtaatggcttgcgccacggcgaagagtgaataactctgagtggctgccaccttgacattaagtgtgtgttctacacctgtattattaggacatgattatggtcctgtttatgttttctacaacctacgctgctaatcaacgctcatcgagcaccgcgtgcgattggagggactctgtttctctcctcttagtagtttgctatatatttatattgtctcgtatagacgtcaacccgcgtctctaaataaagctggataaaaagatgtattattcatattttcatatcacatcgtaccacatttatgaggggaaactctggaatggcattagccggtcagagtataaagaaccgtcagaggggatgtgcgagtttccagtcacattagtgatactggaccacattaccgcgccctggggacttagaggtacagtggtgtacgagaggtgtgtgttaggcgtagcctgcactcactttctcctctgcccaccgaggcctagtcatctttatacaatgcctagagaacaaccaaatgaattacagaacacgtgaaagtcgagttctaggtcggggcccctgaatgggtccctatcccagcgacggggagaaataatacgtttttaagaccaagtacgacataccatttaccgatttatc

SEQ ID NO: 2640 - DNA, 1000 bp, unidentified
  source 1..1000: mol_type = unassigned DNA; note = unclassified Riboviria sequence
cacatcggtggcttgcgagggaactcactgcgctgcaggaaacacccaagtgcgttctcgcaaaagcaaatcaccaagcatccgtcggttgccgattggcaatcgctgggcctttatcccccctccctccttcgagcgggggggtaatgtgtgaatgtgataatgacggcttaggattcttaagccagagtgaatgtgatccgacttacggatttgggaaggcaagtgcgtccactgagcggttagaacgcctctgggcaaaggccgggctagtcccccggtaacacaactgcggttgttgcaaagataggtgcggtgcgcgaactctggctcctgttatacaggagtacagttacactcacgactctccctatcagagcacttgtcggctcaaatccgacatcggatgtatgatggctccccgagctaagcaactcgggttggggtgtgaagccgaaaggtcaccccgggccaatgcgtgggcggcatgaaactgccccatcggcaagtaagctgtgcatcatgccgatgagtgctggtcgaacctggggttggaccaacaaggaagaactccgtatgggcggggtgtggtacgtagaggaacttggagtgctgtactttcaggtaagcctggcaggaggactataaggatttagttcggcctgtggcctttggagggcagggcgtcttagcgcggcgagcaaggggtagtacaactaccgctcgtcgggcgggcgggtctaggtctatggctttaagtatagcaacaagaaatcgcgtgccacccttgttgcttcaatctcagaggcgaggactgcgcatgggcggtgtgggcacagcccacaccaccccacctctcagcggggggagggggcgtaaggggcgccctccctgcctagagcatcggatgcagccccccacttaaggaccagctacgactcattgatttattgattattgagtgtgaatatagtgcgattcagtgcgattattgtcctag

SEQ ID NO: 2641 - DNA, 1000 bp, unidentified
  source 1..1000: mol_type = unassigned DNA; note = unclassified ssRNA negative-strand viruses sequence
atatgctatgttctcgcactcaactctatctcgcatcgcaggtgaagaattacctcgggtatgtagattgctccaacagatgatattagatccatactgtgcaatgttatccaatccgatccccgtgcgaacatatgcgaatatagcatacattgcctgtaaactcatatataaatctaatgttgttgccagtgacttgaccatgaaggtcactggatatgtgaacaccttacacacaatgatcacaatcgatcaagggttgttggatacagatgttatcaatatacgcgaatcacagatccaaatcagtggagatagagcttccttagtgaaggtgctggctaagcggcacgggtatcatataagttccgataaaaacaccatttttgagaaaattgaaccagaacctacatcttcagttcaatctacatcgcaatatgacatgctacctattaaaactcatgatatgatgattaatgacaagaagtatagagaaattgatattggagagaagtacaaggacatgaggacaaaagaagacatagcttttttcaacctgtgtcagcaattcaaaaatacaatgatgcaaacagtgattcctgacggcgcttcttatatccccggttccaaattgacacttactgaagatgagcataaatatctacacctcgataagtttaatgaagaaccaacggaatataaaagcactcaacacatcatcaccgataacatacgtaggtcaggttcggttttaatcagtgatattttgtcattagctaagggagttgggttgaattgggctactactgtagcgacgcctgtgatgcctgctgcttcttccacccgagcagttgttagaaccccggctgaagaggaggaaatgggcatttaataagtgtaaacaacgtgtatcaggtttttgatcatagcctcttaaaggatatgtggtgagattgcaagtgttttcctgattattttaaaaccaactctggtgtttacc

SEQ ID NO: 2642 - DNA, 1000 bp, unidentified
  source 1..1000: mol_type = unassigned DNA; note = unclassified RNA viruses ShiM-2016 sequence
attagactacccttcgaccatttgatttccatgctaatgcatgtactactcatatcgtgacaggataagagttaatatcgtaattaacgagaacccatcaatggaaattggccatcctctggtagaggcgtgtaaagaaccacgttagtgaaacggagtcgacattaggtccgtcaaccctgatatttgcgcacatgcttgtgtgcatatagcgaaatatgaatctacaagattgagccgaataaaaatattttgtagtgatccgtgttacggtaattttccgtctaagatttgtatgataccaggtatccgaaagctattgctggaggaccttgatgtaacatttatatgtagaccaacatactatcattccgatattatcgaacattaactataatataaattgtgaaactcgatgagctaggtgacacatttgtgtttaatcatctttgacatttgtcaactctgaggacgagaggagcagcggcacaattcatttgtgtaagaagcaattttgttaatagttattaatggtgtttgatcttgattcccttgggaaaggaattattgcatccacctaggatctatgcgtttggaaagtaaaggttgatattccatatcgtattgcccagtcacaattttgtggcccggtcggaacaggctaataccctgagctcggacttacatctgtaagtgaccggtatacctatcagttacgagtaccttcaaacctagtaaaccgctatattgcaacgaggaatttgttgataatcgtgtcctgagaactgatgctaacatcgttttggagggatacgaccctgagttggagtgccaggtaggcattggaagctttgtgagtattggaactggacttgatgtcctatccaaagcttcagggattgatataccagattggattgtcagtgagatagaatcaattatctgtttgtttatctctcttactggacaaacgactacgcaaggtgctttagccacaatt

SEQ ID NO: 2643 - DNA, 1000 bp, unidentified
  source 1..1000: mol_type = unassigned DNA; note = unclassified Riboviria sequence
gcaagcctatttggtactgtttcctcaagaatgaaattctgaaggaaaagaaggtcagtgagaatgacatccgagtgatatcttgtacagatcccgtctttgtgcgtataggagctgcgctggatgaacaccaaaatgctaggatgaaagcaaagacagagacgcatcatgctcaggtcggttggacaccctttaggggtggccttgacaggcgctgcaggcgcctcgcaaagaaggacgtatttgtcgagcttgattggacgcggtttgatggcaccattcctccttggctcttcagaagagtcagaatgatacgctggtatctcatgaatggagaagaccgcgagcgctatggagacctagcacggtggtacaccaagaacctgttgagtcggttcacgctgttcccaactggtgaggtcacactcatcaagaaaggaaatccttcgggtcagtattctaccactgtagacaacaacatggtgaatgaattccttactgctgctgagtttggctacctttataggaaggccaatggccgcctacccactgtcgaggagtaccgggcgagcgttgacatgctctgctacggagatgatagactccttggctttcgcgcggggttcgtcgactacgagccaaaggaagtcattgacttctacaagcgcgtcttcggaatgtgggtgaaagacgagaatatcaaggtggcgccctctcttgagggacttagtttctgtggttttacccttgtaagagtgaacggccggtactatggtacgatgcaggccgataagatcttgcagagcttgaagacccccacgaggtcattgcctgatgtggagtcgctttgggggaagcttatttcccttcgtatacttttacaccatagcgaccctaagcacaaggagtaccttgacaggcagattgccaaggtggaagagtacgcccgtgctgaaggtattgacctacccgaagtcgggcccgacttctataccaccat

SEQ ID NO: 2644 - DNA, 1000 bp, unidentified
  source 1..1000: mol_type = unassigned DNA; note = unclassified Fusariviridae sequence
tggtgctgaagagtgcttttgccgaaacgtcaagtacaccatgtatttattaaatactaggccttttgtatggctatataagttgtttttggtcttgatgttaattttgttattgacctcaggagtctgttttgcgtggcttggcgtaggctttgccgctgtgattttggtttttctcgccagtaatgctagccttgttggcatagcttttattggactgtttggaccttttgcacttatttattgtggcttcatctttgagcaagctgtgcgtcgtgaggcacagttgatcagggacgttggtgctgatacagctctgtgggcttttcttgataagaagcccattggtttcactatcttttcaaagctcacattgacacatgcagttttggcggggcatgataagtcaggccgacttttgtctgccagttttcgtgtcttgggcctaccacaagaaatacaagatatggtggaacctgggattcttactatggcttcaaggctctggtccaatcttgtgttgaatgttgactctttatatgatggcagagcatcatttatcgtgagtcttgctgcttattggtacttgcaacgaaaattttctgtttttctttggcgtaggtttgaaacctttgtcaaagttttgtggattgcatttattgtcttgtggtttgttaaaccacaacacttcctttttgccttaatgcaggtttttagaggtgttgtctttttctcaaaccgtgagcgtgtttctgtcttttcattgtggctcaagtggcgtctcacacatttaattgtgaagttgatagcatattttgagtctttcaatgcctcttttcggaaataccatagtgagcaactagacagtagcagaaagactctctctgcacattttagaaattttgtgatgtctgctgctgtttatatttctgatttgggcctaccttcttatgttcgtggtggtttcgtgccttacaataaggaaactttggaacaatca

SEQ ID NO: 2645 - DNA, 1000 bp, unidentified
  source 1..1000: mol_type = unassigned DNA; note = unclassified RNA viruses ShiM-2016 sequence
atggaatttccaaatacagacgacgcgatgttgtttcgttaacgcaatatatgtacttcgcagaggattcgcgtttcctcagcggcaaatacacagtagtgctgtgcgcgtaaccataatgggttacaacacgccgttttagtactgaatttatttgaagaatacaagaacttatacccaggcttgcggctaaaaccgtttgggtattcctcatattatgggtgcgctgaccctaatgaggagagtgatgtacgacttggagcagtattgcaatcatttgattgtatgagactgtattctgacaatattggaagactaatttatccggtctaagattgaaccctcccacatgttcgatgggagtggcgacttagatgcgtggcttgtttaactggtgcgaaagcttgagcaccgacctttcgagcaaagattatagaacgaaaaatggcgcctgaggtttgggttaacaaccccccaggcatcaataaagcatgaagtctctgaaagccaaactttgaatcagatttcactctctcttctccaagagagagctacctttatttcccgtcaaaacattgactctgttaaagagtcctgtcatgactattctttgaaattgaaagatttcttgagcgaaattgctcctggttttgaactaccggaacaattcgctttcttgaaggagcaaactatagcttctctgaacattctactcggtctagtgaaagatttatatgctgtcactaaagaccaccttgccgacattggatcggctctcatccatgttatcaatttttacattggaacacggaattctaccaactggacggatgtgtccattggttttgtgtcgttgtgtttgtccttattcaaattggataccattaaagattcagctaagtacgttcagcaaatcgttggtgtctttgtggacaagcttcgaacttattttgtgaagggcgaatctgccgagaaggagattcgttcgttttggtcggac

SEQ ID NO: 2646 - DNA, 1000 bp, unidentified
  source 1..1000: mol_type = unassigned DNA; note = unclassified RNA viruses ShiM-2016 sequence
cctcaaagccaatagctcagggacaatcaaattcggaccggatttatcggcatgtccagcgctttcaggcggaatactcaagtcctaccacgattacaagatcacagctcttacggtcgtctacaagtctttcgcgtcctcaaccacgtccggtgctatcagtattgaactcgacaattcgtgcacacaatcaaccctcggttcttatgttaactcattcaccgtctccaagacaggaaccaagaagttctcggcttcccagattaacgggaccaagttcatctcctcgacggtgaatcagttctatctgttgtacaagggttcaagtagttcaactgatacagccgggcaatttgtgatcactattagggttgtcaaccaaaaccctaaataggtagaagaccttccacctcaaccaactccaaccccaacgccgcaaccacagccagaaccacaaccgacaccgacaccagttccatcaaaacagttcttctgctgttacaccggaatccctattgtcaacatatcgactagggaaacgtctgactcaatatctgtaggtaagttatccacacagaccttcagatatacatctgatgaaaaatctgaagacagagacgttagatcttggtggtacagcaataacaatgtctctgcacaagcagctttcatatttcccgtcccaaaaggggagtacagtgctacagttgtttgtgaaggtttacaatctgtagaccacattggaggcacggaagatggacagtggatagggattatcgcttattctgatgattccactgacaactggggtattggtagatatcaagactgcacaatatcaaactaccaaaaccagtcgtcttggcggatagggcataaagacttgcaacttaatggctgtaagttcactggccaggctgttgagagagatgcattttgtacattccacatatcagcaacctccaacgacgccagtttctacattgttgcgcctaggacc

SEQ ID NO: 2647 - DNA, 1000 bp, unidentified
  source 1..1000: mol_type = unassigned DNA; note = unclassified ssRNA viruses sequence
gccgagagggagattagaacaccgcgggctcgaacatcagtatagcgagtcattatgggaatgaaggtagtccgaccacggatatatcgcaagttaccgcgaacttcattttcttgtagggtgggcttccccgaaggtgtgaccttatggttcagtaggcgttcactgcactgaacgttgaagagctaggcgatgtactgacatctgcggaggcggttagcggttgtggtagtcgcgccgtccggtgagggccagagcaacatggagtagcgcccatgcgagtttgccagctcggacattttgttttgctcccccagacctgcatgcgcattctgaggcttggatcggcatggtcgaaggtgcgtggtggggtggttgcctgaagcaagtgtggttaagtgattctaggtattattccgtatgaatcttatgggaaggcggactcattgggttgagcctcgattcccatgccacaagcaacccagtgggaacggctacgggtgcgcttaaggtgcagcttggttatgtaagagcgagttaaaggagcggggttgtggcttgtccgtccccagaatccttcatcaagtccgcgacataacctgcaagtagcatgaattttgatgcattagtgcttaagcataaatggggtccactaactatattggtgagatgcgagtgtcattcgtttgggacaacttaacaaaacacttttgttttgatgaatgtgtggctatgcgtgttaatcctaatcaatttacgattattattccaagtgagtatgacttaccagccgatggaacaaccggggctggatatattcattctgttttgtttggtgaaatgcgtttttcatctattagacgattacgatatgcaagaaatcaagccatactaaccgttgacactatacccattcctcgtagtgaggaaagtgcttaaggcacaaattttggagtctagccgctgacaattttgttcatgcattcccaggtcataattt

SEQ ID NO: 2648 - DNA, 1000 bp, unidentified
  source 1..1000: mol_type = unassigned DNA; note = unclassified RNA viruses ShiM-2016 sequence
aggaccccagatgtatccaataccgtaataagcggtatggtttacgtctggccacctacctacacccgcttgaaaaatatgtaatgtcctggacccgcaacggcactcacatctttgccaaggggaggaacatgaggcaacggggtagggatatcgcccacaaatttaacaggtacgaagagtgcgctgtggtctcccttgatcatagcaagtttgactgccatgttaatgaatccctattacgtgctgagcattggttttacaatcaatgctacggttcggaggagctggaatttttgcttgagctgcaggttcgcaacaaaggcatgactaagaatggcactaagtacactactagagccactcgtatgtcaggcgatcaaaacactggtctaggcaactgtttgatcaactatatgatgaccaagcagttgcttagtaagttggggatagggtacgatctgtacattgatggcgacgattttctaatcttcatggagaagagacacgtcccactcatcgacccgagtgcttattccgtcttcggtatgtcaacgaagttggagagtgttgcatacaccattgaacatgtggatttctgccagtgcaggcccgtattcgatggtgtgggttacaccatggtgcgcaaccccgagagaatgttagctagactaccctggatagtaggacctgtcgaggatagtcgagctaacgatattgtattctctactggacagtgtgagatcgctcaaggcttaggtctgcctattggccagtacatcggccagcgaatgtgtgagcgaggtgggaagatggttcgcatcagacatcgggcgtggttggagaaaatgaaacctggaaaactccaacctatagagcccatgggtggtgtgcgtgagagctatgaaagagcttggggtctgtcaatagccgaccaactgctaattgaacagactagtctggtggaacccgaggagcatttcgctccgggtattctaca

SEQ ID NO: 2649 - DNA, 1000 bp, unidentified
  source 1..1000: mol_type = unassigned DNA; note = unclassified RNA viruses ShiM-2016 sequence
gcgtcgccaaaggccttaaccatagacaacgcgcccaattattaatcgataagttagcccgtttcgaagatccagtcatactttgtctggacgcccacaggtgggatgctcatttgaaaaagaggaagttagaggcagaacatctagtttatgtcctctgctccgctttttatgagctagctgaattgttgagaatgcagttgagcaacaagtgtcgaacccgcaatggcgttaaataccgtaccaaaggtaaacgcatgagcggtgatcttaacacagcacttggcaactgcctgatcaatattctaaccattctttgggtgtttatgggtattattatcgattttatggttgatggagatgatggaatagtcatcatggagcgcaaagattggattaagtttaaagatcaaattaacgaaaggtatggtaagactggattcgtcatgaaaatggaggtcgttgaccgattagaagatgttgaattttgcaaatcaagagttatacgtacacatttaggtcccagatttgtagtctatccaaagcatgtcctcagtgggagcacggttggtgtcaggccacggcatggtacttattgggttaagcgcatgcgagccgacgcgataggtctctacgccctataccaaggtgttccgattttgcaggactatgctctggctacactcgaagccacacagcaagtggtaccagcagaccttacaggagaggatgcatggtttcaatttagattgcatccagcgtataattatatggtaaatttgaaaaagattgacatcagtaagttagaccaattcatctcaccccaatctcgagttgatttcgaaagagcctttggaatatcaataggtcagcaaatgctaattgagcatcaattgagacaggcacataaagggtacctctgtgaggtcgcatatcttaagaaacatccttttctgttcacagtcgaacaaaccaggcatttattactcaaactttggta

SEQ ID NO: 2650 - DNA, 1000 bp, unidentified
  source 1..1000: mol_type = unassigned DNA; note = unclassified Riboviria sequence
tccacaaagggggccaccctatcggaatccgcagccgggtggctaccagcccgaaaacaactatctgccggctgggcctgatgaccaggacagaccctacaactactatgcgccactgcgcgacatctttatgagaccacgcttacccaacctcttgggccccactatcaccatcgctgcttcggcagccatgaaggccatgccacacaacttggtctcaggggtcgtgaccacctatgccaccaaatatgcttataggagcatctggtccacagcctactatctagccggtaatgccctcattagtgtcagtcgcatagccacaattgctgctgctgtccgtggcttgacaccaacagccatgactgccagcattgcaatgagggcagcagactttggtggcaatctgttgcaacacgcagcgcgggtaactcatcctcgcgcaatgcatgtggcggccattgttgatggtaccatggccgctgccaacagacttgcctacccaatgctctgcatcggggctgtctggggactgtatgtcctggccaggcatgccatagagccaccaccatatgaggcaccacctggctgctatcccaatggtggccccatcgtggagattacgcaggaagaggcccccaatcgtgaaatggtctttacctgtccagcacccctcgcccggctagtccaagagagagtgctgctctgtgagagggacccaacaatcatccagaaggtcaaatcaattgcctcccgctggtgcgatgcagctggcatccaaggaaaccaacgctatgccgccatctgtggcgctgtagcctctgccttgaccgtaccagttaatgaacagctggtcttgcaactctcacagacacatgcagttcaaacacagtactcaagactagcacgctatctctctggcatcaaacacacccatgatgcctggtggactaagtacttctccatcaggcgctaggccaggtggagggatgctgactgc

SEQ ID NO: 2651 - DNA, 1000 bp, unidentified
  source 1..1000: mol_type = unassigned DNA; note = unclassified Riboviria sequence
ttaaagacttctccatgcgaaacatcatatggcttattgaattctgctatactatgctatctaacatttatacaaaaactagaaaaatcatacgccgcttacttaaacgtctcacaacgagcacatgctcatccctcacagcgatactggcctgccttacgttattctgtcgcgaaattcatcagtatgttagcaatttccagcctggtaatacccctacaggtatacttcttaaccctgtcctactctgcattaaacacatggctgaattcatacacaaatctattccagctatattcccgtcggtttatgcctggatcaaccacgatccttatgtcagcgctatacaagattctctcatctccgaccatggaacaactattcaaactcagaactctcagctggatattaagtttgtacaacatcgcattggcgctgtatttcggattactacagaatcagataccaggtatgtatactgcggagatgaagtcacagcggatatccatatggctaagcgaggagcccgctatgctccagttgatggaactagtacctttgaatgcacatccgaccctgatgagacccttagtaaggttgatgagacctacattacgacaattgtaaacattgtggaagaaaaactgaaagacaatgagaaaattgcggaatttaccctagtacactttgtacaaacagtacaatctactggtacccgaattaggaagacacgagcagatatcagtcctgaatttatgagtaatggtgcctcttaccaaaatagtggcaaactttctatagacgttaatgtcgcaagacaaatggtaactcaaagagccactccaaacctggtccaatctcaccattacggttttctctaccttatggcctatgtatcaattaactccgagcaaagcgtaaattttcaaacacaaaaacagtcgattgcatcccggatttaaaaccccgaggcatatccacagtagtagtaaagaaatac

SEQ ID NO: 2652 - DNA, 1000 bp, unidentified
  source 1..1000: mol_type = unassigned DNA; note = unclassified RNA viruses ShiM-2016 sequence
attagcctaatacgtgaagtgtatgagccgggccctccggggtcgcgctcggcggcggtttaggtagaggtgggagcgcacggcccaactccctaggctgccccgagcaacaatacctgttggttttcgacacagagccttcagggtccacgtgtccggtgcgcgcctcggcgggcgcgcactgcaagacaggagtgccgccggcacgtggatgtgagaccgctccgtgcttattgctttgcgcggataggggtggcggcacggcgggcattgaggagcaagggccggtgctcctcattgccgcgtgccggcccgagccataccccgaaggttgccttatgcctgagtagccgagggtagttcggtgaacagcctggaagccgggtagcgccggtgacggtgagggcgccactgtttcccagcgcgtgggttggcctcttgggaggggggccgtaaaatggtggtttcgttgtgtgagtggtggctcgaaggacacaggcctgcgaggccggctctgcagtgttcgctgcgctgcaaccgggatatgtgggtactggtctggatgtttcgttcgcgtagcgcgcgcgggtgaataactgctggatggctgcacggcgggcattttgccgcgtgacggcttgaaggtggcgcacaacgacaaatggcatcgcgggggtgacggcccgcaacaacgcgcgtgcagggggacgccccccccattcgcacttcacgatgcatgtgggtatgtggacttagcgaatccgttgcagacccgttagctggtggcggcaccagctgaattcaccacattacaaaacaaaaatcgcaaaacgaaacttagcgacggggcaagccccggaagataaaaatagcataagtaaaacccaggcgtcctcctcaaggtgcatctgtgtcgcattctgacgcctggtcgttgtctccggctgccgccgggggttgaacgctgcgaagtgatttccgtattgctggtcgtgaaacg

SEQ ID NO: 2653 - DNA, 1000 bp, unidentified
  source 1..1000: mol_type = unassigned DNA; note = unclassified RNA viruses ShiM-2016 sequence
aggaaaaggccttaataatgtgcagcgtgctttccaccttgaagccaaaatggcagacttcacccacccagtcgtctactctatcgacttgtcacgctttgaccaacatgtatcccgtgaactcctcgagattgaacactctgtctatctttcgtgcaatagcaatgactattttcgtaatcttctcaaggagcaattgaacaacttgtgctttacgcgcaatggatggggatataaagtgcgtggatgtcgcatgagtggtgatatgaatactgggttaggtaactgccttctcatgtacctcatgacaacgtcagctatgaggtaccttggcttagcaaagtatgagctctttgttgatggtgatgacacgctaataataattgaggaacatgatgagtggaagctttcgggcctcactcaagagttcctccgttatgggcatgaaatgaaactagaaaaccgtgcgacctcaatctccgaagtcacctggtgtcaggcaaaagtcgtatatgtcgatggcgtaccaaaatttgtggctaatcccactaaagtcctttcgacagctgtagctggggtgcgccattggcatgacaagggacgccaaaacatgggctattcccttggacaatgtcttttgtccttgtacgcgggtgtgcctatcctccaggctttctgtgaatctttaacatcacgaggtaggtggaatgatgaggtcatgtggcgcgactggatttatcggctaaccatcgaacaggcgaagaacgcaaaagttcgcgaggttagtatcgaaacccggttagctttccaacgcacgtggaaaattagccccgaggagcagatggctgtcgagcgccaactcctcgactgggatataactgcagatccagtatggtgccagtcacaagtgcgacagggttggttcatcgaccctgatattcgtgctggcccatgggcgcgcggtgggtatgacaacccactgacaacgttctagtccact

SEQ ID NO: 2654 - DNA, 1000 bp, unidentified
  source 1..1000: mol_type = unassigned DNA; note = unclassified Riboviria sequence
gggtaggttagcatctgccaccatgatcgtgtgttaggcacgtaaaacctacgttgtcagtacggacatcgttaccaaaatcgtacggagtgacgtctccatctcagtcatccgtggctggacaaatagctaacaccttttcactgttactatggccacaactaccgattcaccgctactgcccgtcgggctcaacactcccaggttgtccacctggaaccgcgcactcattgccactaagaagtggtggcaaaatttgtgcgagaaatcggaagttacacagttgttgtgctgtgttgacgccactgaggccgacaattatcgtcgagacactcgtgtgcgatcagagattcgcgaagctatgcgctcgcagatgggcttttacggtcagcccacatgcattgcagcggtcatgcatgaaacaaagcaggagcataattatgctctgggagctgagcaggaggatgtcattcgtatgactgccgctcaatgggatgcactttttgtgcaataccgcttccatgcgaacacaccttcagcccaaattttggctgtggcgaagaaggtggttgcaccggcgcgtgttgtgccgaagtttgcagccgccgtcacgctccacatcaaggccaaactgggtgtgctcgccaagaccgaggcaaacctgctgcttgttcaacgcaagtatcttgaggtttgccgggaccaccgtgtgcgtgatgttgacgttgtgtcacacatgcagtttgtgcagaacgcatatttcacggaagatgtcctcgagcggctcgccaaaacgcgacttcgcgcacctgcgtggttacgccttttcgaagagaaggagcgtaccgccacgcttgaggtgtgctgagggcgcccggttcgggttcagggccagaacacaagtgtgtcaccacagcttcggttgaagcgtgacaccctgtgtgctggtaagttgtccgttcacaggaacgggctgctcgcaaaaccacgccaatttgtg

SEQ ID NO: 2655 - DNA, 1000 bp, unidentified
  source 1..1000: mol_type = unassigned DNA; note = unclassified Riboviria sequence
aaccgcaggaagatgatgtgtctgtagctgaattaaatacccacttttccaatatgatcaataagcatggtcggaaaggctacaaactatcattcgacgagggtcagaaacgagtcggattactcaaacgtcccatgaactgtacttggaacaaatttctcagtttgtggagacggcctgtctgcgtgatggataggtggtgttcaaaatactttgacgtatttcgtcttttcaataaacttgttatttttgatgtttatgagaagatagattctgataagtatactgtaatgttgaaacataagatgcgagcgaccaaatattgcagccgcgctgatgttcatgctgtcatcgatttcaaacatttcgaaaagatagtcgattgtcaacattttatctacaaagaatttgacgtagctactaagatgcttagggccgcacaaccaaatatttttgaactccaccaattcatggatgttgaaacagctgaggccgaattgacgatgaaagagagtaagttggaattagaattgttcatccaactcactcatattggtttacttgatagtacgatgacacctgaagatgcgcatagggcgatagtaaggaatgcaaaacgtttatgtactgttaactacaaccgataccgtcatttggtcacaaaccatcttcaagtgatgtcacttcattatgctaaggcatacttcaatcatcagttacttgaagttgtttcaactctggattttcaccgcgcctccccacaaacacgcgattctttgcgcttggttatcgctcacgggaaattagagagctttctgcacctattcaaacgaaaaacgggcttaagtttagaaatgttaggaacatcaactttcgtcctgttcgtggtgtggaaatggtttctacgggtcctcatgttgaggggtattgcttacctcatatcgacacaagagaccctgcttccctgtttgatggcgtgcgtgcacgtatggggaaagtg

SEQ ID NO: 2656 - DNA, 1000 bp, unidentified
  source 1..1000: mol_type = unassigned DNA; note = unclassified RNA viruses ShiM-2016 sequence
tcactactacgctttcgtttgtgtgggaacggttggggtcatattattcagcgaaagttctctgtttgtttaagcgagtttcgctgcatgcctcattacaatgaggtctacgctgtccagctttattccagctgcggccgctacatcatccaccttcgattcaggcttatagtcacgcagcgctcctctttggtagtgagtgttgtgcccatagccattcataccaccagggccacatgagtagtggcgcttctatagcgcttacatttctagtggtcatcctcatatttgcctgcgggtttttcattcagtggtgtctcatcaagcgcaactagtagccatggcaatttcttataagtttgtcgcgccgctggccattattccttgctattatgcgggacgctgggcgctcgtgaggtacggcaactcacatggctggtgggataccaagacagcttgctctgatgctgtcattggcattgccaccgccattgagcagcggtctgccggtagggacccctccgaccttctcagggcgttggagttcgacggggaggtcgctgacaatctgcacgaggagctggccgaggctgcgttctacgagcgaaagtcctacgagagccggcacttctaccgccactggattgcagccgttcgcatggagtttcctcttcggagtgatcgtccatccgataaggcctgcatgacaaagtggttggtgggcaagatgagggcaaagggcattcgcatcactcacattgaggatgctgtgccccggatcgtggcaatggccatcaaccccagccgtgctgaggttgaggctagggagatggccgaggctgccgatgcctggcgaaccccccccgcccttacgtgggtggagtggttgctaggcatgacgccgaagccgacttccgcgtcgaagtgggaatagtggtgccctgtggctgcgcctcagcgtgctggcgatgttggtggcattgcgcgccatctcgccgac

SEQ ID NO: 2657 - DNA, 1000 bp, unidentified
  source 1..1000: mol_type = unassigned DNA; note = unclassified Riboviria sequence
tcccgtgtcaggcacccccagttttcggccttgaagcacaactgcatccccacattggatagcgcagacatatggcgaaatgctaagtacccatcgagtccgtttgacagttgcaatggcctggcacaacattgcccagtaaagtcatccttcccaggggctgctttaatacattcagattattatctgagttctgaggacttggcagccgtcatcaggtcgcacactttcatagtcacccacccatttgatggggaggaagggtgtttcaatgacgagttacattggaggaaagagggaccgtacatacgtgcgtggactgatgatggcacgccgtacaagcacttgtaccaccattgggaggctgaggggtgcataattgggagacatggagccgccacttacgtgagggtgcacagggggccgagcatggatgtgtactactgctttccatcaccaggcgtctaccgatcagacgacccgctcaggttgagaaggagtgacgaagtgctgatgcaccgattgcctagcgggaatttttattcagtgactaatggtagtgcgaagatctatgaccccgattttaaagtgttgcaagagataccgcatggcatcttacaacgagtggcagccaggtgtgggacagccgtccgtgatgagaagtttctaccggcgctggttgcttatacaacaacaaggttcacagcagacaaccaagacttgcatgtggtggaggatgtcatatcggtggccctgcggcatagcgacatgtttgccttgaatgtgtcttccaggtacattaccaatttcgatcccatgcgaatcaccaactttcagaggctggtgtgggtgtggaatgacttgcgctccagcttgagagggtattggaggttgcccctgacaactagcaacccactagtcaaccgtgtcactaccccttgggcatttagtcgtatatccgtcaacagttacgttcgtttcacccattatggactggtag

SEQ ID NO: 2658 - DNA, 1000 bp, unidentified
  source 1..1000: mol_type = unassigned DNA; note = unclassified RNA viruses ShiM-2016 sequence
accaaagtgcaagagttcgtttgtgcctcggagcaggtagtcgagggagactactcaaacttcgatggcagcgtgtccgcggatgctcagaagtgcgtgatgaacgccgtttatcacaggtatttccggagtgagttccaagaagaactcaccggctacaccagcatgctcatcacttgtcctgctaggtccaaaaccttcgggttcaagtatgacgctggtgtcggagtcaagagcggctccccaacaacctgtgacgcaaacaccgttctcaacgcctttctgcaatacatagccgtaagacggacactgccagagctctcaccagaagacgccttcctccaaataggattggcgttcggggatgactctctttgcaacagtcagttctccaaggcttggaccaaggcagccacccaactagggttcgcactaaaagtcgaaaagtgcgctcctgacacgggtgtgacattcctggcccgggtctacccagatgcgaaagcaagcctgacctccttccaggaccccgtgcgcacattacgcaaggcacaccttaccgggcgggacccaaatgtcccactcccggatgccgcgtgcgatcgcgccgagggttacctggtgaccgataaggagactccggtactgggtgaatacttccggttcgttttgcgccactatggaccgcaacggaccgcgaaggtgagagccgacagttgcagtgagaagccatactggctgacgcaaggcggaagctggccccaggaggcaaaggacttcgacttgatgctacactgcatggcagcacgcacaagcttcgaggtcgagaccttacgcgccatggaacttcactacaagagcgcgaaggacccctggacccccttaccttgggtgctgggagatgaggacccgacgcgggatacgcttaacgccgagggtctcccaagcacgggggcggtggactcacgtacatatgaaaaggacgtggagagagtaatccgtg

SEQ ID NO: 2659 - DNA, 1000 bp, unidentified
  source 1..1000: mol_type = unassigned DNA; note = unclassified Riboviria sequence
tgagtgtaaaaatgggaggcccgtcccagtccaccgaattaccttctttctcacacttcctcggtgtgggatatgagccaatttgcgggccgctgccgggcggctgaaggtgaaggccacgcccacgccacgacccgtggctattcggggcgcatcctgcatcctatcgggattaaaggttgaaggagcttccaagtaacccaacaggggctctggaacctagatgcagggtgggtgactacggcccgacgatcacggaatgagcacccgtgtgtcactcatttgcacggcaaggtgggcatgccaccgtgtagagtacgtcggttgggaacatgtcaagaggtggcttctcggctaagccgatggccagggttttagagcgcatgtatagaatgttgctagtgtttgctgtagtttttggtgtgttagaaatcttttgggttgcgtttgggtttgggtgtgcactccttcaaattaataggttacccctcgcctactgttgcaatcagcttcgttctcggtgagctcaacagcgactgtcaaccgacgcggtgtggtgagccgtcattggaggagtggtctcctttgattggcacgtactctagccaagaggtgcgactggtagaaggcatcgaacattgttaatcgtcctgtcttgtcattctcgtccatgacaagtttcgcatagaggccgtaatcagttcgattctttcctgggtgagctattcctgcgcttgtcggaataactctttgcggtggaagccacatcggtgagctcaaatgtgttttgggtcgcgacgcgggaagcggaggaggggccgaaaggccactcgtacgaagccaagggtattctgattgttgaggttgggtcgggcagcacccatcgccattcctcaatccacatgatttcacacacacactcacacagccacaacagcggcatgtattttcaagtgtccctcgcgcattgggtcttaggattttcggaacattcttcacc

SEQ ID NO: 2660 - DNA, 1000 bp, unidentified
  source 1..1000: mol_type = unassigned DNA; note = unclassified Riboviria sequence
gggggctggcgtgcgctagcgttgtcaaggacggcaagctggtgcgacagaagttattgcaattggatgagattgcacggggcgtggacatcactgatgaccacctttacgaccccgtgcagtatctgtccatgttcgagttgggcccattggagccgagcttctcgaacgtggcaggacggctctcaaaagctgttgagtacaacaatcgcgcaggcctcccgctcgaggatctgcgacaaaagcttattgagtgcgtgtcgagtgggcagaagtgtgcgaaagctcagggccaacccggtgcacaccattcccaggacaagggaaagggccggggagcgcttggacgcagcggtaagggggggcagacagccgcctcccaccactaggtggtcatagcctcctgttgcaaacacgcagtgcttcggcactcgcagcaggagggcgttggagcgtggggatcgccgtcggtgtgggaatccggcggtgacggcgtcagtcgtggggggttcggcccttatacgacaggctgatgtacgaagtaactggtggcttaggctaccaccagcgaaagaggcccgtggctgcggtcgcctcttttggctgcttggttgttgaccgaagtgagttgcgctactttggatgttgaatttagcctagtgcttcattcgacgccagttttgcgcgatttatcaacaatcgagttccccgaaccgacaccctgtgggtgctcagcttggaagcgggtcgtgatatatgattagcaaatacgcgggctatacttgagccgtccgtgatcactgcaacggataatgtcacgccgtggaaaggtgaaccacctatcacgttggtaagggtaacccggccgggatgggagcacattcaccatgtgcccggccactccatgtagctcaaaggcacagattaaccagctacaagcctaaaggaacctctcctgaacgcaccgctgtcgaacgacagctacaacgactttttcgct

SEQ ID NO: 2661 - DNA, 1000 bp, unidentified
  source 1..1000: mol_type = unassigned DNA; note = unclassified Riboviria sequence
tccttacaggatgggttaaaagcccttgaacctgttaaagctacatttttgcgtacgcgcaaacgtgatagtttcactgatgaggatacaatcataggttccccttacgggtcccatcaattgtctccttgtactgccagctttagtcgtgagactgtggctcgtgcacaagtgtatactattttaacagctgaacaggcaaaaatgaggcgttacttacttggtccagttacaaccgcatgggaacttgttcctttgtcttttgttgttgattgggtcgtacaagtaggcgattttatcgcttcatttcgtatgctccccaaagagtcacagggaataactttttctgtgaaagataaggtggaaattctagcggtcgctagtgcagactctaaactaatcatacgttcggacggttatattgtgtccagaattgatggtagacagagtttgagctactccaagcaacgttacacgcgcggggtaattccaaatgattttaaacatgaaatcccggttggcgttcaaatgaacctgtgtcgtactattgacgcattttctctcgcttataaaatcggactaagccaattaaaaaggagacattaacaatgtcacaatacaaaacgcgtactcgcggagaagccaaaactgtgcttgttaatccgtcaagctataaatcaacgcttgaggttatccacagtttcaaacgagacacagcccttaatcaggaccaagtccgaatcggtgttgcttcggcatatactgatgtagttaaaacctgcaaggactcctgtggcgtgccacgtcgcgagctggttaagcttgaaatgcctgttttattaggcatggacgaagcttattacaccagaaagaaacaacagctgactgacgttttagcgtcgggtcagaaacttctcgaagcattcgatgatgtgcagattggaatcattcctgatctgaacgtcgaagctactgtcgcttaacaataaggaatataatt

SEQ ID NO: 2662 - DNA, 328 bp, unidentified
  source 1..328: mol_type = unassigned DNA; note = Picornaviridae sp. isolate ybw202shi02 genomic sequence.1 sequence
ttcgtccgaccactacatccaaccaacctcctcgcttgattggttgaagtatcatactgtccgtggtcccaaaaccttttacatcgagattctctcatcctgtgctagtgcccatttacttctaattactactcgaaaaccttcttacatcagcgagagcgccgactttgagacaccaacttgcgttgagctacccgctcctctagacgtctccattccccttcgagatcgtcttgttccgaagaaagcatatgacaatgcgtttgtctatgttcgtgctgttcgcacccttcgcaagactgatccagccggctttgttcgcacccag

SEQ ID NO: 2663 - DNA, 354 bp, Pegivirus B
  source 1..354: mol_type = genomic DNA
acgacgcagtctcaccaatggactggcacggtccacaggagttgtcccttccggtgtgaataaggggccgtcacgagcggtgacgtaaaactgagggagattaggccagggtaacttggcgtgcgtacggccacgtcgcttctagatttcaatgccactcttgtggggcgagttgtcaaggccagcacggcggggcccccatactggttgggggtactcaatcgcctagtccagattatgccatgtttcccccaggcgggcgtagcgctacatgcggccaagaggaaaatccctatgggtgacctcgggggaaccttttcttttttagcggtcatggggtggtgtaccgcaacc

SEQ ID NO: 2664 - DNA, 365 bp, unidentified
  source 1..365: mol_type = unassigned DNA; note = unclassified sequence
ccatcatcaaatatatacggagttttacgacacatacaacgacgcatgcgcaaccccacctacggttgcccgcgcatgcacagttgctgacatgcgcagtaaaaccaggaaatgactttgcattttcaagaaggtcacacgtaagcggatctctccgggtttttaaggctttttaagcatttttaccggatttttgacgtttaattattatctaaatgactcatctcatccctttaaatgtgctaacctgcaaggggacggtagagctgctttcctgcgactggtggaggtctgcgttggtttcacagtgggtaagtgagcctttttctgcctacttttatttctagacagattctgagtggctt

SEQ ID NO: 2665 - DNA, 383 bp, unidentified
  source 1..383: mol_type = unassigned DNA; note = unclassified Pestivirus sequence
tgtataaggaaggggtgggagccttccctatacttgtttacaaataccatacagtgttacagcagtgtgtagtttactatgcaggtttgaagggcggggatagtctgtgccagcagacgtgtaccagcacttcagaaggaacctgcaactgcgaaccgggagagcatctagagcccctaagctgtgagtacacagcagccgtcagagagtcagctggaaaggatcacccacctggaagctctcgtggacggggtcatagaccaagggcaactctattgaggaggtggggtacctcttcatacaccccagtggtgtgatgtgctgcctgacagggtcccggctgatggcccggctagcagtataaaaatcagttgtaatggcac

SEQ ID NO: 2666 - DNA, 397 bp, unidentified
  source 1..397: mol_type = unassigned DNA; note = unclassified Picornaviridae sequence
gtaggttatatggagttcatgctcgttctgaaccgggaatggcacaacccgtagtaggatcttgcctctgccatattaatctgcgcctgttgcttctagactatgggctgctaaggatgatgttggaactcctttttggatattccatatcaagtcaactgtttcacctggtgtacgctggaaatccatgctttaagtcctcatccggaggtggtgctgaaatattgcaagccacggatgactcttgaagcctggtgccgctactaggtgttacaccctttatgggcaaatgttgaaccttagtggacgcgtgagatgggaatccacgcctggccatagactggctgataagctcgcggctgatcgagttgcaacagtaatcagttgatttgccact

SEQ ID NO: 2667 - DNA, 415 bp, Passerivirus A
  source 1..415: mol_type = genomic DNA
tcctcacccatgcttttcctacccccaccacgcccgcatgtttactgctttccttgatgctgcccgtgactacttccatgacctccccaacccaaacctcaaacgccttaagctatcatgggctctctatcaccaatccccttccttcccacccagaacccccccctccctcccctacaacgtgtatgagcaagacgagtttgacaagctcgccgaagccatgctcacccactctcccttccccacatcccattacctcttccaccccctcccgtccaacgcccgcaccatcgtcgagcgtgaggctgactgggatggctgtgatctagaaaagaaatggctcgacctcgtcatagaggacgatgccaagttccttctggagaacggctctctcccgtttggctccacccttgcc

SEQ ID NO: 2668 - DNA, 415 bp, Passerivirus A
  source 1..415: mol_type = genomic DNA
tcctcacccatgcttttcctacccccaccacgctcgcatgttcactgctttccttgatgctgcccgggactacttccatgacctccccaaccccaatctcaagcgtcttaagctgtcctgggccctttatcatcaatccccctccttccctcccaaaacccccccctcccttccctacaatgtgtatgagcaagacgagtttgacaagctcgccgaagccatgctcacccactctcccttccccacttcacactacctcttccaccccctcccctccaacgcccgcgccatcgtcgagcgtgaggccgactgggacggctgtgatctggaaaagaaatggctcgacctcgtcattgaggacgatgccaagttccttctagagaacggctccctcccgtttggttccacccttgcc

SEQ ID NO: 2669 - DNA, 425 bp, Anativirus A
  source 1..425: mol_type = genomic DNA
cccccccccataccttttccccctctttaacggcaatggttaatggactaaggataaaggattatggacttatatgatgtgcccgacatggaattcgggaaatctggatctaagggttacctcaaaggtagtgaaattccctcgcaggggtatagtagctagctttgtgccttagtgaagggaccgtgtgttctagacatggtagttgtgtaggtacaagaggacttcatttgaatatcctcgatcccggacctaaattaccttgtggatttccggaggaatttaggaaaccacctccttcgggaggctagtaggagcttacatgactctcggattgggaagtccgagctggaccatgactgggtgatagcctgccggctggcgcagttcacatggtatagtcagttgaaaataaatagaaaatc

SEQ ID NO: 2670 - DNA, 430 bp, unidentified
  source 1..430: mol_type = unassigned DNA; note = unclassified Picornaviridae sequence
ccacccccctttcaacggctggcccacgatacgggccacaactttcctatcatcttctcatttcctataggttcggtttaatggttttgacttctgcattaataatggttttgtatgtggatgaccgtactatggatttggtgtgttaagctcacgttaaaaagctaggtggaatggatttgctacctggatggtcccccaggattaatggtaactccctctttcaccgaagtcaggaggaagagtagatgcttctagagttctgtgctctgtattacacagcaccgctcagctggcgtggacttccggccattggttgagttgacactaggagtagccagtactgggataactggcctggtctatactgctgataaggtgggttgcctgaccctctaaacctgactataattcaggctgtcttgatgcg

SEQ ID NO: 2671 - DNA, 461 bp, Melegrivirus A
  source 1..461: mol_type = genomic DNA
ggcaagttgatatactggctctgatcacggactattctggtgttggtggacactctctccacaagtaggcgccgtggagttcatgctcgttctgaaccgggaatggcacaacccgtagtaggatcttgcctctgccacgtgcacctgcgcctgttgcttctagactatgggctgctaaggatgatcacagactcctttttggacaatctgtgtcaagtctactgttacatctgatgtacgctggaaatcctcgtactggaggcaatacctggaggtggtgctgaaatattgcaagccacaggtgtgtttctagtcttggtgccgctatcagatgtcgcaccctctacgggcaaatgtagaaccttagtggacgcgtgagatgggaatccacgcctggccatagactggctgataagctcgcggctgatcgagttgcaacagtaatcagttgatttgccact

SEQ ID NO: 2672 - DNA, 493 bp, Foot-and-mouth disease virus
  source 1..493: mol_type = genomic DNA
cttgaggaatacttgtacaaacacgatctacgcaggtttccacaactgacacacacaccgtgcaatctgaaactccgcctggtctttccaggtctagaggggtgacactttgtactgtgcttgactccacgctcggtccactagcgagtgttagtaacaggactgttgtttcgtagcggagcatgatggccgtgggaactcccccttggtaacaaggacccacggggccgaaagccacgtcctaacggacccgtcatgtgtgcaaacccagcacggcaacttactgtgaaaaccactttaaggtgacactgatactggtactcaaccactggtgacaggctaaggatgcccttcaggtaccccgaggtaacacgcgacactcgggatctgagaaggggactggggcttctttaaaagcgcctagtttaaaaagcttctacgcctgaataggcgaccggaggccggcgcctttcctttaaactgttttaactta

SEQ ID NO: 2673 - DNA, 502 bp, Enterovirus J
  source 1..502: mol_type = genomic DNA
aaaacgatcgttacccggctatctacttcgagaagcctagtaacaacattgaaactcttgagcgttgcgttcagcacagtaacccctgtgtagctttggctgatgagtctgggcactccccactggcgacagtggcccaggctgcgttggcggccaaccgatccgggcaaccgggtcggacgctcacttgtggacatggtgtgaagagcccattgagctagatagtagtcctccggcccctgaatgcggctaatcctaactccggagcaaacgcacgcaacccagcgtgtagtttgtcgtaacgcgcaagtctggagcggaaccgactactttgggtgtccgtgtttcctgttttaccttatttggctgcttatggtgacaatctagagttgttaccatatagctattggattggccatccggtgaatagatctcgatatattttattgcacagccttttatagcttgaattcataagtctcacttcaactcagaagtaatc

SEQ ID NO: 2674 - DNA, 506 bp, Foot-and-mouth disease virus
  source 1..506: mol_type = genomic DNA
acgaaacgcgccgcctcttttggacttcttgtacaaacacgatcttgaagcaggaatcctcaactggcacacccgtgcaactgtaagtttcgcctggtctttccaggtctagagagatgagcagctgtactgagactaactccacaattggtctactagcgggtattagtaacactcactttgcttcgtagcggagcacatgagcgttgggaactcccccatggtaacatggacccaacgggccaaaagccacgcctcgtgcctcatgtgtgtgcaaccccagcacggcaatttgtttgtgaaacacaccttaaggtaacactgagattggtacttggtttctggaggcaggctaaggatgccctttaggtacccggaggtaacaagagacactctggatctgagaaggggaccggggcttctataaaagtgcccggtttaaaaagcttctacgcctgaacaggtgaccggaggccggcaccttttcccatctacaacttttatct

SEQ ID NO: 2675 - DNA, 507 bp, Foot-and-mouth disease virus
  source 1..507: mol_type = genomic DNA
acgaaacgcgccgcctcttttggacttcttgtacaaacacgatcttgaagcaggaatcctcaactggcaaacccgtgcaactgcaagtttcgcctggtctttccaggtctagagagacaaacagatgtactgagactaactccacgattggtctactagcgggtattagtaacactcactttgcttcgtagcggagcacatgagcgctgggaactcccccatggtaacatggacccagcgggccaaaagccacgccttgtgcctcatgtgtgtgcaaccccagcacggcaacttgtttgtgaaccacaccttaaggtaacactgagactggtacttggtttctggagacaggctaaggatgcccttcaggtacccggaggtaacaagagacactctggatctgagaaggggaccgggacttctataaaagcgcccgttttaaaaagcttctatgcctgaataggtgaccggaggccggcaccttttctttttattaactttaaatct

SEQ ID NO: 2676 - DNA, 507 bp, Foot-and-mouth disease virus
  source 1..507: mol_type = genomic DNA
acgaaacgcgccgtcacttttggaacacttgtacaaacacgatctaatgcaggtttccttaactgacacacccgtgcaatttgaagtttcgcctggtctttccaggtctagagagacaacactttgtactgagactgactccacgattggtctactggcgggtgctagtaatgactttgttgcttcgtagcggagcatgcaagccacgggaactcctccttggtgacaaggacccgtggggccgaaagccacgttctctgaaccttgcatgtgtgcaaccccagcacggcaacactgttgtgaaacacactttaaggtaacactgagactggtacttggtttctggagacaggctaaggatgcccttcaggtacctcgaggtaacaagagacactcgagatctgagaaggggatcggggcttctgtaaaagcgcccggtttaaaaagcttctatgcctgaataggtgaccggaggccggcaccttttcctttaacactacttacttt

SEQ ID NO: 2677 - DNA, 508 bp, Foot-and-mouth disease virus
  source 1..508: mol_type = genomic DNA
acgaaacgcgccgtcgcttgaggaagatttgtacaaacacgatctatgcagacttccacaactgacacaaaccgtgcaacttgaagctccgcctggtctttccaggtctagaggggcgacactttgtactgtgcttgactccacgctcggtccactggcgagtgttagtaacagcactgttgtttcgtagcggagcatggtggccgtgggaacccctccttggtaacaaggacccacggggccgaaagccacgtcctaacggacccaccatgtgtgcaaccccagcacggcaacatttctgtgaaagctactttaaggtgacactgaaactggtactcaatcactggtgacaggctaaggatgcccttcaggtaccccgaggtaacaagcgacactcgggatctgagaaggggactgggacttctttaaaagtgcctagtttaaaaagcttctatgcctgaataggcgaccggaggccggcgcctttcctttaaactgtttcaactta

SEQ ID NO: 2678 - DNA, 512 bp, Foot-and-mouth disease virus
  source 1..512: mol_type = genomic DNA
gcgcacgaaacgcgccgtcgcttgaggaatacctgtacaaacacgactcacgcaggtctccacaactgacacaaaccgtgcaacttgaaactccgcctggtctttccaggtctagaggggtgacactttgtactgtgcttgactccacgctcggtccactagcgagtgttagtaacagcactgttgcttcgtagcggagcatggtggccgtgggaacccctccttggcgacaaggacccacggggccgaaagccacgtccttgtggacccaccatgtgtgcaaccccagcacggcagctctactgtgaaaaccactttaaggtgacactgatactggtactcagacactggtgacaggctaaggatgcccttcaggtaccccgaggtaacacgcgacactcgggatctgagaaggggactgagacttctttaaaagtgcccagtttaaaaagcttctatgcctgaataggcgaccggaggccggcgcctttctccttaactaccacttctta

SEQ ID NO: 2679 - DNA, 514 bp, Foot-and-mouth disease virus
  source 1..514: mol_type = genomic DNA
gcgcacgaaacgcgctgtcgcttgaggagaacttgcacaaacacgactcacgcttgtcttcacaactgacacaaaaccgtgcaacttgaagctccgcctggtctttccaggtctagaggggcaacactttgtactgtgattgactccacgctcggtccactggcgagtgcgagtagtggtgttgttgtttcgtagcggagcatgatggccgcgggaactcctccttggtaacaaggacccgcggggccgaaagccacgtcttaacggacccatcatgtgtgcaaccccagcacggcaaccacaccacgaaaaccacttcaaggtgacactgatactggtactcaaccactggtgacaggctaaggatgcccttcaggtaccccgaggtaacacgcgacactcgggatctgagaaggggactgggacttctttaaaagtgcccagtttaaaaagcttctatgcctgaataggcgaccggaggccggcgccttttccacaatttaatacttctttt

SEQ ID NO: 2680 - DNA, 516 bp, Pegivirus B
  source 1..516: mol_type = genomic DNA
tcctttagaattaatggaacgctaggcttccggcccgaaagccgtggatctcccctgacagggttcttcgggtaaatcccggggggagtggtagcggtattagggtaggtcgtaaaaactgccccagtggggctacctagttgttaccggcaggacgaacggcgcgtcctgaaggactggcacggtccacaggtgtggtccctaccggtgtgaataaggggccgactcaagcggagtcgttaaactgaggctctagtgtcaagggtaacttgggcttgtgtacgtccacgtcgcttctagagttcaatgccagcactaggctggggcgagttgtcaagggcaacaggcgcgggggtggattattgttttccaccactcaatcgacactcgggtaatatgccatgctccctcccaggcgggcgtcgcgctgcaggcggcctagaggaaaaatccgaaaggtgacctcgggggggacctctcttctcttagcggtatgggtgtggtgttaccgcaacc

SEQ ID NO: 2681 - DNA, 520 bp, Megrivirus A
  source 1..520: mol_type = genomic DNA
ttcgggacactggatgggcgactcggtggggctgccaccccgtcttgacttctcgttgttgaccctggaattctagaacattctcttgtcttctgcgtctggtccacggacggactaattggaatgtttattggttaagcctcgttctgaaatgccctagccaatgggctatagtaggatcttggtgtttccagtgaacctcttccgaccatagtagctagagttatggctgtgtaggatgtgggtaagaccgctttttgcgtatctcccacaagacaccggatcatgggtgtgtccgctggataaggctcgaaacctcccaactgacggtggtgctgaaatattgcaagcctaagttgtgtagaggcaagtagatgcccgccgcgacatctgtgatccgcccgtctgggttagtagtgtacctacatggacgtggggttgggaatccccacctagcataacactggttgatagacctgcggctggtcaagttactatggtataaccagttgaaatggct

SEQ ID NO: 2682 - DNA, 522 bp, Foot-and-mouth disease virus
  source 1..522: mol_type = genomic DNA
gggacgtctgcgcacgaaacgcgccgtcgcttgaggaagacttgtacaaacacgatctacgcaggtttccacaactgacacaaaccgtgcaacttgaagctccgcctggtctttccaggtctagaggggcgacactttgtactgtgcttgactccacgctcggtccactagcgggtgttagtaacagcactgttgcttcgtagcggagcatggtggccgtgggaacccctccttggcaacaaggacccacggggccgaaagccacgtcctaacggacccaccatgtgtgcgaccccagcacggcaactttactgtgaaaaccactttaaggtgacactgatactggtactcaaacactggtggcaggctaaggatgcccttcaggtaccccgaggtaacaagcgacactcgggatctgagaaggggactgggacttctttaaaagtgcccagtttaaaaagcttctatgcctgaataggtgaccggaggccggcacctttcttttaaaccacaactatcctt

SEQ ID NO: 2683 - DNA, 527 bp, Foot-and-mouth disease virus
  source 1..527: mol_type = genomic DNA
tttgagaaatgggacgtctgcgcacgaaacgcgccgtcgcttgaggagacttgtacaaacacgatctacgcaggtctccacaactgacacaaaatcgtgcaacttgaaactccgcctggtctttccaggtctagaggggtgacattttgtactgtgcttgactccacgctcggtccactggcgagtgttagtagtagtactgttgcttcgtagcggagcatggtggccgtgggaaccctccttggtaacaaggacccgcggggccgaaagccacgtcctaacggacccaccatgtgtgcaaccccagcacagcaattttactgtgaaaaccacttcaaggtgacactgatactggtactcaaacactggtaacaggctaaggatgcccttcaggtaccccgaggtaacacgcgacactcgggatctgagaaggggactgggacttctataaagtgcctggtttaaaaagcttctatgcctgaataggcgaccggaggccggcgccttttcactaaccactacttttt

SEQ ID NO: 2684 - DNA, 529 bp, unidentified
  source 1..529: mol_type = unassigned DNA; note = unclassified Picornaviridae sequence
ttctttgaaaagggtactgggggggtcgattctagacccccacctagcccttttccccgtcagtggggggcttactcactgggcatctgttaatctggcctaactagattgacaccactcccttggaacgtaactccacgctaactcactggctctacgcacagacacacggtctttctgctatccccggggaagataccagatggcgaccggctgtcccagcggcctagtagctactcgggttgagtacccaccacggttttgacgcctgctaaaattcaagagacagaggtaggggtgcttagtgtgtgggggaagttcccacaagcgaggcaaagcattgctccctcgcgtcaccgggtgcaaggtaaattggctggacttccgctctacccttgctactcgccctcttcggagggttcgaagtgacactaggtatacgcatggttgggaaaccatgcctggcctactactgggtgatagcctggcggcgggtccgtctcttggcttatacccgttgatttgggat

SEQ ID NO: 2685 - DNA, 529 bp, Foot-and-mouth disease virus
  source 1..529: mol_type = genomic DNA
tttgagaaatgggacgtctgcgcacgaaacgcgccgtcgcttgaggatgacttgtcaacacgatctacgcaggtatccacaactgacacaaaaccgtgcaatttgaagctccgcctggtctttccaggtctagaggggtaacactttgtactgtggttgactccacgctcggtccactagcgggtgctagtagtggtaccgttgcttcgtagcggagcatggtggccgtgggaattcctccttggtgacaaggacccacggggccgaaagccacgtcctgacggacccaccatgtgtgcaaccccagcacggcaactttaccacgaaaaccactttaaagtgacactgaaactggtactcaaccactggtgacaggctaaggatgcccttcaggtaccccgaggtaacacgcgacactcgggatctgagagggggaatgggactcctttaaagtgctcattttaaaaagcttctatgcctgattaggcgaccggaggtcggcgcctttccattaactatcactcactat

SEQ ID NO: 2686 - DNA, 532 bp, Foot-and-mouth disease virus
  source 1..532: mol_type = genomic DNA
ttgagaaaaggggcgtctgcgcacgaaacgcgccgtcgcttgaggatgacttgtacaaacacgatctacgcaggtatccacaactgacacagaaccgtgcaatttgaagctccgcctggtctttccaggtctagaggggtaacactttgtactgtgattgactccacgctcggtccactggctggtgctagtagtggtactgttgtttcgtagcggagcatggtggccgtgggaatccctccttggtgacaaggacccacggggccgaaagccacgtcctaacggacccaccatgtgtgcaaccccagcacggcaactttaccacgaaaaccactttaaggtgacactgaaactggtactcaaccactggtgacagactaaggatgcccttcaggtaccccgaggcaacaagcgacactcgggatctgagaaggggactggggcttctttaaaagcgcccagtttaaaaagcttctatgtctgtgtaggtgaccggaggccggcgcctttccatttaactattacccaccat

SEQ ID NO: 2687 - DNA, 550 bp, unidentified
  source 1..550: mol_type = unassigned DNA; note = unclassified Aphthovirus sequence
ttgtaaccgcacggtttgccttcctgggggaagtaaaacacccacaagcttgacagttttgcccgttttcacgagaaatgggacgtcagcgcacgtaacgcgccgccactttggaatacttgtacaaacacgatcttacgcaggtttcccaactggtacactcgtgcaacttggagtttcgcctggtctttccaggtctagagggacgacactttgtactgaaaccagctccacgattggtctactggcgggtgctagtaatgactgtgttgtttcgtagtggagcatacaagccgcgggaacccctccctggtaacagggacccgcggggccaaaagccacgttctttgaaccttgtatgtgtgcgaccccggcacggcaacactgttgtgaaacacatcttaaggtaacactgagactggtacctggtttctggagacaggctaaggatgccctccaggtaccctgaggtaacaagcgacactcaggatctgaggaggggactgggacttctataaaagtgtccagtttaaaaagcttctatgcctga

SEQ ID NO: 2688 - DNA, 555 bp, unidentified
  source 1..555: mol_type = unassigned DNA; note = unclassified Picornaviridae sequence
ctgtgccttcctggtcataattggctccggctggttttgacttcggaacactggatgggcgattcggtggggctgccaccccttcttgctttttcggtgtgacattggaattctagacccttctttgtccctcgtgtctggtccacatacggactaaatggaatgtttgccagctaagcctcgttctgaaatgcccttgccactgggctgtagtaggatcttggtgtttctggtgaacctcttccgaccatggtagctagagctatggctgcgtaggatgtgagtaggaccactttttgtgtatccctcacaagacaccgggtagtgggtgtgtccgctggatatggctcgaaacctcccaactgaaggtggtgctgaaatatcgcaagcctaagttgtgtagaggaaagtagatgcttgccgcgacacttgcttcccacccttctctgggctagtagtgtacctgcgtggacgtggagttgggaatctccaccatgcatagcactggttgatagacctgcggctggtcaagttatcatggtataaccagttgta

SEQ ID NO: 2689 - DNA, 562 bp, Enterovirus A
  source 1..562: mol_type = genomic DNA
ccaccaacccaggtgggttttccgtcaagcacttctgtctccccggacttagtaccaataggctgtacccacggccgaaagggaaaacgttcgttacccggctacctacttcgagaagcctagtaacatcattgaatgtctcaagtgttacattcagcacaaccccagtgtagttcaggtcgatgagtcaccgaattccccacgggcgaccgtgtcggtggctgcgttggcggcctgcctgcgggtctcactcgcaggacgcttgattcatgacatggtgcgaagagcctattgagctaggtagtagtcctccggcccctgaatgcggctaatcccaaccacggagccatgcgctacaatccagtggtgttgtggtcgtaacgagtaattctgtggcggaaccgactactttgggtgtccgtgtttcctgttttatttaccttggctgcttatggtgacaatctagagttgtcatcatatagcgattggattggccatccggatatatcttttgtgtgatttacctcttgctaccaagcaattgtcacttgttaataatacc

SEQ ID NO: 2690 - DNA, 566 bp, Pegivirus B
  source 1..566: mol_type = genomic DNA
cgtaggcgcctgggggttcgggtgcaagccccgaaaccgacccttacttcgaacaaccgttctagaacggctgggtcaactccccctttagtcaaaagcccagtgttgctggggtgccagggttcttagggtaaatcccggccccagtggatctgggaatatgataggaggagcggtgcggttcgaccaccgcacgggaccactgaccggcttgacgaagcggctagtagttgactagggcacggtccacaggtgtggcgtaccggtgtgaataacggcccgtctggagcgacagacgttaaactgaggggggtgtgaggatggcaacgcggcccgtgtacggggacgtcgctaaataccttcgggaacagctatgcgggttgtcaaccccagcggtggcgcggcctacctactgttggcaggtgccagttccctctcaccctcgcgaaagcagcacggggccccccagctggcgcagcgctacatgcggcaagaggaaaatccttcgggtgacctcggggggcatgtcccaaccaaacatgatactaggggtagcaactgccaag

SEQ ID NO: 2691 - DNA, 570 bp, unidentified
  source 1..570: mol_type = unassigned DNA; note = unclassified Picornaviridae sequence
agatgtgtataacacacaggcccccttttcccgaccggtttggcacaccgggcggttaccctgattagatgtctgggaattgctggacttcagtggctattgctgctgtcttctggcttttctgaactgggcatctagttgggttctttgccatccacactctaattcccattacgttttctctaccccttgattggtctaactggttaagtgactccttgcctgcttttgactattcttggtgctggtggacactctttccacaagtagatggtatggagttcatgctcgttctgaaccgggaatggcacaacccgtagtaggatcttgcctctgccatactcatctgcgactgttacttctagaccataggctatataggatgatcttggacctctttttgagcatcctggtcaagccaactgtgtcttgcaacatgcacgctggaaatcctcgctagaatgaaatcctgatggaggtggtgctgaaatattgcaagccacatcggctttcattctcttggtgccgctgtgttgctacacaccccatgtgggcaaatgttggacctat

SEQ ID NO: 2692 - DNA, 579 bp, Aichivirus A
  source 1..579: mol_type = genomic DNA
gccaggtcgcatcgcctggttggtgaccaaactgctagatgctcctccctttccctcggggttggcgcaccgccatccctgcatcctccccccagcctgacatgctacaggctgtgcaagaaccccgcgaaagctgccaccgtggcaattgtgggtccccctcttgtcaaggcacagagtctttctcccttaaggctagacccctctgtgaattcagaggcggcaactagttgtgccactacatgcctcagacctcggtcgcggagtgctgttccccaaaccctgacactgccgcgtgagtatgctgcttggcaagcattgcctggatggtcgttccgctggggctgccaggtctggtaacagaccgctccagtgtgcgtagaccatctccagcttcggctggtgctcacaaggtaagactcggtgtaaggttcatgtgccaacaccctggaatgagtgaaaactctactgccctaggaatgctacgcaggtacccctgctcccttgggagccagggatctgagcgtaggctaattgtctgtcgggtagtttcatttcccaccctctagactgttcacc

SEQ ID NO: 2693 - DNA, 581 bp, unidentified
  source 1..581: mol_type = unassigned DNA; note = unclassified Enterovirus sequence
ttgtgtttgagtgttgtatactgttattacggtaaccttatacgccagttttatatcccccttaccccaatgtaacttagaagtttgtacataccgaccaacagtaagcaatcatccagattgtttaaggtcaagcacttctgttaccccggtcagcgttgatatgctccaacagggcaaaaacagcaatgatcgttatccgcaagatgcctacacagagcctagtagcactctagaagaattctggttggtcgctcagttgcaaacccagcaatagacctggcagatgaggctggacgttccccactggcgacagtggtccagcctgcgtggctgcctgcacactcctttggagtgtgaagccttaatttggacagggtgcgaagagccgcgtgtgctcatcttgagtcctccggcccctgaatgcggctaaccttaaacctgcagccattgtttgcaatccagcaaatatgtggtcgtaatgagtaattgcgggatgggaccgactactttgggtgtccgtgtttcttttatttccatttgtatgcttatggtgacaatatatgatatatattgacacc

SEQ ID NO: 2694 - DNA, 584 bp, unidentified
  source 1..584: mol_type = unassigned DNA; note = unclassified Avihepatovirus sequence
ttcagctggtatggcatgcatgcatcgactgcttgggggtgtccctgacccccttaattcaacgtctagcccacgatacgggcaccctatccagtttatatccctttacctcccatggactgacttgtatggatttggatctaaattggattatcatttatttgtggtggttagccaaccatgctctggtgcaatgattccatgtattcatttggctaggtgccgacctaggaggtggtgctgaaatattgcaagccactggtgtcgttacttagcatctggatgcatggggttgattgcattctgtacagaggaaggctagcttatgccttgggctaatagtctttgttgtgaaacggattaccggtagtagcatcttagaccaccaaggttataggtgagtgtgtggtctagagtaggcacacatctgtccaggcacatgtacattgttacaactgctccagactagttcctgagggacagatgttgtggggggcttgggaaaacccccttaacctacactgcctgatcgggtcgcggctggtcgagtcccacacactataataccagtagaccttcatgca

SEQ ID NO: 2695 - DNA, 584 bp, Parechovirus B
  source 1..584: mol_type = genomic DNA
ggtcgaagccgcttggaataagactggtgctgttcacagtgtgttcacgatctatgcaacttctgtcttccatctgtgtctatgcaggtggataagggctgtacccgggcggtcctactctccacaggggcctgcgtaggtggctttcacctctggacagcgcaccccaccccgcctactgagtgaagggcatacggcttttctattgcgaattgtattgaagtttaggattaggtgtagcgaccacatgtgtgccagcggatctcccctggtggtaacaccagcctctgggcccaaaaggcatgtctctgaccacacatgtgcacaaccccagtgataatcctttttagtaaatgcttagtaacagtggattagcagtgctcctcaagctcagtagggcttaggtatggcaggttgaaggatgccctggaggtacccgcaggtaacgataagttcactgtggatctgaccaggggcccaccgggaattccccgggtagaagccttcgggccttgggttaaaaaacgtctagacctgtcccccagagggatctggggtttcccttttaaccccaattattcaat

SEQ ID NO: 2696 - DNA, 587 bp, unidentified
  source 1..587: mol_type = unassigned DNA; note = unclassified Picornaviridae sequence
caatagggtaacctattgtaacttggacttattactttatcatatagtttattgtttaaatcggaactagtgtattatgtttaaataatatgtgttagcctttaaactttattctattatttgataaggttcaataagtttgtatgactagatccagtaactattgctcaattttaaaacaatcttaaaaatctgtatgaaacgcagatcaatttaatattttagaactacccgtatttatataggctcttctaaaatatgaattgttatcgaaagataccttattattggttgattaatttcttaatgtgcatggtggcacctttaataagtagatttccgtcattctctatttagagtacttttggacgttaactaatgctccattcagtctagaatgtatgataattaaactctagattgtataaactatcattatcgcaagtaccacatcaaataaaacttatgaaaaaccgcaattactcgatgataactttgctcctgatgttagtgatattactaatactaactttctcgaggaaagggtagtcgaaactagggaagcatatccatcaacatctcttact

SEQ ID NO: 2697 - DNA, 591 bp, Sakobuvirus A
  source 1..591: mol_type = genomic DNA
tcacgcgcttttccggtggtcacccaccgttagggagcgccagcgttcgcgcttccgctaccaggtgacacactcctttcccctcccccattcccgttcccatcctctggactggtttctcctcacgattgaccagcagctgggagctgttaccagacgttggacagtaagtcccggatgcactatagggctggtggctagtgcttggtaagcactcaacgccatacctaatgtgtacctcggcttgccctcctggtcgtggtgaccggctgtttctcttcccttggctctagacgggctggtgtcctaccaccaccgttgcatgcagacctccccctgcgcactcgaacgccctgtcccagcagggttagtatgtgctgtgcagatctgcatgtgacaccccatccactggtagagcaggaagttgccctagctaacgcggcaagtattactttccgctacacgtccttgagattcctcggacctctggaactagggtgactgtgggcttgggaaaacccaccttggtcctgtactgcctgatagggtcgcggctggccgaccagtggatgtagccagttgttttgggat

SEQ ID NO: 2698 - DNA, 593 bp, Foot-and-mouth disease virus
  source 1..593: mol_type = genomic DNA
acgaaacgcgccgttgcttggggaaaacttgtacaaacacgatccatgcaggtttccacaactgacacacaacgtgcaacttgaaaccccgcctggtctttccaggtctagaggggtgacactttgtactgtgattgactccacgctcggtccactggcgggtgttagtaacaggactgttgtttcgtagcggagcatgatggccgtgggactccccccttggtaacaaggacccacggggccgaaagccacgtccagacggacccatcatgtgtgcgaccccagcacggcaactttactgtgaaaaccactttaaggtgacactgatactggtactcaaccactggtgacgggctaaggatgcccttcaggtacctcgaggtaacacgcgacactcgggatctgagaaggggactgggacttctttaaaagtgcccagtttaaaaagcttctatgcctggataggcgaccggaggccggcgccttttcttttaccactactaaatttatgaatacaactgactgttttatcgctctactgcacgcttttagagagattaaagcacttttttcgtacacggacacaaggcaag

SEQ ID NO: 2699 - DNA, 593 bp, unidentified
  source 1..593: mol_type = unassigned DNA; note = unclassified Megrivirus sequence
acgatggcgtgacgaaccatcgtgcgtgactctgctaagtcgtctgtgcctctcgggcatgttgtggctccggctgcaacatgcttgggacattggatgggcggcttggtggggcttagtcaccccgtttaggactacccggtttgatttctttattggattttgggactggtccaccgacggactaattggtatctgcaaggactaacagcctcgttctgaaatgccctagccaaagggacgtagtaggatcttggtgttccccttgtagctctgccgaccatattagctagagctaggactgtgtaggatgttctagacctctttttgagcaatctaggacaagactccggatctagatgtgtacgctggataaggctcgaacactcccgcgcgttaggtggtgctgaaatattgcaagccgacgtgtgtgtagagttagtagaagcccgccgctacatcgaaatccgccccttccggggttagtagagtacctgcatggatgtgtggttgggaatccacaccagtgcctagtgctggttgacagacccgcggctggtcgagttaatatggtataaccagttgatttggca

SEQ ID NO: 2700 - DNA, 610 bp, unidentified
  source 1..610: mol_type = unassigned DNA; note = unclassified Enterovirus sequence
ttaaaactgggcatgggttgaccccacccatgccacccaagtggtgtagtgctcttgtatttcggtacatttgcacgccagtttgccaccccttaccccaagtaacttagaagcatgtaactttgatcaatagggagtggtaagccataccacttgagatcaagcacttctgtttccccggctctagaggaatagaccttgcaaagggttgaagccacgaaagtcgttatccgcacacatactacgcaaagcttagtatttccttgaaagctcgccggttggtcactccgttaataccccattaacagacctggcagatgaggcaggaaactccccactggcgacagtgttcctgcctgcgtggctgcctgcacaccctctcgggtgtgaagccgactagtggacaaggtgagaagagccccgtgtgctatgtgtgagtcctccggcccctgaatgcggctaatccaaccccacatctgtcgcacacaatccagtgtgtaggcagtcgtaacgggcaactgtgggacggaaccgactactttgggtgtccgtgtttcctttatttcttttatgaatgcttatggtgacaatatcgagtaatattgttacc

SEQ ID NO: 2701 - DNA, 611 bp, unidentified
  source 1..611: mol_type = unassigned DNA; note = unclassified Enterovirus sequence
ttaaaactgggttgtggttgttcccaccacaatcacctacgtggtgttgtagtcttgcatttcggtgcatttctatgccagttttatctccccagcccccgtaacttagaagaaaagaacacagaccaataggaggtggtcacccagaccacttacggtcaagcacttctgtttccccggttgatctagatatgctttacccgaggcaaaaactaaatcaatcgttatccgcaaagtgcctacgggaagcctagtagcactctgaaagcctatggctggtcgctccattgcaaacccagcaatagacctggcagatgaggctagacgtaccccaccagcgatggtggtctagcctgcgtggctgcctgcacaccctcatcgggtgtgaagccagaaagtggacagggtgtgaagagcctactgtgctcactttgagtcctccggcccctgaatgtggctaatcctaaccctgcagctgttgcacacaagccagtgtgtatgcagtcgtaacgagcaattgcgggatggaaccaactactttgggtgtccgtgtttctctttattccttatgttgacctatggtgacaagtgtgcaattcacgtttgtcact

SEQ ID NO: 2702 - DNA, 613 bp, Rhinovirus A
  source 1..613: mol_type = genomic DNA
ttaaaactggatctgggttgttcccacctagatcacctacagggtgtagtacactgttattacggtaactttgtacgccagttttatatcccctccccgatgtaacttagaagcaagcacaaacgtccaataggcggtgattatccaaatcacttacggacaagcacttctgtctccccggcaactgctgatatgctccaacagggcaaaaacagcggaagtcgtcatccgcaaaatgcctacgcaaagcctagtatcactctagaaggtgtgtggttggtcgctcagccgtgaacctgacggtagacctggcagatgaggctagaaataccccactggcgacagtgttctagcctgcgtggctgcctgcacaccctcacgggtgtgaagccattcattggacagggtgagaagagcccagtgtgctcattttgagtcctccggcccctgaatgtggctaaccttaaacctgcagccaatgcacacaacccagtgtgtatttggtcgtaacgagcaattgcgggatgggaccaactactttgggtgtccgtgtttctttttattcttatcatattgcctatggtgacaatatatactgttatatattgttatc

SEQ ID NO: 2703 - DNA, 615 bp, unidentified
  source 1..615: mol_type = unassigned DNA; note = Porcine pegivirus strain ND/33/2017 polyprotein gene, complete cds.1 sequence
ccgctacccccccagcccgtgtaccggccctcgggccgcacgggatggggggggtagcgggggccggaggcccccgcgttctagaatggtgtgatcggttgccgctccagcggaaagcgggcgggatctagtggttagggttgttcgcgtaaatcccacactagtggtacgctcgtataacgtgggagcagccgggggggtcggccccccccctggcagctgctgagcaccggacgaagcgcggggggtgaacgctaacccgcagcccgggatgccaacgttaggcacgtcttggctggaagacgttaaacacagggccctccctcaaccccgatccgagaccagagttcaaggtacgccgcccttttaaaggcgttactcgtccaataggtctctccggcgggttgtcaaaccttgctggttccggtgacggttacgaggcagggcggggtggggatttaaacccccatccggcacgggggtaccaagctcggcacgcccagcacgcgtggcgtaggggaaaaatcctgcgggtgacccctggtaccataaagtaattaacatgagcatgccgctagggtgtgctttttccttccttgggaaggcggtggcacc

SEQ ID NO: 2704 - DNA, 615 bp, Rhinovirus A
  source 1..615: mol_type = genomic DNA
ttaaaactgggtcgtggttgttcccaccacgactatctacggatgtagtgctcttgtattccggtacgcttgcacgccagttttgtcacccccccctacattgtaacttagaagattaacacaaagaccaataggcggcaatgaaccacattgtcaacggtcaagcacttctgtttccccggtcaatctagatatgctttaccaaaggcaaaaactggagcgatcgttatccgcaaggtgcctacgggaaacccagtagcattctttatttgatctggttggttgctcagccgttaaacccaaacggtaaacctggcagatgaggctggaagatccccaccagcgatggtgttccagcctgcgtggctgcctgcacacccgaaagggtgtgaagccttttcaaagacagggtgcgaagagtctactgtgctcaccttgattcctccggcccctgaatgtggctaatcctaaccccgtagctgtggtgtgcaatccagcacattcgcagtcgtaatgggtaactgcgggatggaaccaactactttgggtgtccgtgtttctctttttccttttatatatgcttatggtgacaattatacggatatagttgtcatc

SEQ ID NO: 2705 - DNA, 615 bp, Rhinovirus C
  source 1..615: mol_type = genomic DNA
ttaaaactgggctcgggttgtacccacccgagctgcccatgtggcgtggtgctcttgtatcccggtacacttgcacgccagtttgcctctccttaccccgtaacatatctagaagaatgtgcataacggaccaataggtggtggcaacccatgccactgacggtcaagtacttctgtttccccggtgtgatgtggaatagactctctcagggttgaagccataagcatcgttatccgctacgtgcctacgcaaaacctagtagcattttgaagcttacttggttggccgctcagccactaacccgtggtaggcctggcagatgaggctgggcgcaccccactggcgacagtggcccagcctgcgtggctgcctgcccctctttgaggggaagccatttaagtgacaaggtgtgaagagtctcgtgtgctccacgtagaatccttccggcccctgaatgtggctaatcctaaccccgcagctattgcacacaatccagtgtgttgatagtcgtaatgggcaactgtgggatggaaccaactactttgggtgtccgtgtttcctgttttctttaaatacttgcttatggtgacaaatagtgtatactgtttgacacc

SEQ ID NO: 2706 - DNA, 616 bp, Pegivirus E
  source 1..616: mol_type = genomic DNA
gacgcgcatcccgggtgaaagccccgggcgtacgacctggttcgggatgattcccgttctcagtgcggaggccccgcaaaccgagccgccctgtaggcaacttctagaatggggagttaactcctggcactggcccgaagcatgaactgatcgcggtggcagggttcttcgggtaaatcccggccgcgtgttgtgattgtgttagggcaggtgacagtcggcagggtcgaccccctgcttcaggaccactgtcttcctggacgaccgttgctgaaaaagggccgccacggtctgtagctcgccgacgcttctaattcaggccggaggaccacgctccgtaatcgagcccaagtactcaaaccccagcacccctgggtcacgccctacgccgcccttttaacgcttcggctaatagggtctatccggcgggttgacaaagggcgcagggttacctggtactacgagcttgggtgtccctgggagtaatcccagggtgccatgctgcagcgcaggcgggcgagggtggtgcctcggcctaggggaagagcgcaagtgaccccgtgctgcataaatcccccccctttttttctacatgggtgttccatgtgccgccaag

SEQ ID NO: 2707 - DNA, 617 bp, unidentified
  source 1..617: mol_type = unassigned DNA; note = unclassified Pegivirus sequence
ggctccccccccacctcgcgcggcccgagggccgatacgcgggttgggggggtagcgggggccggaggcccccgcgttctagaatggtgtgatccgtcgccgctccagcggaaagcgggcgggatctagtggttagggttgttcgcgtaaatcccacactagtggtacgctcgtataacgtgggagcagccgggggggtcgaccccccccctggcggctgctgagcaccggacgaagcgcggggggtgaacgctaacccgcggcccgggctgccaacgttaggcacgtcttggctggaagacgttaaacacagggccccccctcaaccctgatccgaggccagagaccaaggtacgccgcccttttaaaggcgttactcgtccaataggatctctccggcgggttgtcaaaccttgctggccctggtgatggttacgggagggggtggggcggggagtagaagccccgcccggcatgggggtaccaagctcggcacgcccagcacgcgtggcgtaggggaaaaatccttcgggtgacccctggtaccataaagtaattaacatgagcatgccgctagggtgtgctttttcttccttccttgggaaggcggtggcacc

SEQ ID NO: 2708 - DNA, 617 bp, Grusopivirus C
  source 1..617: mol_type = genomic DNA
gccccgacgagtcccgtgggatacctggtacgtgccaggaaaatcccacgggactcgtcggggctttacccctaatttcaacgttggtccacgaaacggccgttctttcttttttcttctattttcaatcttgactccgcactgatcttttggttctagacacaggcgcgtttggttatagagtaggatttggatatagttatgagagggttagccaacccattctgaaccactttaagtatgtcaatctgaattcatcagtaatatagcacaggaggtggtgctgaaatattgcaagccactgttttatttatatgaagaattcaagaacctacttaaggtggtgatgaaaaggctaggtttatccatagtaatcccttgttctgaaaaggtaatgcacagtccttagtaggatcttgggctctgcaactggctctaaaccgaccaatctaggtagaggcactaggtgtaggacttgccatattgtattacaatctggtaccgacaaaatgtctggaaactccacactgagggtgataggggggggccccttcacagttgtgctactgcttgatagagttgcggctggtcaacttagattggtataaccagtagaa

SEQ ID NO: 2709 - DNA, 620 bp, unidentified
  source 1..620: mol_type = unassigned DNA; note = unclassified Aphthovirus sequence
taccgcccatcccggtgttaaagggtgtaaccacaagatgcaccttcgtcccggaagtaaaacggcaatttcacacagttttgcccgttttcacgagaaacgggacgtctgcgcacgaaacgcctgtcgcttgaggaggacttgtacaaacacgatctaagcaggcctccccaactgacacaaaccgtgcaatttggaactccgcctggtctttcctggtctagaggggtgacactttgtactgtgtttggctccacgctcggtccactggcgagtgttagtaacagcaccgttgcttcgtagcggagcatgatggccgtgggaactcctccttggtaacaaggacccacggggccgaaagccacgtccaatcggacccatcatgtgtgcaaccccagcacagcaacttttctgcgaaactcacttcaaggtgacactgatactggtactcaaacactggtgacaggctaaggatgcccttcaggtaccccgaggtaacacgcgtcactcgggatctgagaaggggactggggcttctataaaagcgtccaggttaaaaagcttctatgcctgaataggtgaccggaggccggcaccttttctttacagccactgacttt

SEQ ID NO: 2710 - DNA, 622 bp, Enterovirus C
  source 1..622: mol_type = genomic DNA
ggacgtcagtacaccggcattgcggtgcccttgtatgcctgttttatattccccccctgtaactctagaagaaaatgaactctgagctcaacaggcgttacgtttccagcgtgactacgagcaagcacttctgtttccccggttgcgccctatatgctgtgtgaacggcagaaaggggcaaaatcgttatccgcttgactactgcgggacgcccagtatcaccatggattgatttgagagttgcgctcagcacatccccagtgtagcctgggccgatgaggctccgaattccccacgggcgaccgtgtcggagcctgcgttggcggcctaccctcgcctcacggtgagggacgctcacttcatgacatggtgcgaagagtctactgcgctagttaagattcctccggcccctgaatgtggctaatcctaaccactgatcctgtaagtacacgccagtgcccagcaggtcgtaatgcgcaagtcggtggcggaaccgactactttgggtgtccgtgtttcctttatttccttattgaatgtttatggtgacaattgttgagtacagttgttgccattattgcattctacaaacagtgaacaaaccacacaccaatatagcaca

SEQ ID NO: 2711 - DNA, 625 bp, unidentified
  source 1..625: mol_type = unassigned DNA; note = Eotetranychus kankitus picorna-like virus strain EKPLV.abc9,1 sequence
cctattgagaagtgaactttcattttctatacaaagtgctatatttcgagcgacagtgtaaaactaaacaatagtgtacataacttattactcaaaatatagttaagacaaaagtcctctggaccccagtccagaggatctttgtcttaactatattttgagtaataagttatgtacactattgtttagttttacactgtcgctcgaaatatagcactttgtatagaaaatgaaagttcacttctcaataggagtatgtacttagtagattatataacagctgattattattggctgaaataatccgtaataatcgtaagtcgattatataagactacacgctcattttgtggttatttcaaatttaacaacttttgaaaccactttcattttaagatgtgtgttctatttatctagacgcatattcatattcacttgtttagtaatttcaccctactaaactcgtattcacgatacgtattttccagaattagtttactaatgagattatacgcattaacattttcgttagacttttgatacatacaaatctaacccttgtttggtaggcaagtacaacctactggtttcccgagacctatgaggggcccaataaatatgaaag

SEQ ID NO: 2712 - DNA, 625 bp, Enterovirus A
  source 1..625: mol_type = genomic DNA
gctctgcagatatcaatagcaggcatggcgcgccagtcatgtctagatcaagcacttctgtctccccggatcgagtatcaatagactgctagcgcggttgaaggagaaaacgtccgttacccggctaactacttcgagaaacttagtagcatcattgaagctgcggagtgtttcgctcagcactcccccagtgtagatcaggtcgatgagtcactgcactccccacgggcgaccgtggcagtgactgcgttggcggcctgcctatggggcaacccataggacgctctaaagtggacatggtgcgaagagtctattgagctagttagtagtcctccggcccctgaatgcggctaatcctaactgcggagcacatgccctcaacccagggggtggtgtgtcgtaacgggcaactctgcagcggaaccgactactttgggtgtccgtgtttctttttattcttatattggctgcttatggtgacaattgagagattgttaccatatagctattggattggccatccggtaaccaacagagctattgtttacctgtttgttggatacgtccctctcaatttcaaagtcattaaaactcttgattatatattactcctcaactgtgagaa

SEQ ID NO: 2713 - DNA, 627 bp, Avihepatovirus A
  source 1..627: mol_type = genomic DNA
tatgaaagtaactggaaactgggaggatttcagggggaggtaaaaaaggtatgacaagggtgcatcgactgcttgggggtgtgcctgacccccctaattcaacgtctagcccacgatacgggcaccctatccaatttgtatccctttacctcctatggacagacttgtatggatttggatctaaattggattatcctttatttgtggtggttagccaaccatgctctggtgtaatgattccatctgttcatctggttaagtgccgacctaggaggtggtgctgaaatattgcaagccactagtatcgttacgcttggcctctggatacgtgggattaattgcattctgtacagaggaaggctagtctatgccttgggctaatggtctttgttgtgaaacggattaccggtagtagcatctcagactaccaaggttgtaggtgagtgtgtggtctagagtaggcacacatctgtccaggcacatgcacattgttgcgattgctccagactagttcctgagggacagatgttgtggggggcttgggaaaacccccttaacatacactgcctgatagggtcgcggctggtcgagttcccacacactataataccagtagattttcatgca

SEQ ID NO: 2714 - DNA, 630 bp, unidentified
  source 1..630: mol_type = unassigned DNA; note = unclassified Avihepatovirus sequence
ttttgaaagccgggtgcatgcatggccattttccagcacaggttcagctggtatggcatgcgtgcatcgactgcttgggggtgtccctgacccccttaattcaacgtctagcccacgatacgggcaccctatccaatttgtgtccctttacctcccatggattgacttgtattggatttggatctaaattggattaccctttgtttgtggtggttagccaaccatgctctggtgcaatggttccatgtgttcattctggccacgtgccaacctaggaggtggtgctgaaatatcgcaagccactagcgttattacacttggcctctggacacgtgggattaattgcattctgtacagaggaaggctagtctatgccttgggctaatggtcttcgttgtgaaacggattaccggtagtagcatcttagactaccaaggttgtaggtgagtgtgtggtctagagtaggcatacatctgtccaggcacatgtacattgctacgattgctccagactagttcctgagggacagatgttgtggggggcttgggaaaacccccttaacctacactgcctgatagggtcgcggctggtcgagtcccacacactataataccagtagattttcatgca

SEQ ID NO: 2715 - DNA, 633 bp, unidentified
  source 1..633: mol_type = unassigned DNA; note = unclassified Enterovirus sequence
ttaaaacagcgggtgggtatcccaccacccgacccactgggtgtggtacactggtactttgtacctttgtatgcctgtttgcatcccttttcccttcacctaacatcctcccccaaagtatattttgcggtaacgttagaagaagtgaactcagtgcaacaggaagtatcaccaccagtgatataacgcacaagcaattcttgttccccggagctggatatagactgctaacgtggtcaaaagtccttaaccgttatccgccagctaactgcgagaagactagtaacatcatgcacatttctagacgttcgatcaggtgaataccccattcactagtttggtcgatgaggctgagagttccccacaggtgactgtgtctcagcctgcgtggcggccaacccgacttatgtcgggacgcctattaatggacatggtgtgaagatcctattgcgcttagctgtgagtcctccggcccctgaatgcggctaaccttaaccccggagccttgtggtgcaaaccagcatttgcaaggtcgtaatgagcaattctgggatgggaccgactactttgggtgtccgtgtttcctttattcttattatttgtgtttcatggttacaagcatagtttgtaatc

SEQ ID NO: 2716 - DNA, 636 bp, unidentified
  source 1..636: mol_type = unassigned DNA; note = unclassified Megrivirus sequence
ttcccgaccggtctggcaaaccggacggttatcctggttagatgtctgatggttgctggaacgtggtggctattgctgccaccttctggcttcctttattgggcatctagctgggtcctttgccatattccatctaactctcttcccattttctattacccaggcttgttgtaactggtaagttgactcactggcttcgttttgagactactctggtgctggtggacactctttccacaagtggattgtatggagttcatgctcgttctgaaccgggaatggcacaacccgtagtaggatcttgcctctgccataccaatctgcgcctgttgcttctagactatgggctgctaaggatgatcttggaactcctttttggatattccggttcaagtcaactgtttcatctggtgcacgctggaaatcctcgtttctaggtcttgtctggaggtggtgctgaaatattgcaagccacggatggttcctaggacctggtgccgctatcagatggtacaccctctatgggcaaatgttgaaccttagtggacgcgtgagatgggaatccacgccggccatagactggctgataagctcgcggctgatcgagttgcaacagtaatcagttgatttgccact

SEQ ID NO: 2717 - DNA, 642 bp, unidentified
  source 1..642: mol_type = unassigned DNA; note = unclassified Megrivirus sequence
ttcccgaccggtctggcaaaccggacggttatcctggttagatgtctgatggttgctggaacgtggtggctattgctgccatcttctggctgcctttattgggcattctagctgggttctttgccaaaattcccatcttattcttattcccattttccttacccaggcttatttacaactggtaagttgacccactggttttgttcttggacttctctggtgttggtggacactctttccacaagtaagtattgtggagttcatgctcgttctgaaccgggaatggcacaacccgtagtaggatcttgcctctgccacatttacttgcgcctgttgcttctagactatgggctgctaaggatgaccgcagacccctttttgggcaatctgtgtcaagtctactgcttcgtctggtgtacgctggaaatccctgttctggatgcctatgcttggaggtggtgctgaaatattgcaagccacaagcatacctctggactcggtgccgctaccaggtgttgcaccccttgtgggcaaacgtagaaccttggtggacgcgtgagatgggaatccacgcctggccatagactggctgataagctcgcggctgatcgagttgcaacagtaatcagttgatttgccact

SEQ ID NO: 2718 - DNA, 643 bp, Oscivirus A
  source 1..643: mol_type = genomic DNA
gaaagggggcccggcggggcaatacccgtcggtccctctttccgtccaagccgcggacgttaaattgtggcacggttgtgcttaggcgcaaccctgctactaatggcggtatccctgcccttagtatgcatgtttgtatgaatggaatctgtagtgatgccccgctttggggtctcagaaacacactacagtgacggctagagttcctctactccggctaccttagtagcgagcattggaagtatattgtgaacagggttccacgcccgataaaggctgatattcccgctcatggagtggacctaggtaactagggccatgagtgtgtgtgaatcagcacccgcaagggataacagtatatggaaggtgctcgtgaaacggcaagtggagttagcagcagctctcagcctcaaggtcagcttctagacatgtgccgcaggtaccccgcaagggatctgagcggtagctaattagtccctggaagttggctgactttcttcttatttctttcttattgtgaattgtgtgcattggcattctttagagtttgggagttgtcttctattggatttatatcttactctgtatcacactcaatcacggctctttggtcagttaagaaaaccatttatagagtaataaa

SEQ ID NO: 2719 - DNA, 646 bp, Oscivirus A
  source 1..646: mol_type = genomic DNA
gaaagggggcccggcggggcaacacccgtcggtccctctttccgtccaagccgcggacgttaaactgtggcacggttgtgcctaggtgcaaccctgctactaatggcggtacccctgcccttagtatgcatgtttgtatgaatggaatctgtagtgatgccctgctttggggtctctaaaacacactacagtgatggctagagctcctctactccggctaccttagtagtgagcattggaagtatattgtgaacagggttccacgcccgataaaggctggtattcccgctcatggagtggacctaggtaactagggccatgagtgtgtgtgaatcagcacccgcaagggatagcagtatatggaaggtgctcgtgaaacggcaagtggagttagtagcagctctcagtctcaaggtcagcttctagacatgtgccgcaggtaccccgtaagggatctgagcggtagctaattagtccctggaggttggctgactttcttcctatttctcttttcactgcgaattgtgtggattggtattctttagagcttgggagttgtctcatattgaattcatatattttactctatactacactcaaacacggctctctggtcagttaagaaaatcatttatagaataataaa

SEQ ID NO: 2720 - DNA, 651 bp, unidentified
  source 1..651: mol_type = unassigned DNA; note = unclassified Picornaviridae sequence
cggcctcttttcccgaccggtctggcaaaccggacggttatcctggttagatgtctgatgattgctggaacatggtggctatagctgccatcttttggctttctctattgggcatctagctgggttctttgctaatcttccatcttactcttatccccattttctattacccaggattgttcgtaactggtaagttgactaactggctatgttttctggctcttctggtgctggtggacactcttttccacaagtaggttatgtggagttcatgctcgttctgaaccgggaatggcacaacccgtagtaggatcttgcctctgccacatatacttgcgcctgttgcttctagactatgggctgctaaggatggctacggacctctttttgagtaatccgtgccaagtcaactgtttcactctgatgtacgctggaaatccttgttttggatgttatgtccggaggtggtgctgaaatattgcaagccacggacattcttctgaacctggtgccgctatcaggtgttacaccccttgagggcaaatgttgaaccttagtggacgcgtgagatgggaatccacgcctggccatagactggctgataagctcgcggctgatcgagttgcaacagtaatcagttgatttgccact

SEQ ID NO: 2721 - DNA, 652 bp, Avihepatovirus A
  source 1..652: mol_type = genomic DNA
tttgaaagccgctgtggtgtagaccattttctggcgcttggctcagccagtatggtctcaccacagtctgcttggggttattcccaaaccccttaattcaacgcctagtcctatcaatataggaccccctatccacttattttacctttaccctccattatatagtctgtttcctggctattgactttggcttttgtttttgacctacgtctaagtctcaatggattttgtagtggttagcctaccaccccttggccactaatttttggctctctgtttggggacccaccacatcttggaggtggtgctgaaatattgcaagccacttgatatgtgtgtgtcctccagacatgaagctttgatgcagtggttttggacaaggaaaggctagtgtttggtctgggcacaaacccttgttgtgaaacggattaccggtagtagcatctagtggttccagtccataacatgagtgtatggtctagagtggacacagcttggatacagacaccttcagtattactgggtgttccagactagttcctgaggtaccaagttgtgaggggctatgggaaaacccctttgatccacactgcctgatagggtcgcggctggtcgagtcccatacactataataccagttgattttcatgca

SEQ ID NO: 2722 - DNA, 653 bp, Avihepatovirus A
  source 1..653: mol_type = genomic DNA
gaaagcggccactgtgtagccattttctagcgcttggtacagctagtatggttacacagtgtgcgtcagcttggggccattcccaggccccttaattcaacgcctagctctggcgatacagagccccctatccaattctatgtcccttatcctccacaggttgattgtctttcttgttctgactcaactgcctgttgtattggacttctattggattacccttttgtatggatggttagccaaccatgctctggttactagccattctatggcaggtttggcttgatactggtggatggaggtggtgctgaaatattgcaagccacgtctcccattgtcaatccaacccatcatggaatgtagttggtaattcctgtacagaggaaggttagtgtataagagtgggtctaataccattgttgtgaaacggattaccggtagtagcatccttggtatccattcttatcatgagtgtgtggtctagagtagacatgtattctcacaggtgcatgcagcattgctgagcactccagactagttcctgaggtgggaaatacatggggggcactgggaaaacccccttgatctacactgcctgatagggtcgcggctggtcgagtcccacacactataaaccagttgatttgcatgca

SEQ ID NO: 2723 - DNA, 654 bp, unidentified
  source 1..654: mol_type = unassigned DNA; note = unclassified Sicinivirus sequence
tgcaacccccactagtactcgtgcacatccaatggtgattctgccctggcagcatctaagtgcccagggagctcaactggtaacagttgccctggggcccaaaaggctaggtggcaaggacctggtcaagtaaggggttcccaccccgagctgaacccgcggtcctgaagctaccctttagatggaggtttcgcacccgattgccattctttttgcctgaagaacctggctggaaacatttagcccacggatttgctggtttgtggtgattagtagaccccctggaggtacccgttttggatctgaccagggacccgtgactatgccgttccggtaatccgggtttaaaaccatgaacgtcaccacctatcttcttttccttgctttgaattcttttatctgagagtagtgaacgagtgttgatgttccctgacttttgcatttggtctgcattctcagttatacggtttgactgggctgggttgtttatttagatgtttctagagtctctgttggtagctattacacttgttatagtagttgcttcccccagtgagcttcatcagttatttactatttgtgtttataatttcgccttaatcttcctctggctggttgaaatcctagagcttcctaattaccctgccatccaac

SEQ ID NO: 2724 - DNA, 654 bp, unidentified
  source 1..654: mol_type = unassigned DNA; note = unclassified Hepatovirus sequence
gtttttcccggacccctctttggacaaccttggtggggggttgtaaattaccccaccctcgtttgcctagagtttaggctaaattccctatagtaccctttatatgtaaatatcaattcctgcaggttcaggtttcttgaatgtgtctctctttaagagcactcattttactctcagaatttctctagagtccagacacttgagggctctttttctcctgcactatcatctcgattccgggctctcgtggtgccaatggaacgaccgatgcgcacgtcggggttaacccacagattagctgtgggctgtagttgctaaaagccacgatctctgaatgccctctttgaatgggggtggtattaactgaacacatgaaaccacattgatcttgctgggagggtaggctacgggtgaaaccctccatattaatactcatattgagagatatatctggtaggctaatgttggcggataaggctgagtttcacgacaaaaagccttcaacgcctgtggaacaggtctcaccagcagcatgccttgtggcgtagtgtgctagggccatcttcatttcaggtgggagctaggagactctccccgtaagggttggaggggtagttcaggtgcatttaggtttttccacattcaataaaaaca

SEQ ID NO: 2725 - DNA, 657 bp, unidentified
  source 1..657: mol_type = unassigned DNA; note = unclassified Megrivirus sequence
tttctgaaggcctcttttcccgaccggtttggcgcaccggacggtcatcctggttagatgtctgatggttgctggaacgtggtggctattgctgccaccttctggcttcctctattgggcatctagctgggtcctttgccacattccatctcactctttacccattttctattacccaggcttgattgtaactggtaagtttgacccactggcaatgttcttaagaccattctggtgttggtggacactctttccacaagtaggttacgtggagttcatgctcgttctgaaccgggaatggcacaacccgtagtaggatcttgcctctgccatgctaatctgcgcctgttgcttctagactatgggctgctaaggatgatgttgggactcctttttggatatctcatatcaagtcaactgtttcatctaatgtacgctggaaatccttgtctcagggttctatctggaggtggtgctgaaatattgcaagccacagatgaatcttgcggcatggtgccgctattggatgttacaccctttattgggcaaatgttgaaccttagtggacgcgtgagatgggaatccacgcctggccatagactggctgataagctcgcggctgatcgagttgcaacagtaatcagttgacttgccacc

SEQ ID NO: 2726 - DNA, 662 bp, Megrivirus C
  source 1..662: mol_type = genomic DNA
gtgtgtttctgaagggcctcttttcccgaccggtttggcacaccggacggttatcctggttagatgtctgatggttgctggaacgtggtggctgttgctgccaccttttggcttcctctattgggcatctagctgggtcctttgccacatcccatcttattctttacccattttctactacccaggcttgcctgaaactggtaagttgacctattgaccatgtttttggactactcttggtgctggtggacactctttccacaagtaggttgcatggagttcatgctcgttctgaaccgggaatggcacaacccgtagtaggatcttgcctctgccatgttgatctgcgcctgttgcttctagactatgggctgctaaggatgatgttgagactcctttttggatatctcatatcaagtcaactgtttcatctggtgtacgctggagatccttgtcgtgaggctgtatctggaggtggtgctgaaatattgcaagccacagatcagtcttgtaacatggtgccgctatcaggtgttacaccctctactgggcaaatgttgaaccttagtggacgcgtgagatgggaatccacgcctggccatagactggctgataagctcgcggctgatcgagttgcaacagtaatcagttgatttgccact

SEQ ID NO: 2727 - DNA, 663 bp, unidentified
  source 1..663: mol_type = unassigned DNA; note = unclassified Picornaviridae sequence
gggggctctcccccacggcctcttttcccgaccggtctggcaaaccggacggttatcctggttaggtgtccgatggatgctggaacggggtggctatagctgcctccttctggcttcctttattgggcattctagctgggccctttgccaaaattccatcttaatcttaaacccattttctatacccaggcttgcttgtaactggtaagttgacccactggcttgtcttaagactattctggtgttggtggacactccttccacaagtaagtattgtggagttcatgctcgttctgaaccgggaatggcacaccccgtagtaggatcttgcctctgccacatatacttgcgcctgttgcttctagactatgggctactaaggatgactacggacccctttttgggtaatctgtgtcaagtctactgtatcatctggtgtacgctggaaatccttgttctggaaactgcgtctggaggtggtgctgaaatattgcaagccacagatgcatttctggtcttggtgccgctactaggtgttacaccccctgtgggcaaatgtagaaccttggtggacgcgtgagatgggaatccacgcctggccatagactggctgataagctcgcggctgatcgagttgcaacagtaatcagttgatttgccact

SEQ ID NO: 2728 - DNA, 663 bp, unidentified
  source 1..663: mol_type = unassigned DNA; note = unclassified Megrivirus sequence
gtgtgtttctgaaggcctcttttcccgaccggtttggcacaccggacggttatcctggttagatgtctgatggttgctggaacgtggtggctattgctgccaccttttggcttcctatattgggcatctagctgggtcctttgccacattccatcttactcttttacccactattctattacccaggcttgatcgtaaccggcaagtttgacccaccggctatgttctaagactattctggtgttggtggacactctctccacaagtagattgcatggagttcatgctcgttctgaaccgggaatggcacaacccgtagtaggatcttgcctctgccatgttgatctgcgcctgttgcttctagactatgggctgctaaggatgatgttgggactcctttttggatatctcatatcaagtcaactgttccatctgatgtacgctggaaatccttgtcccagggttgtatctggaggtggtgctgaaatattgcaagccacggattaaccttgcgacatggtgccgctatcaggtgttacaccctctatcgggcaaatgttgaaccttagtggacgcgtgagatgggaatccacgcctggccatagactggctgataagctcgcggctgatcgagttgcaacagtaatcagttgatttgccact

SEQ ID NO: 2729 - DNA, 664 bp, unidentified
  source 1..664: mol_type = unassigned DNA; note = unclassified Picornaviridae sequence
agatgtagacatctaaccaggataaccgtccggtgtgccacaccggacggttatcctggttagatgtctgggaactgctggacttcagtggctattgctgctgacttctggctcttctgaactgggcatctagctgggtcctttgccacccataccctatctcccgttatattctctttgcccttggactgttgtaactggttaagagaccctccgcatgttttgtctatgactattctggtgctggtggacactctttccacaagtggatgatgtggagttcatgctcgttctgaaccgggaatggcacaacccgtagtaggatcttgcctctgccatactcatctgcgactgttacttctagaccataggctgtgtaggatgactatggacctctttttgagtatcctggtcaagccaactgtgtttataacacgtacgctggatatccttgttagggtggaatttcagtggaggtggtgctgaaatattgcaagccacattggattttaccctcttggtgccgctgtgttattacgcaccccttgtgggcaaatgttggacctacatggacacgtgtgatgggaatccacgtctctgctatggactggctgataagctcgcggctgatcgagttgtaacagtaatcagttgaaaagccact

SEQ ID NO: 2730 - DNA, 668 bp, Mischivirus D
  source 1..668: mol_type = genomic DNA
ttatttttcaaaatgccactggcattacaccatattcgtatggtgtaatgtcagtggttggatgcccagtcctgagggactgtgcatccagtggttaagagccacactctttatttatcaactattgatctttgtaactaagaaatgtaccagagttctattatggctccaaacccattggggtctagaacaagcacttctgttaccccggtcattattggctgttaggatgtacccacgtctgaaggccaagaagatcgttacccggctgttgtctacgggaagactagtaacttttgttgaaaggtaatctcattgatccgggtggcaaccccagtcacccagaaactagtgatgagtgtccacattcctcctatggtaacatagggtggtcgctgcgctggcactagggccttaaggcatgagagaaccaagacacaactgtgaagatccgactgtgcacttcagtattcctccggcccctgaatgcggctaatcctaacccacttgcacacgctcgcaacccagtgagtggtgtgtcgtaatgcgcaagaagtggacggaaccgactactttgggtgtccgtgtttctttttttatttaccaagtctcttatggtcacaagcattagaaacaagatgcctgtgatcactcgcgagacctccaac

SEQ ID NO: 2731 - DNA, 670 bp, unidentified
  source 1..670: mol_type = unassigned DNA; note = Human rhinovirus A strain HRV-A76_p1194_sR844_2008 polyprotein1 sequence
cttcacacccgttaaggtgtgcaggcagccacgcaggctaggacactgttaccagtggggaactcctagcctcatcccacctggatctcctacaaggagttgtactctattattgcggtaattttgtacgccagttttatctcccctccccaatatgtaacttagaagctgaacacaaagaccaataggcgacatttaatccaaaatgtcaaaggtcaagcacttctgtttccccggctaaagctgatatgctccaacagggcaaaaacagttgcggtcgttatccgcaaagcaactacgcaaagcctagtatcaccttctagagcatatgactggtcgctccactataaacccaatagtagacctggcagatgaggctaggagttccccactggtaacagtgtcctagcctgcgtggctgcctgcacaccttaacgggtgtgaagccatatgtttgacaaggtgtgtgagccccgtgtgcttgctttgagtcctccggcccctgaatgtggctaaccttaaccctgcagctagtgcacacaatccagtgtgtggctagtcgtaatgagcaattgcgggacgggaccaactactttgggtgtccgtgtttcttgtttttccttatatttgcttatggtgacaatatatatataacatatatattggcatc

SEQ ID NO: 2732 - DNA, 671 bp, unidentified
  source 1..671: mol_type = unassigned DNA; note = unclassified Picornaviridae sequence
gccgcaggggataacccctgcggaccccttttcccgaccggcttggcaaaccggacggttatcctggttagatgtctgggatttgctggactttagtggctatcgctgctatcttctggcttctctaaactgggcatctagctgggtcctttgccatccaattctttattcccatctatttttccacccatggactgatgtaactggctaagaaatcctctggttctcactttggccacgcacttgtgttggcggacactctttccgcaagtgaacagtgtggagttcatgctcgttctgaaccgggaatggcacaacccgtagtaggatcttgcctctgccacatcctgtttgcgactgttacttctagaccataggctgtgtaggatgactttggacctctttttgagtatccttgtcaagctaactgcaattacaacatgtacgctggaaatccttgtctgaaagtagatcctagtggaggtggtgctgaaatattgcaagccacactagattctctttccttggtgccgctgtgttgctttgcacccctagtgggcaaatgttagacctacatggacacgtgtgatgggaatccacgtcttggctatggactggctgataagcccgcggctgatcgagttgtaacagtaatcagttgaattgccacc

SEQ ID NO: 2733 - DNA, 672 bp, Foot-and-mouth disease virus
  source 1..672: mol_type = genomic DNA
ccccccctaagttctaccgtcgttcccgacgtaaagggatgtaaccacaagcttaccgcctttcccggcgttaaagggatgtaaccacaacgacttaccttcacccggaagtaaaacggcaacttcacacagttttgcccgttttcatgagaaacgggacgtctgcgcacgaaacgcgccgtcgcttgaggacttgtacaaacacgatctaagcaggtttccccaactgacacaaaccgtgcaatttgaaactccgcctgggctttccaggtctagaggggtgacactttgtactgtgtttgactccacgctcgatccactggcgagtgttagtaacaacactgctgcttcgtagcggagcatgacggccgtgggaccccccccttggtaacaaggacccacggggccaaaagccacgtccgaatggacccgtcatgtgtgcaaacccagcacagtacctttgttgtgaaactcactttaaagtgacattgatactggtactcaagcactggtgacaggctaaggatgcccttcaggtaccccgaggtaacacgtgacactcgggatctgagaaggggaccggggcttctataaaagcgcccggtttaaaaagcttctatgtctgaataggtgaccggaggcaggcacctttcttttaattacactggactt

SEQ ID NO: 2734 - DNA, 673 bp, unidentified
  source 1..673: mol_type = unassigned DNA; note = unclassified Enterovirus sequence
ggcgcacaggtttccaagcagagtgtgggagcacatgaaaccatggtacaggaataaaaggaaacacggacacccaaagtagttgttcccactataaccacccacgtggtgttgtggacttgtatttcggtacacttccatgccagttttatctccccccctgcaacctttagaagacacgtactttcagaccaataggtggcggccatccaggtcgtcgacggtcaagcacttctgtctccccggtggtactggatacgctttacccaaggcgaaaaccgggcccatcgttatccgcaaagtgcctacgagaagcctattagcactctagaagcctatggttggtcgctccgctgcaaccccagcagtagacctggcagatggggctagacataccccaccagcgatggtggtctagcccgcgtggctgcctgcacaccctatgggtgtgaagccagaaagtggacagggtgtgaagagcctattgtgctcactttgagtcctccggcccctgaatgtggctaatcctaaccctgcagccgttgcacacagcccagtgtgtatgcggtcgtaacgagtaattgcgggatggaaccaactactttgggtgtccgtgtttccttttattcctttacttgcttatggtgacactgtatagttatacattgtcact

SEQ ID NO: 2735 - DNA, 675 bp, Foot-and-mouth disease virus
  source 1..675: mol_type = genomic DNA
aaccacaagtcttgcaccttcttgtccgaagttaaaggactgtaaccgcaagctttgaaccgcctttcccggcgttaaagggctgtgaccgcaagatagaccttcacccggaagtaaaacggcaactcccacagttttgcccgttttcatgagaaatgggacgtcagcgcgcgaaacgcgcagtcgcttgaggaggacttgtacaaacacgattcacgcaggttcccacaaccgacacaaaacgtgcaacttggaatcccgcctggtctttccaggtctagaggggtgacactttgtactgtgattgacaccacgctcggtccactggcgagtgttagtagtagtattgttgtttcgtagcggagcatggtggccgtgggaccccctccttggtaacaaggacccacggggccgaaagccacgtctcaggacccaccatgtgtgcaaccccagcacggcaaccttaccacgaaaaccactttaaggtgacactgaaactggtactcaaccactggtgacaggctaaggatgcccttcaggtaccccgaggtaacacgcgacactcgggatctgagaaggggactggggcctctgtaaaagcgcccagtttaaaaagcttctatgcctgaataggcgaccggaggccggcgcctttccttaactaccactgtttac

SEQ ID NO: 2736 - DNA, 675 bp, unidentified
  source 1..675: mol_type = unassigned DNA; note = unclassified Parechovirus sequence
cgtcgggccttataccccgacttgctgagcttctctaggagagtccctttcccagccctgaggcggctggtcaataaaagcctcaattgtaacaaacatctaagcttattacatataaccacaaccctggtccccaccagcttaaggcatcttgcaatacagtgggtggactcaggacgcttaaaggttgtagtacataatcttttctaatccaactatgttggagtggtggacagcgcaccataactctatcagtgagataccatgcttgtggaccttatgctcacacagctgtcctctagtcactaagtgtggaaactaatgaaatgtgggaacttagttgaagtacacacttgcttatgcaccaattagccagcggatcaacacccggcaacgggtgcccctggggccaaaagccaaggtttaacagaccctaattggttggttttaaaacctgagcgtgtacggatgctacttagtacctgtggatttggtaactgtgcttatactagttgtaaggccctcgaaggatgcccagaaggtacctgtaggtaacaagtgacactatagatctgatctggggccccatacttctctaaagtgatggggttaaaaaacgtctagagggccaaacccaggggggaccctggattccttttattttatttagacaat

SEQ ID NO: 2737 - DNA, 678 bp, unidentified
  source 1..678: mol_type = unassigned DNA; note = unclassified Aphthovirus sequence
actagtgattttaccgtcgttccccgacgtttgaagggaggaaaccacacgcttgcagcaccactcccggtgtcaacgggatgcaaccgcaagatggaccttcgcccggaagtaaaacggcagctttacacagttttgcccgttttcgtgagaaacgggacgtccgcgcacgaaacgcgccgtcgcttgaggaacacttgtacaaacacgatttaagcaggtttccacaactgataaaactcgtgcaacttgaaaccccgcctggtctttccaggtctagaggggtgacactttgtactgtgctcgactccacgcccggtccactggcgggtgttagtagcagcactgttgtttcgtagcggagcatggtggccgtgggaactcctccttggtgacaagggcccacggggccgaaagccacgtccagacggacccaccatgtgtgcaaccccagcacggcaacttttactgcgaacaccaccttaaggtgacactggtactggtactcggtcactggtgacaggctaaggatgcccttcaggtaccccgaggtaacacgggacactcgggatctgagaaggggattgggacttctttaaaagtgcccagtttaaaaagcttctacgcctgaataggcgaccggaggccggcgcctttccattacccactactaaatcc

SEQ ID NO: 2738 - DNA, 679 bp, Megrivirus C
  source 1..679: mol_type = genomic DNA
aaaaggggtccgtgggggttctcccccacggctccttttcccgaccggtctggcgaaccggacggttatcctggttagatgtctgatggttgctggaacgtggtggctatagctgccaccttctggcttcctctattgggcattctagctgggttctttgccaaaattccatcttactctttacccattttctctacccaggcttgcttgtaactggtaagttgacccactggctttagttcatgattattctggtgttggtggacactctttccacaagtaggtagtgtggagttcatgctcgttctgaaccgggaatggcacaacccgtagtaggatcttgcctctgccacacttacttgcgcctgttgcttctagactatgggctgctaaggatgactacggacctctttttgagcaatccgtgtcaagtcaactgtttcatctgatgtacgctggaaatccttgtttctggatgattgtatcctggaggtggtgctgaaatatctcaagccacaggtacgcttctggacttggtgccgctgtcaggtgttacaccccttgtgggcaaatgttgaaccttagtggacgcgtgagatgggaatccatgcctggccatagactggctgataagctcgcggctgatcgagttgcaacagtaatcagttgatttgccact

SEQ ID NO: 2739 - DNA, 682 bp, unidentified
  source 1..682: mol_type = unassigned DNA; note = Foot-and-mouth disease virus - type O O/JPN/2010-1/14c (CV_d1)1 sequence
gggaggtaaccacaagatttgcgccttcttgtccgaagttagagggctgtaaccgcaaactttgaaccgcctttcccagcgttaacgggatgtaatcacaagatggaccttcatccggaagtaaaacggcaacttacacagttttgcccgttttcatgagaaatgggacgtcagcgcacgaaacgcgcagtcgcttgaggaggacttgtacaaacacgtctcacacaggtacccacaaccgacacaaaacgtgcaacttgaaatcccgcctggtctttccaggtctagaggggtgacactttgtactgtgattgactccacgctcggcccactggcgagtgttagtagtagtactgttgcttcgtagcggagcatggtggccgtgggactccctccttggtaacaaggacccacggggccgaaagccacgtctcaggacccaccatgtgtgcaaccccagcacggcaactttaccacgaaaaccactttaaggtgacactgaaactggtactcaaccactggtgacaggctaaggatgcccttcaggtaccccgaggtaacacgcgacactcaggatctgagaaggggattggggcttctgtaaaagcgcccagtttaaaaagcttctatgcctgaataggcgaccggaggccggcgcctttccttaactattactgcttac

SEQ ID NO: 2740 - DNA, 682 bp, Enterovirus B
  source 1..682: mol_type = genomic DNA
cctgtgggttgttcccacccacagggcccactgggcgctagcacactggtatcacggtacccttgtgcgcctgttttaacccccctcccctcagaagtaacttagaagcataaatcaaacggtcaacaggtggcctagcgcaccagctgggtctagaccaagcacttctgtcaccccggactgagtatcaataggctgcttgcgcggctgaaggagaaaacgttcgttatccgaccagttacttcgggaaacctagtaccaccatggaagttgcgcagcgtttcgctccgcacacccccagtgtagatcaggtcgatgagtcaccgtatcccccacgggcgaccgtgacggtggctgcgttggcggcctgcccatggggtaacccatgggacgcttcaatactgacatggtgtgaagagtctactgagctaattggtagtcctccggcccctgaatgcggctaatcctaactgcggagcagacacccacaagccagtgggcggtctgtcgtaacgggtaactctgcagcggaaccgactactttgggtgtccgtgtttccttttattcttatactggctgcttatggtgacaattgaaaggttgttgccatatagctattggattggccatccggtgactaatagagcgattgtttacttgtttgttggtttcataccaaaa

SEQ ID NO: 2741 - DNA, 683 bp, unidentified
  source 1..683: mol_type = unassigned DNA; note = unclassified Megrivirus sequence
gaaaagaggccgtgggggataacccccacggaccccttttcccgaccggtttggcaaaccggacggttatcctgattagatgtctgatggttgctggaatgtggtggctactgctgccaccttttggcttcctctattgggcatctagttgggtcctttgccattttcccatcttactctttttaacccatcttctaccccaggcatgcttgtaactggtaagttgacccacttggctctgattcatgattctgtttggtgctggtggacactctttccacaagtagattgtgtggagtccatgctcgttctgaaccgggaatggcacaacccgtagtaggatcttgcctctgccacattacatctgcgcctgttgcttctagactatgggctgctaaggatggtttggacccctttttgggtaatccaaatcaagtcaactgtttcatccaatgtacgctggaaatccttgttactgggtgtttacaactggaggtggtgctgaaatattgcaagccacagttgtgcacctagtcctggtgccgctattgggtgttacaccctttgatgggcaaatgttgaaccttagtggacgcgtgagatgggaatccacgcctggccatagactggctgataagctcgcggctgatcgagttgcaacagtaatcagttgatttgccact

SEQ ID NO: 2742 - DNA, 687 bp, unidentified
  source 1..687: mol_type = unassigned DNA; note = unclassified Enterovirus sequence
gggttgttcccacccacagggcccaagcggcgttagtactctggtatcacggtacctttgtatgcctgttttacatcccttcccccgtaacgttagaagaaagcacaaacgacaaatagcaagtccaccaaaccaggtgggtttttgtcaagcacttctgtttccccggacatagtaccaataagctgtacccacggctgaaagggaaaacgttcgttacccggctacttacttcgagaagcctagtaccatcatgaattgtttcaagtgttacgttcagcacaatcccagtgtagttcaggctgatgagtcaccgaattccccacgggcgaccgtgtcggtggctgcgttggcggcctgcctgcgggtattactcgcaggacgcttgattcatgacatggtgcgaagagcctattgagctaggtagtagtcctccggcccctgaatgcggctaatcccaaccacggagccatgcgttgcaatccagcaatgttgtggtcgtaatgagcaattctgtggcggaaccgactactttgggtgtccgtgtttcctgttttatttaccttggctgcttatggtgacaatctagagttgtcatcatatagcgattggattggccatccggatattatctttgtgtgactcattcctagtccataagcattccttgtaatttacacattcatc

SEQ ID NO: 2743 - DNA, 696 bp, Foot-and-mouth disease virus
  source 1..696: mol_type = genomic DNA
acgttaaaggggtgtaaccacaagcttgaaaccgtcttgcccgacgttaatgggttgtaaccacacgcttgtaccacctttcccggcgttatcgggatgcaaccaaaagatgaaccttcacccggaagtaaaacggcaaccacacccagttttgcccgttttcatgagaaatgggacgtcagcgcacgaaacgcgccgtcgcttgaggaagatttgtacaaacacgatttatgcaggcttccacaactgacacgaaccgtgcaatttgaagctccgcctggtctttccaggtctagaggggcaacactttgtactgtgcttgactccacgctcggtccactagcgggtgttagtaacagcactgttgtttcgtagcggagcatgatggccgcgggaactcccccttggtgacaaggacccgcggggccgaaagccacgtcttaacggacccatcatgtgtgcaaccccagcacggcaactttactgtgaaaaccactttaaggtgacactgatactggtactcaaccactggtgacaggctaaggatgcccttcaggtaccccgaggtaacaagtgacactcgagatctgagaaggggacaggggcttctttaaaagcgctctgtttaaaaagcttctatgcctgaataggcgaccggaggccggcgccttttcccactaaaccactactaacttt

SEQ ID NO: 2744 - DNA, 697 bp, Foot-and-mouth disease virus
  source 1..697: mol_type = genomic DNA
ttcccgacgttaaagggatgtaaccacaagcttaacaccttcgtgtccgaagtcaaaggactgaaaccacatgcttgcaccgccttttccggcgttaatggactgtaaccacaagatggaccttcacccggaagtaaaacggcaacttacacagttttgcccgttttcactagaaacgggacgtctgcgcacgaaacgcgccgccgcttgaggaggacttgtacaaacacgatctacgcaggttcccacaactggcttaaaacgtgcaatttgaaaccccgcctggtctttccaggtctagaggggtgacaccttgtactgtgcttgactccacgctcggtccactggcgagtgttagtagtagcactgttgcttcgtagcggagcatgatggccgcgggagtccctccttggtgacaaggacccgcggggccgaaagccacgtcctacggacccatcatgtgtgcaaccccagcacggcaactttgacacgaaaaccactttaaggtgacactgatactggtactcaaacactggtgacaggctaaggatgcccttcaggtaccccgaggtaacacgcggcactcgggatctgagaaggggactggggcttctgtaaaagcgcccagtttaaaaagcttctatgcctgaataggcgaccggaggccggcgcctttcctttaattgccactaactac

SEQ ID NO: 2745 - DNA, 701 bp, Foot-and-mouth disease virus
  source 1..701: mol_type = genomic DNA
ttcccgacgttaatggggaaacaaccacaagcttaacaccgtcttgcccgacgtaaaagggctgcaaccaaaaagcttgtgccgcctttcccggcgttaatgggaggtaaccacaagacaaaccttcacccggaagtaaaacggcaacttcacacagttttgcccgttttcgtgagaaatgggccgtcaacgcacgaaacgcgccgtcgcttgaggaggacttgtacaaacacgatctatgcaggtttccacaactgacacaaaccgtgcaacttgaaaccccgcctggtctttccaggtctagaggggcgacattttgtactgtgcttgactccacgctcggtccactagcgagtgttagtagtagcactgttgcttcgtagcggagcatgatggccgtgggagctcccccttggtgacaaggacccacggggccaaaagccacgtcctaccggacccatcatgtgtgcaaacccagcacggcaactttactgcgaaaaccactttaaggtgacactgatactggtactcaatcactggtgacaggctaaggatgcccttcaggtaccccgaggtaacacgcgacactcgggatctgagaaggggactggggcttctttaaaagtgcccagtttaaaaagcttctatgcctgaataggcgaccggaggccggcgccttttcactgttttactactgtttc

SEQ ID NO: 2746 - DNA, 702 bp, Enterovirus A
  source 1..702: mol_type = genomic DNA
tttaaaacagcctgtgggttgtacccacccacagggcccacgcggcgttagtactctggtatcacggtacctttgtatgcctgttttatctcccttcccccgtaacgttagaagaatgaacaaaagacaattagcaaatccaccaacccaggtgggttttcgtcaagcacttctgtttccccggacctagtaccaataagctgtgcccacggctgaaggggaaaacgttcgttatccggctacctacttcgagaagcctagtaccaccaatgattgtctcaagtgttacgctcagcacaaccccagtgtagttcaggtcgatgagtcaccgaattccccacgggcgaccgtgtcggtggctgcgttggcggcctgcctgcgagtttcactcgcaggacgcttgattcatgacatggtgcgaagagcctattgagctaggcagtagtcctccggcccctgaatgcggctaatcctaaccacggagccatgcgtcacaaaccagtggcgtcatggtcgtaacgagcaattctgtggcggaaccgactactttgggtgtccgtgtttcctgttttatttaccttggctgcttatggtgacaatctagagttgtcatcatatagcgattggattggccatccggatattactttgtgtgatttatctcttgctcgtaagcaattttaaatagtttatagcatcatt

SEQ ID NO: 2747 - DNA, 708 bp, unidentified
  source 1..708: mol_type = unassigned DNA; note = Coxsackievirus A14 isolate SEN-14-254, complete genome.1 sequence
ggggccggagctctggtgatacgttacctttgtgcgcctgttttatttccctaccccggaacaatctagaagcaacgcgctactggccaatagaaagtgtagcaaaccagctacatcccggtcaagcacttctgtctccccggaccgagtatcaataaactgctaacgcggttgaaggagaaaaggttcgttacccggccaactacttcgaaaagcccagtaacaccatgaaagttgcagagtgtttcgctcagcacttcccccgtgtagatcaggtcgatgagtcaccgcgatccccacgggcgaccgtggcggtggctgcgttggcggcctgcctatggggcaacccataggacgctctaatacagacatggtgcgaagagcctattgagctagttggtagtcctccggcccctgaatgcggctaatcctaactgcggagcttatgctcgcgaaccagcgagtagtgagtcgtaacgggtaactctgcagcggaaccgactactttgggtgtccgtgtttccttttattctcatattggctgcttatggtgacaatcaaagaattgttaccatatagctattggattggccatccggtgtgcaacagagctattgtctactcttttgttggatttgttccattgtcctctttcaccacactaaatactctacagtatatactttcccttaattcaaggaaacgatc

SEQ ID NO: 2748 - DNA, 709 bp, Foot-and-mouth disease virus
  source 1..709: mol_type = genomic DNA
aagttttgccgtcgttcccgacgttaaagggagataaccacaagctttgcaccttcttgcccgaagtaaaagggctgcaaccgcaagctttaaaccgcctttcccggcgttaacgggatgcaaccataagatggaccttcgcccggaagtaaaacggcaactcacacagttttgcccgttttcacgagaaatgggacgtcagcgcacgaaacgcgccgtcgcttgaggaggacttgtacaaacacgatctacgcaggttcccacaaccgacacaaaccgtgcaatttgaaatcccgcctggtctttccaggtctagaggggtaacactttgtactgtgattgactccacgctcggtccactggcgagtgtaagtagtagtactgttgcttcgtagcggaacatggtggccgtgggactccctccttggtaacaaggacccacggggccgaaagccacgtcttggacccaccatgtgtgcaaccccagcacggcaaccatactacgaaaaccactttaaactggcactgatactggtactcaaccactggtgacaggctaaggatgcccttcaggtaccccgaggtaacacgcgacactcgggatctgagaagggggctggggcttctataaaagcgcccagtttaaaaagcttctatgcctgaataggcgaccggaggccggcgcctttctctacttactactgtttac

SEQ ID NO: 2749 - DNA, 712 bp, Foot-and-mouth disease virus
  source 1..712: mol_type = genomic DNA
taagtgttaccgtcgtgcccgacgttaaagggaagtaaccacaagcttgacaccgtcttgtccgacgttaaagggctgtagccacaagcttgcaccgcctttcccggcgtaaatgggatgtaaccacaagacacaccttcagccggaagtaaacggcaacaccacacagttttgcccgttttcatgagaaatgggacgtctgcgcacgaaacgcgccgtcgcttgaggagaacttgtacaaacacgatctacgcaggtttccacaactgacacgaaccgtgcaacttgaaactccgcctggtctttccaggtctagaggggtaacactttgtactgtgtttgactccacgcttggtccactagcgagtgttagtagcagcactgttgcttcgtcgcggagcatgatggctgtgggaactcccccttggtaacaaggacccacggggccaaaagccacgtcctcacggacccatcatgcgtgcaaccccagcacagcaactttactgcgaaagccactttaaggtgacactgatactggtactcaaccactggtgacaggctaaggatgcccttcaggtaccccgaggtaacatgcgacactcgggatctgagaagggggctgaggcttctttaaaagcgctcagcttaaaaagcttctatgcctgaataggcgaccggaggccggcgcctttccacttaccaatactgtttt

SEQ ID NO: 2750 - DNA, 713 bp, Enterovirus A
  source 1..713: mol_type = genomic DNA
ccacagggcccacggggcgctagcacactggtgttacggcacctttgtgcgcctgttttactcccctttcccctgtaatttagaagtatcgcaccacggatcaatagcaggtgtgtcgcaccaggcacatctagatcaggcacttctgtctccccggaccgagtatcaataggctgctagcgcggctgaaggagaaaacgttcgttacccggccaactacttcgagaagcttagtaccaccatgaacgttgcagagtgtttcactcagcacaaccccagtgtagatcaggtcgatgagtcaccgcattccccacgggcgaccgtggcggtggctgcgttggcggcctgcctatggggcaacccatgggacgctctaatactgacatggtgcgaagagcctattgagctagttggtagtcctccggcccctgaatgcggctaatcctaaccgcggagcatgtactcacaacccagtgggcagcatgtcgtaacgggtaactctgcggcggaaccgactactttgggtgtccgtgtttccttttattcttacattggctgcttatggtgacaactgaaggattgttaccatatagctattggattggccatccggtgtccaacagagctctgatttatcagtttgttggctttgtgcctttatcacctacagcctactcaaccttagtgtttttgatacaccttaacaataggaa

SEQ ID NO: 2751 - DNA, 715 bp, Parechovirus B
  source 1..715: mol_type = genomic DNA
ggtggggtgggtacgtttctcgctcattgagtgggggcgtggctcaccaaccacacctggttggttcccaggttcatacaataaccacctctttgtaacaactacacctaagcttaatttgcccgcttgaactggacgaaaccgcttggaataagtttggttctcttttgagtgtgttttgtgttagcataatttctgtctctagagtgctttacgctctagtaggggctgtacccgggcggtcccactcttcacaggaatctgcacaggtggctttcacctctggacagtgcattccacacccgctccacaatagaagataatgtatgtctttgtttgtgaaatgcttatgaaacgagtgtgtaggcgtagcggctacttggatgccagcggaactcccctagtggtaacactagcctctgggcccaaaaggcatgtctttgaccattcaagtacacaaccccagtgatgcacacacctagtaatggcttagtaatggacattgattgattatcagacaattgctaggaggcttaggtatgacgggctgaaggatgccctggaggtacccgcaggcaaccttaggagactgtggatctgaccaggggcccaccatggaagcatgggtagaagtcttcggaccttgggttaaaaaacgtctaggcccgccccccacagggatgtggggtttcccttataaccccaatactacact

SEQ ID NO: 2752 - DNA, 717 bp, Enterovirus B
  source 1..717: mol_type = genomic DNA
acccacagggcccactgggcgctagcacactggtatcacggtacctttgtgcgcctgttttatccaccttaccccactgtaacttagaagttaaccaaacacggtcactaggtggctcagtataccaactgagtctagaccaagcacttctgttaccccggactgagtatcaataggctgctcgcgcggctgaaggagaaaacgttcgttacccggccaattacttcgagaaacctagtaccaccatgaaggttgcgcagcgtttcgctccgcacttccccagtgtagatcaggccgatgagtcaccgcgtacctcacgggcgaccgtggcggtggctgcgctggcggcctgcccatggggcaacccatgggacgcttcaaaactgacatggtgcgaagagtctattgagctaattggtagtcctccggcccctgaatgcggctaatcccaactgcggagcagatacccacactccagtgggcagtctgtcgtaatgggcaactctgcagcggaaccgactactttgggtgtccgtgtttccttttattcttatactggctgcttatggtgacaattgagagattgttaccatattgctattggattggccatccggtgacaaacagagcaataatctacttatttgttggtttcgtaccattgaactttagagtactgaagacccttaactttatactaattctcaacacagcaaa

SEQ ID NO: 2753 - DNA, 719 bp, Foot-and-mouth disease virus
  source 1..719: mol_type = genomic DNA
cccataaaggttttaccgtcattcccgacgttaaagggaggtaaccacacgcttgagaccgtcttgtccgacgttaacggactggaaccacaagcttataccgcctttcccggcgttaacggaatgtaaccacaagatggaccttcacccggaagtaaaacggcacacacacacaattttgcccgttttcacgagaaacgggacgtctgcgcacgaaacgcgccatcgcttgaggaggacttgtacaaacacgatctacgcaggtttcccaaccgacacaacccgtgcaacttgaaactccgcctggtctttccaggtctagaggggtgacattttgtactgtaattgactccacgctcggtccactagcgggtgtttagtagctgtattgttgcttcgtagcggagcataatggccgcgggagctcccccttggtaacaaggacccacggggccgaaagccacgtcctaacggacccattatgtgtgcaaccccagcacggcaacttactgtgaaaaccactttaaggtgacactgatactggtactcaactactggtggcaggctaaggatgcccttcaggtaccccgaggtaacatgcgacactcgggatctgagaaggggaccgggacttctttaaaagtgcccggtttaaaaagcttctatgcctgaataggcgaccggaggccggcgcctttcttttgattactactgctttt

SEQ ID NO: 2754 - DNA, 719 bp, Enterovirus A
  source 1..719: mol_type = genomic DNA
ccacccacagggcccacggggcgctagcacactggtgtcacggcacctttgtgcgcctgttttatttcccctcccccccgcaatttagaagttttgcactacagatcaatagcaggtgtgtcgcaccaggcacatctagatcaagcacttctgtttccccggactgagtatcaataggctgctcacgcggctgaaagagaaagcgttcgttatccggccaactacttcgagaagcttagtaccaccatgaacgttgcagagtgtttcgctcagcacatccccagtgtagatcaggtcgatgagtcaccgcactccccacgggcgaccgtggcggtggctgcgttggcggcctgcctatggggcaacccataggacgctctaataccgacatggtgcgaagagcctattgagctagttggtagtcctccggcccctgaatgcggctaatcctaactgcggagcatgtactcacaatccagtgggcagcatgtcgtaacgggcaactctgcagcggaaccgactactttgggtgtccgtgtttcctttttattcttatattggctgcttatggtgacaattgaagaattgttaccatatagctattggattggccatccggtgtctaacagagctattgtttacctgtttgttggatacgtccctctcaatttcaaggtcattaaaactcttaattatatactacttctcaactgtgagaa

SEQ ID NO: 2755 - DNA, 719 bp, Enterovirus B
  source 1..719: mol_type = genomic DNA
cacccacagggcccactgggcgctagtacactggtatcacggtacctttgtgcgcctgtttgaccgacccaccccgaatgcaacttagaagcacaacttggatggtcaataggcggctcggtatgccaactgagtctagaccaagcacttctgttaccccggactgagtaccaataggctgctcgcgcggctgaaggggaaaccgttcgttacccgactaactacttcgagaaacctagtaccaccatgaaagttgcgcagcgtttcgttccacacaaccccagtgttgatcaggtcgatgagtcaccgcaaaccccacgggcgaccgtggcggtggctgcgctggcggcctgcccatgaggcaactcatgggacgcttcaatactgacatggtgcgaagagtctattgagctagttggtagtcctccggcccctgaatgcggctaatcctaactgcggagcagatacccacacaccagtgggcagtctgtcgtaatgggcaactctgcagcggaaccgactactttgggtgtccgtgtttccttttgttcttattctaaccacttatggtgacaattgagaggctgtgaccatattgccactgagttgaccacccggtgacgagcagaacagttgcttacctgtctgttggtcacgtatcattaaaccacaaatccttgaacgctctcctattttgtcataacgcccaacacgtcaaa

SEQ ID NO: 2756 - DNA, 720 bp, Foot-and-mouth disease virus
  source 1..720: mol_type = genomic DNA
ccccccctaagttttaccgtcgttcccgacgttaaagggatgtaaccacaagctagaaaccgtcttgcccggcgttatagggctgtaaccacatgcttgtaccgcctttcccggcgacaacgggatgtaaccacacgattgaccttcacccggaagtaaaacggcaacttcacacatttttgcccgttttcacgagaaacgggacgtctgcgcacgaaacgcgccgccgcttgaggaagacttgtacaaacacgatctaagcaggtctccacaactgacacaaaccgtgcaacttgaaactccgcctggtctttccaggtctagaggggtgacactttgtactgtgcttgacaccacgctcggtccactagcgggtatgagtagcagaactgttgcttcgtagcggagcatggtggccgtgggaactcctccttggtaacaaggacccacggggccaaaagccacgtcctgtggacccaccatgtgtgcaaccccagcacggcaatttttctgtgaaaactaccttaaggtgacactgatactggtactcaaccactggtgacaggctaaggatgcccttcaggtaccccgaggtaacacgcgacactcgggatctgagaaggggactgggacttctttaaaagtgcccagtttaaaaagcttctatgcctgaataggcgaccggaggccggcgcctttcttttaaacactactagacta

SEQ ID NO: 2757 - DNA, 726 bp, Enterovirus B
  source 1..726: mol_type = genomic DNA
ggttgttcccacccacagggcccattgggcgctagcacactggtatcacggtacccttgtgcgcctgttttatacacccttccccaacgaaacttagaagtaaagcaacaaggtcaataggtagctcagtgagccaactgagttatgaccaagcacttctgtcaccccggactgagtatcaataggctgctcacgcggctgaaggagaaagcgttcgttatccggctaactacttcgagaaacctagtaccaccatgaaggttgcgtagcgtttcgatcagcacaaccccggtgtagatcaggccgatgagtctccgcattcctcacgggcgaccgtggcggtggctgcgctggcggcctgcccatggggcaacccatgggacgcttcaatactgacatggtgcgaagagtctattgagctagttagtagtcctccggcccctgaatgcggctaatcctaactgcggagcacacacccccaacccaggaggcagtgtgtcgtaacgggtaactctgcagcggaaccgactactttgggtgtccgtgtttccttttattcttatactggctgcttatggtgacaattgagagattgttaccatatagctattggattggccatccggtgactaacagagctattgtatacctgtttgttggttttataccattaaattgcaaagttctagagaccctcaattttatcctattactaaacgcagcaaa

SEQ ID NO: 2758 - DNA, 726 bp, unidentified
  source 1..726: mol_type = unassigned DNA; note = unclassified Enterovirus sequence
acatgggcacccagagggcccacgtggcgtagaactcacgtggcgtagaactccggtattacggtacccttgttcgcctattttaccaccccttccccagaaacttagaagtcatgatcacaaggctcaatagatacttgggcaaaccagcccaaggacgagcaagcacttctgtctccccgggaggcaacgctgttaggctgtccccacggccgaaggcaacgctaccgttaaccggcgtggtactgcgggaagtctagtaacatcattgaatttctttgacgttacgttcagcacacaaacccagtgtgtagttttggctgatgagtgcctgcattccccactggcgacagtggcaggcgctgcgttggcggccaactctcagggcaacctgagagacgtcaaattaaggacatggtgtgaagaacctactgcgctactgcgtagtcctccggcccctgaatgcggctaatcctaactcgggagcatctgcacacaatccagtgtgaagggtgtcgtaacgggcaactcctgagcggaaccgactactttgggtgtccgtgtttcctgttttatttaccttggctgcttatggtgacaatctagattgttaccatatagcaattgggttggccacctggttttgtaagcttgtgacttttagtacgctaaaacacttactataatacaacacagacattactataaaaccacttgaaagagagg

SEQ ID NO: 2759 - DNA, 727 bp, unidentified
  source 1..727: mol_type = unassigned DNA; note = unclassified Hepatovirus sequence
tcccctctttgggctactctggctgggggtagtaaaatacccagccctcgtttgcctagagtttaggctaaaacccctttccctttgtaaatacgttcatttgtaaatattgattcctgcaggttcaggctttcttgaatcatgttgtgctttaacacacacttactattttgccataagtgcgatggatggaaacttccatcaaaccttttaacacaggatgttattagggcagtttctcttaatatatctctgggacattcttcggtcccattgtttctcctttctatcttcttgttttccgggttctcaggataccaatggagcgaccactgcgcccggtggggttaaccagaagattagcttctggctgtagctgctaaaagtcctgacgttatagagcgccgtcacggagttagtgattaaactcaggtgtttggaaattcattgatcttctagaaagggtaggctacgggtgaaaccctttacactaatacctatattaggagatgtgttgcataggtgaagggtactggtaaaggggattttcacgatgaacctttcaacagttgtggacccacctcatgcactagatgctttgatttgaagaacacttggggtcacttcccgagtgatcgcgccactaggcgccctcctctatgagttgtaggggtaatcaggggcatttaggtttccacatttaaaagatttatatgattgattcaaa

SEQ ID NO: 2760 - DNA, 729 bp, Enterovirus B
  source 1..729: mol_type = genomic DNA
gggttgttcccacccacagggcccacggggcgctagcactctggtatcacggtacctttgtgcgcctgttttatccaccctcccccaaatgtaacctagaagtacaatactaacggtcaataggcggcacagcacaccagctgggtctagaccaagcactcctgttgccccggactgagtatcaataggctgcctccgcggctgaaggagaaaacgttcgttatccggccaattacttcgagaaacccagtaccaccatggaagttgcgcagcgtttcgttccgcacaaccccagtgtagatcaggtcgatgagtcaccgcattccccacgggcgaccgtggcggtggctgcgttggcggcctgcccatggggtgacccatgggacgcttcaatactgacatggtgtgaagagtctattgagctaattggtagtcctccggcccctgaatgcggctaatcctaactgcggagcagacactcacaagccagtgagcagtctgtcgtaacgggtaactctgcagcggaaccgactactttgggtgtccgtgtttccttttattcttacattggctgcttatggtgacaattgagaaattgttaccatatagctattggattggccatccggtgactaacagagcaattgtctatctgtttgttggatttgtaccactgaactataaggtattgaacacacttaactttatcatatcactaaactcagcaaa

SEQ ID NO: 2761 - DNA, 730 bp, Enterovirus B
  source 1..730: mol_type = genomic DNA
gttgttcccacccacagggcccactgggcgctagcacactggtatcacggtacctttgtgcgcctgttttatgcttcctcccccactatagtaatctagaagcttgaactacatggccaacagacaacccggtacaccaaccgggccccggccaagcacttctgtatccccggactgagtatcagtaagctgctcgcgcggctgaaggagaaaacgttcgttacccggccacttacttcgagaaacctagtaacgccatgaaagttgcgcagcgtttcgctccgcacaaacccagtgtagatcaggtcgatgagtcaccgcatcccccacgggcgaccgtggcggtggctgcgttggcggcctgcccatggggtaacccatgggacgcttcaatactgacatggtgcgaagagtctattgagctaagtggtagtcctccggcccctgaatgcggctaatcctaactgcggagcagatacccacactccagtgggcagtctgtcgtaacgggcaactctgcagcggaaccgactactttgggtgtccgtgtttccttttgtcttttacactggctgcttatggtgacaattgaaagattgttaccatatagctattggattggccatccggtatcaaacagagcaattatttacttgtttgttggttatatacctctcgataccaaggttctaaaaacactcaactacatcttgttattgaatacgttgaa

SEQ ID NO: 2762 - DNA, 740 bp, unidentified
  source 1..740: mol_type = unassigned DNA; note = unclassified Parechovirus sequence
cccgtggcttatgccacgggacccgtgcccccgtccagggggttttacttatgctcaggcgtttgcattatcgcctggatctggctctgggcaccctttcagcccctgggcatgggtttaaactgcctacctgtaacacttaacatctaagaaactgatttgtaaccaaccctggccagatgttgccagcccaagccacttggaataaggtgggcaatgtcacattggtgcttaaaggttgcgtccaaatttttcttttccaaccactcatgtggacggtgtgcaaactccaccgtaacacttctaggtgacttccacacttgtggggctaaagcaccagagtctttgcttcaaccatattgtggtgacagcaaagcatcctgaaattagttagtaatgattctagatccacttctgtggtgctgcatgcctgcggagcaatggggggtgaccctcacctcaggggccgaaagccacggtgtttaaagcacccatgcagtatgcttgtctgtttaggattgtgaacactgaaagtaaggatgatgagtggtcactgtggtcactggttgtcgtacgggggctgaaggatgcccagaaggtacccgtaggtaaccttaagagactatggatctgatctggggccagggagtgatgtactctatacacctgccttggttaaaaaacgtctaggcccccccaacctgggggaccaggttttcctggtcattttgcaaaggaat

SEQ ID NO: 2763 - DNA, 741 bp, unidentified
  source 1..741: mol_type = unassigned DNA; note = unclassified Sapelovirus sequence
tcacactcatttcgccccctcaccctactcaggcaacccccaccccttctcttacgggagttagggccaaggatctagtgtagtggtgttgtatccccttaccttaaacccatcccatccaagcggactggtattatggctttagattgaataatggttgatgaatccaaacctgttactcattcaggggaaaaatgaagacattctctatggatttgacttgttacgaccaagagttagcgcttcgcgcgctggccgtatggactgtttaatggttactctatggattatgatttcagggttggccgcccaggataaaaggcaattgtggtaagtgatgttagtcattggcagttgaaacctgcctagaacatctaaggtctacgctgtgcgggccgaagtaagtctaggaacaacagggagtatgctgttttttgctttcacccaacacgaccgtacacgaaagagctagaggcatctggaggcaaagggaaaagaatttcttagcccgaatgttcattagagtccttgacgaatgcgtcccctctgtcccgagggtgaggcgtatggcgcatgctcatggcattactccaaggtgtatctagaggggggggccccctctacttagtctagtgctacctgacagggccgcggctggtcgtttgtgtatggtataaccagtagtaatcccccatggattgctttaactccccctcctcccttcacaagacattctctaag

SEQ ID NO: 2764 - DNA, 741 bp, Enterovirus B
  source 1..741: mol_type = genomic DNA
ttaaaacagcctgtgggttgatcccacccacagggcccattgggcgctagcactctggtattacggtacccttgtgcgcctgttttacacgcccctccccaagcaacttagaagtctgtcacaaatggtcaatagacagctcaacacgccagttgagtctagaccaagcacttctgtcgccccggaccgagtatcaatagactgctagcgcggttgaaagagaaaacgttcgttacccggccaactacttcgggaaacctagtaccaccatgaaagttgcgcagtgtttcgctccgcacaaccccagtgtagatcaggtcgatgagccaccgcattccccacaggcgactgtggcggtggctgcgttggcggcctgcccatggtacaacccatgggacgcttcaatactgacatggtgcgaagagtctactgagctagttggtagtcctccggcccctgaatgcggctaatcctaactgcggagcaggtacccacgagccagtgggcagcctgtcgtaatgggcaactctgcagcggaaccgactactttgggtgtccgtgtttccatttactcttatactggctgcttatggtgacaatcacggaattgttaccatatagctattggattggccatccagtgactaacagagcgattatattcctttgtgttggttttgtaccactcaccgtcacgagctttacaacgctaaactacattttgtcattgaacacggcaag

SEQ ID NO: 2765 - DNA, 741 bp, Enterovirus B
  source 1..741: mol_type = genomic DNA
ttaaaacagcctgtgggttgtacccacccacagggcccactgggcgctagcactctggtactacggtacctttgtgtgcctgttttatacccctccccctactgaaacttagaagcaattcataccgatcaatagtgggcgtggcacaccagccgtgtctagatcaagcactcctgtttccccggaccgagtatcaatagactgctcacgcggttgaaggagaaaacgttcgttatccggctaactacttcgaaaaacctagtaacaccatgaaagttgcggagtgtttcactcagcacttccccagtgtagatcaggtcgatgagtcaccgcattcctcacgggcgaccgtggcggtggctgcgctggcggcctgcctatggggtgacccataggacgctctaatacagacatggtgcgaagagtctattgagctagttagtagtcctccggcccctgaatgcggataatcctaactgtggagcagatacccacgaaccagtgggcagtctgtcgtaacgggcaactccgcagcggaaccgactactttgggtgtccgtgtttccttttattccaaatctggctgcttatggtgacaattgagagattgttgccatatagctattggattggccatccggtgaataatagagcgataatatatttgtttgttggattcgtgccacttagtctgaaagttttgagaacactcaactacgttttattgctgaatagtgcaag

SEQ ID NO: 2766 - DNA, 745 bp, Enterovirus A
  source 1..745: mol_type = genomic DNA
ttaaaacagcctgtgggttgcacccactcacagggcccactgggcgctagcacactgatttcccggaatccttgtgcgcctgttttatatcccctcccccatgcgcaacttagaagcaatctacaccttcgatcaatagcaggcgtggcgcgccagccatgtctagatcaagcacttctgtttccccggactgagtatcaataaactgctcacgcggttgaaggagaaaatgttcgttacccggctaactacttcgagaaacctagtagcaccatgaaaattgcagagcgtttcgctcagcgcttcccccgcgtagatcaggctgatgagtcactgcattcctcacgggcgaccgtggcagtggctgcgttggcggcctgcccatggggtaacccatgggacgctctaatatggacatggtgtgaagagtctattgagctagttagtagtcctccggcccctgaatgcggctaatcctaactgcggagcacatacccccaaaccagggggcggtgtgtcgtaacgggcaactctgcagcggaaccgactactttgggtgtccgtgtttccttttattcttatattggctgcttatggtgacaattgaaagattgttaccatatagctattggattggccatccggtgaataacagagccttgatatacctttttgtagggtttataccacttactcttcgcgttgttgagactctaaagtacattctaatcttgaacactagaaa

SEQ ID NO: 2767 - DNA, 746 bp, Enterovirus A
  source 1..746: mol_type = genomic DNA
ttaaaacagcctgtgggttgcacccacccacagggcccactgggcgttagcacactgattccacggaatccttgtgcgcctgttttacaaccccttcccaaactcgtaacttagaagaatagcacgctaccgatcaatagcaggcatggcgcaccagccatgtctagatcaagcactcctgtctccccggaccgagtatcaatagactgctaacgcggttgaaggagaaaacgttcgtcacccggctaactacttcgagaaacctagtaacaccattgaagctgcggagcgtttcgctcagcactacccccgtgtagatcaggtcgatgagtcactgcaacccccacgggcgaccgtggcagtggctgcgttggcggcctgcctatggggtaacccataggacgctctaaagtggacatggtgcgaagagtctattgagctagttagtagtcctccggcccctgaatgcggctaatcctaactgcggagcgcataccctcaacccagggggtggtgcgtcgtaacgggcaactctgcagcggaaccgactactttgggtgtccgtgtttccttttattcttatactggctgcttatggtgacaattgaaagattgttaccatatagctattggattggccatccagtgactaatagagctttgatatacctgtttgtgggttttgttccactcaccaatcgtgcagtttacactctgaagtacattttaatcttgaataatagaaa

SEQ ID NO: 2768 - DNA, 746 bp, Enterovirus A
  source 1..746: mol_type = genomic DNA
tttaaaacagcctgtgggttgcacccacccgcagggcccactgggcgccagcactctggtttcgtggaacctttgtgcgcctgttttatcaccctcttcccaaactcgcaacttagaagtaacactttactgatcaatagcaggcgtggcgcaccagccatgtctagatcaagcacttctgtctccccggaccgagtatcaataggctgctcacgcggctgaaagagaaaacgttcgttatccggctaactacttcgagaaacttagtagcaccgttgaaactgcagggtgtttcgctcagcacttcccccgtgtagatcaggtcgatgagtcactgcaatccccacgggcgaccgtggcagtggctgcgttggcggcctgcctatggggtaacccataggacgctctaatgtggacacggtgcgaagagtctattgagctagttagtagtcctccggcccctgaatgcggctaatcctaactgcggagcgcatgcccccgaaccaggaggtggtgcgtcgtaatgggtaactctgcagcggaaccgactactttgggtgaccgtgtttctttttattcctattatggctgcttatggtgacaattaaagaattgttaccatatagctattggattggccatccggtgtctaacagagctattatatatctgtttgttgggtttgttccattatcacacacatcactcaatacattgtatttcattgtgggattgaacacaagaaa

SEQ ID NO: 2769 - DNA, 746 bp, Enterovirus A
  source 1..746: mol_type = genomic DNA
ttaaaacagcctgtgggttgtacccactcacagggcccactgggcgttagcactctgattccgcggaatccttgtgcgcctgttttaaaacccctccccacacttgtaatctagaagtaatgcactcttatgatcaatagcaggcgtggcgcaccagccatgtcttgatcaagcacttctgtctccccgggctgagtatcaatagactgctcacgcggttgaaggagaaaatgctcgttatccggctaactacttcgagaaacctagtagcaccagtgaagctgcggggcgtttcgttcagcacttcccccgtgtagatcaggtcgatgagtcactgcgttccccacgggcgaccgtggcagtggctgcgttggcggcctgcctatggggcaacccataggacgctctaatgtggacatggtgcgaagagtctattgagctagttagtagtcctccggcccctgaatgcggctaatcctaactgcggagcacatgccctcaagccagagggtggtgtgtcgtaatgggcaactctgcagcggaaccgactactttgggtgtccgtgtttccttttattcttatactggctgcttatggtgacaatcacagaattgttgccatatagctattggattggccatccggtgcacaacagagcaattatctatttatttgttggatttacccctttgacacttacatctcttaacacattgcactacatcctatttttgaatacgaggaa

SEQ ID NO: 2770 - DNA, 747 bp, Enterovirus A
  source 1..747: mol_type = genomic DNA
ttaaaacagcctgtgggttgtacccacccacagggcccactgggcgctagcacactgattctatggaatctttgtgcgcctgttttataatccctttcccaaaattgcaacttagaagaacagtactttatcgatcaatagcaggcatgacgcaccagttatgtctagatcaagcactcctgtttccccggaccgagtatcaatagactgctaacgcggttgaaggagaaaacgtccgttacccggctaactacttcgagaaacctagtagcaccattgaagctgcagagcgtttcgctcagcacttccccagtgtagatcaggttgatgagccactgcactccccacgggcgaccgtggcagtggctgcgttggcggcctgcctatgggacaacccataggacgctctaaagtggacatggtgcgaagagtctattgagctagttagtagtcctccggcccctgaatgcggctaatcctaactgcagagcacatgccctcaacccagggggtggtgtgtcgtaacgggcaactctgcagcggaaccgactactttgggtgtccgtgtttccttttattcttatattggctgcttatggtgacaattgagagattgttaccatatagctattggattggccatccggtgaccaacagagctttgatatacctgtttgcgggttttattccactctccagtcgttcagtccatactataaagtgcattttgattctgaacaatagaaa

SEQ ID NO: 2771 - DNA, 747 bp, Enterovirus A
  source 1..747: mol_type = genomic DNA
ttaaaacagcctctgggttgcacccacccacagggcccactgggcgctagcacactggtatcacggtacctttgtgcgcctgttttatacaccctccccccttgtaacttagaagaaacaaacaaacgatcaatagtaggcttagcactccagctaagtctcgatcaagcacttctgttaccccggaccgagtatcaataggctgtacccacggctgaaagagaaaacgttcgttacccggctatctacttcgggaaacccagtaccatcatgaagattgcaaagcgtttcgctcagcacaaccccagtgtagatcaggtcgatgagtcactgcattccccacaggcgactgtggcagtggctgcgttggcggcctgcctatggggaaacccataggacgctttaatattgacatggtgcgaagagtctactgagctaggtagtagtcctccggcccctgaatgcggctaatcccaaccacggagcaggcgctcacactccagtgagtagcttgtcgtaatgcgaaagtctgtggcggaaccgactactttgggtgtccgtgtttccttttatttttatcatggctgcttatggtgacaatctaagattgttatcatatagctattggattggccatccggtgaattctagagatattatttacttgtttgttggttttaccacattaaacattaccaattacagaactctcctctacatcctgttattgaataatagaaagagaaa

SEQ ID NO: 2772 - DNA, 748 bp, Enterovirus A
  source 1..748: mol_type = genomic DNA
ttaaaacagcctgtgggttgcacccacccacagggcccactgggcgccagcacactgattctacggaacctttgtgcgcctgttttacaaccccttccccgaaactcgcaacttagaagaacagcacgctatcgatcaatagcaggcatggcgcgccagtcatgtctagatcaagcacttctgtctccccggactgagtatcgatagactgctaacgcggttgaaggagaaaacgtccgttacccggctaactacttcgagaagcctagtaacaccattgaaactgcagagtgtttcgctcagcactaccccagtgtagatcaggtcgatgagtcactgcactccccacgggtgaccgtggcagtggctgcgttggcggcctgcctatggggtaacccataggacgctctaaagtggacatggtgcgaagagcctattgagctagttagtagtcctccggcccctgaatgcggctaatcctaactgcggagcgcatgccctcaatccagggggtggtgcgtcgtaatgggcaactctgcagcggaaccgactactttgggtgtccgtgtttccttttattcttatgttggctgcttatggtgacaattgagagattgttgccatatagctattggattggccatccagtgactaacagagctttgatatacctgtttgtgggttttgttccactcaccaattgtacagttcaaactttgaagtacattttaattctgaataatagaaa

SEQ ID NO: 2773 - DNA, 749 bp, Enterovirus A
  source 1..749: mol_type = genomic DNA
ttaaaacagcctgtgggttgcacccacccacagggcccattgggcgctagcacactgattctatggaatctttgtgcgcctgttttagtatccctccccctcaaacacgtaacttagaagaatagcacgctatcgatcaatagcaggcgtggcgcaccagccatgtctagatcaagcacttctgtctccccggattgagtatcaatagactgctaacgtggttgaaggagaaaacgtccgttacccggctaactacttcgagaaacctagtaacaccattgaaactgcagagcgtttcactcagcactaccccagtgtagatcaggtcgatgagtcactgcattccccacgggcgaccgtggcagtggctgcgttggcggcctgcctatggggtgacccataggacgctctaaagtggacatggtgtgaagagtctattgagctagttagtagtcctccggcccctgaatgcggataatcctaactgcggagcgcatgccctcaatccagggggtggtgcgtcgtaacgggcaactctgcagcggaaccgactactttgggtgtccgtgtttccttttatctttatactggctgcttatggtgacaattgagagattgttaccatatagctattggattggccatccagtgaccaacagagctttgatttacctgtttgtgggttttgttccactcaccagttgtacagttcatactttgaagtatattttaatcctgaataatagaaa

SEQ ID NO: 2774 - DNA, 750 bp, Enterovirus A
  source 1..750: mol_type = genomic DNA
acttaaaacaaacctgtgggttgcacccacccacagggcccactgggcgctagcacactgattctatggaatctttgtgcgcctgttttataaccccttccccaaaactgtaacttagaagaatagcactctatcgatcaatagcaggcatggtgcgccaatcatgtctagatcaagcacttctgtctccccggatcgagtatcaatagactgctagcgcggttgaaggagaaaacgtccgttacccggctaactacttcgagaaacttagtagcaccattgaagccgcagagtgtttcgctcagcactcccccagtgtagatcaggtcgatgagtcactgcactccccacgggcgaccgtggcagtgactgcgttggcggcctgcctatggggcaacccataggacgctctaaagtggacatggtgcgaagagtctattgagctagttagtagtcctccggcccctgaatgcggctaatcctaactgcggagcgcatgccctcaatccagggggtggtgtgtcgtaacgggcaactctgcagcggaaccgactactttgggtgaccgtgtttccttttattcttatactggctgcttatggtgacaattgagagattgttaccatatagctattggattggccatccagtaaccaacagagctttgatatacttgtttgtgggtttcgttccactcaccaatcgtacaatccatactctaaagcacattttgattctgaacaatagaaa

SEQ ID NO: 2775 - DNA, 750 bp, Enterovirus A
  source 1..750: mol_type = genomic DNA
ttaaaacagcctgtgggttgcacccacccacagggcccactgggcgctagcacactgattctacggaatctttgtgcgcctgttttataacccccttccccccaaaactgtaacttagaagaatattacactactgatcaatagcaggcatggcgcgccagtcatgtctagatcaagcacctctgtctccccggactgagtatcaatagactgctagcgcggttgaaggagaaaacgtccgttacccggctaactacttcgagaaacctagtagcaccattgaagctgcggagtgtttcgctcagcactcccccagtgtagatcaggtcgatgagtcactgcactccccacgggcgaccgtggcagtggctgcgttggcggcctgcctatggggcaacccataggacgctctaaagtggacatggtgtgaagagtttattgagctagttagtagtcctccggcccctgaatgcggctaatcccaactgcggagcacatgctctcaatccagagggtggtgtgtcgtaacgggcaactctgcagcggaaccgactactttgggtgtccgtgtttccttttattattatattggctgcttatggtgacaattgagagattgttgccatatagctattggattggccatccagtgacaaacagagctttgatatacttgttcgtgggttttgttccactcaccagtcgtacagttcatactctaaagtacattctgattctgaacaatagaaa

SEQ ID NO: 2776 - DNA, 750 bp, Enterovirus B
  source 1..750: mol_type = genomic DNA
ttaaaacagcctgtgggttgatcccacccacagggcccactgggcgccagcacactggtatcgtggtacctttgtgcgcctgttttataccccctacccccacatgtactctagaagcaaggcaaacctgaccaatagtaggtgtggcacaccagccgcattttggtcaagcacttctgtttccccggaccgagtatcaataagctgctcacgcggctgaaggagaaaccgttcgttacccgaccagctacttcgagaaacctagtaacactatgaacgttgcggagtgtttcgttcagcacttcccccgtgtagatcaggtcgatgagtcaccgcattcctcacgggtgaccgtggcggtggctgcgttggcggcctgcctacgggttcgcccgtaggacgctctaataccgacatggtgtgaagagtccattgagctagctggtagtcctccggcccctgaatgcggctaatcctaactgcggagcaggtgctcacagaccagtgagtagcctgtcgtaacgggcaactctgcagcggaaccgactactttgggtgtttttccttttttcttctcttatattggctgcttatggtgacaattaaagaattgttaccatatagctattggattggccatccggtgacgagcagagccattgtttacctctttgttggatttgtacctttgaaccacaaagtcttgaataccattcatctcattttaaagttcaactcagctaaaagaaa

SEQ ID NO: 2777 - DNA, 751 bp, Enterovirus A
  source 1..751: mol_type = genomic DNA
tttaaaacagcctgtgggttgtacccacccacagggctcactgggcgctagcacactggtatcacggtacccttgtgcgcctgttttatacaccctcccccctttttgtaacttagaagaaacaaacacacgatcaatagcaggcttagcgcaccagctaagtcttgatcaagcacttctgttaccccggactgagtatcaataagctgtgcccacggctgaaagagaaaacgttcgttacccggctgtctacttcgggaaacctagtaccatcatgaagactgcaaagcgtttcgctcagcacaaccccagtgtagatcaggtcgatgagtcactgcattcctcacaggcgactgtggcagtggctgcgttggcggcctgcctatggggaaacccataggacgctttaatgttgacatggtgcgaagagtctactgagctaggtagtagtcctccggcccctgaatgcggctaatcccaaccacggagcaggcgctcacactccagtgagtagcctgtcgtaatgcgcaagtctgtggcggaaccgactactttgggtgtccgtgtttccttttattcttatcatggctgcttatggtgacaatctaagattgttatcatatagctattggattggccatccggtgaactctagagatattatctatttgtttgttggttttaccaagttaaacatcaccagctacaccactcttctttatatcatattattgaacagtaaaaagagaaa

SEQ ID NO: 2778 - DNA, 751 bp, Enterovirus A
  source 1..751: mol_type = genomic DNA
ttaaaacagcctgtgggttgtgacccacccacagggcccactgggcgctagcactctgattctacggaatccttgtgcgcctgttttatgtcccttcccccaatcagtaacttagaagcattgcacctctttcgaccgttagcaggcgtggcgcaccagccatgtcttggtcaagcacttctgtttccccggaccgagtatcaatagactgctcacgcggttgagggagaaaacgtccgttacccggctaactacttcgagaagcctagtagcaccatgaaagttgcagagtgtttcgctcagcacttcccccgtgtagatcaggtcgatgagtcactgcgatccccacgggcgaccgtggcagtggctgcgttggcggcctgcctgtggggtaacccacaggacgctctaatatggacatggtgcaaagagtctattgagctagttagtactcctccggcccctgaatgcggctaatcctaactgcggagcacataccctcgacccagggggcagtgtgtcgtaacgggcaactctgcagcggaaccgactactttgggtgtccgtgtttccttttattcttatactggctgcttatggtgacaattgaaagattgttaccatatagctattggattggccatccggtgtgcaacagagctattatttacctatttgttgggtatataccactcacatccagaaaaaccctcgacacactagtatacattctttacttgaattctagaaa

SEQ ID NO: 2779 - DNA, 752 bp, Enterovirus C
  source 1..752: mol_type = genomic DNA
ttaaaacagctctggggttgttcccaccccagaggcccacgtggcggctagtactctggtatcacggtacccttgtacgcctgacatcccattccctactgaaggagaagcaaattgcacgatatcaaaaaaagggggtacaaaccagaaccaccacgaacaagcacttctgttaccccggtgatattgcatagactgttcccacggtcaaaagcgattgatccgttatccgctcaagtacttcgagaagccttagtatctccttggaatcttccgatgcgttgcgctcaacactcgaccccggagtgtagcttaggtcgatgagtctggacgatcctcactggcgacagtggtccaggctgcgttggcggcctacctatggcccaaagccataggacgctagttgtgaacaaggtgtgaagagcctattgagctactcgagagtcctccggcccgtgaatgcggctaatcccaaccacggatcaggtgattgcaatccagcagttggcctgtcgtaacgcgcaagtctgtggcggaaccgactactttgggtgaccgtgtttccttttatttttattactggctgcttatggtgacaatcgaggattgttatcataaagcgaattggattggccatccggtgaaagtaaaacacattatttacctttttgttggatttactacattatccacgttcactctagatttaattcgcatagttcttttgactagaagattttaccaacataaca

SEQ ID NO: 2780 - DNA, 756 bp, Enterovirus A
  source 1..756: mol_type = genomic DNA
cagacgtgtgctcttcccgatgtgggttgtacccacccacagggcccaatgggcgctagcacaccggtatcacggtacccttgtgcgcctgttttatgcaccctccccctatgtaacttagaagaaacaaacacacgatcaatagtaggcttggcgcgccagctaagtcttgatcaagcacttctgttaccccggactgagtatcaataggctgtacccacggctgaaagagaaaacgttcgttacccggctatctacttcgggaaacctagtaccatcatgaagactgcaaagcgtttcgctcagcacaaccccagtgtagatcaggtcgatgagtcactgcattcctcacaggcgactgtggcagtggctgcgttggcggcctgcctatggggaaacccataggacgctttaatgttgacatggtgcgaagagtctactgagctaggtagtagtcctccggcccctgaatgcggctaatcccaaccacggagcaagcgctcacaatccagtgagtagcttgtcgtaatgcgaaagtctgtggcggaaccgactactttgggtgtccgtgtttccttttatttttatcatggctgcttatggtgacaatctaagattgttatcatatagctattggattggccatccggtgaactctagagatattatctatttgtttgttggttttaccaagttaaacatcactagttacaccaccttactttatattatactactgaataatagaaaaagaaa

SEQ ID NO: 2781 - DNA, 759 bp, Parechovirus B
  source 1..759: mol_type = genomic DNA
ttgaaaggggggccctgcagccgatataggctgcagggttcccctggtggggtgggtacgtctctcgctcattgagtgggggcgtggctcaccaaccacacctggttggtccccaggttcatgcaataaccactttttgtaatctttacatctaagcttaattcacccactagaactggacgaaaccgcttggaataagtttggttctctcttgagtgtgttttgtgttagcataatttctgtctctagagtgctttacactctagtaggggctgtacccgggcggtcccactcttcacaggaatctgcacaggtggctttcacctctggacagtgcattccatacccgctccacaatagaagatgatgtatatctttgtttgtgaaatgctcatgaaacgtgtgtgtaggcgtagcggctacttgaatgccagcggaacccccctagtggtaacactagcctctgggcccaaaaggcatgtctctgaccattcaagtacacaaccccagtgatacacacatttagtaatggctcagtaatggacattgattgatcatcagacaattgttaggaggcctaggtatgacgggctgaaggatgccctggaggtacccgcaggtaaccttaagagactgtggatctgaccaggggcccaccatggaaacatgggtagaagtcttcggaccttgggttaaaaaacgtctaggcccgccccccacagggatgtggggtttcccttataaccccaatatcacatt

SEQ ID NO: 2782 - DNA, 788 bp, unidentified
  source 1..788: mol_type = unassigned DNA; note = unclassified environmental samples sequence
cgataaaccggttatggagaccttctttggagaataatattttaaccgttattagctctttagaacttaaaaggatgattaatttctttgcacttctcccgtgctttatagattttacctatatgtgagttaaccctctcactccaatttgccctgagtgggcataaataactgaacgacggtatgtactttgtacgattccgtgaccagatgaatatagctgatgagtatcttagactcagcttgtatcttcattattggttaaccaaccttaccctcattaataaactgaatcccatatgggtccgtttcttgtttcttttgaattattattaaatctgaaaaggtaacatgtagttgtgaggcatgaggtactaccttagaaaggaatagaatttttggtttctctccgtctagaacaatgacggagtctcgcttgaaccctttgttattattgatcgtcacacaccagtgacattccgagtaagcatttatattgactactttgggcttgcacgatcagtccccaggctgatctctccccatcttatatcttgaatatgactatactcattgatctctaatacttagttattacacagcgtttctcttgattggtttcgaaaacgtgcgagagttttatacgcctgttaacccaggtaccatttcgttgatgcgattatctcgcaaaagaaactttttacggccaacatgaatggttagcccccttatagcctagcgatattatttatttaattttcagttaggcatcacaaataattcccacc

SEQ ID NO: 2783 - DNA, 807 bp, unidentified
  source 1..807: mol_type = unassigned DNA; note = unclassified Passerivirus sequence
ttgaaagccccacctggggggctttccctgtgctgcgacctgtcgctaaccaagaggcatgacctcaagattggacccacagtcgccacaggtgtccgttgatacgctccggacctaacccggataatgtaacatcaaattatttaagatttatgagcttatatactgttatgaacaccagtaaacatgttagattaagagcaaaacacccccctcgtcaattctagaagtccgcgagggatttagggtagcaaactaggaatctagatgcatattcttgttttaaaacccacgctgcaagtgatctgttcactctcatccaccctcagggtggtcagtgtggtgagtcatagcgacacctaacagaggctaacctagtaactcttgtgaagttcaacacgctgacaggattccacgtccgtttactgctagcattcccgctcagagggtggcccaagtaattggtgctctgagtgtgcgtgagctagtatcccgcgagggataggtgtgttgtaatgacacaagttggtgaaaggtaaagtgctttaggctagctactggcccattggctacgagtagacatgtgcaggaggtacccgctcatcttagcggatgtgacctgtagctaattagtcaatgctcgctgtagaaatcttttccccttttttcttttatatacagagtgattcgcatttgtattgaagattgtgtgcctagtgtatcttggtattatcagaggaagcaatttaaactggattttcaattaggaggattaaaaccttgttaactttttataagcattataaa

SEQ ID NO: 2784 - DNA, 833 bp, Cardiovirus B
  source 1..833: mol_type = genomic DNA
tttccggcccaggctaagagaaacatataagttagatttgatccaaatttcttgacgaattcggaacgagatgttctccctcccttgccgcttgttcacacccataactctgattcggccctttgtgacaagccccttggtgaaagaacctctctccttccgacgtggttggaattaacatcacttccgacgaaagtgctatcatgcctccccgattgtgtggtgttttctgccctgctgggcggagcattttcgggttgagaaaccttgaatcctttcttttggaaccttggttcccccggtctaagccgcttggaatatgacagggttattttctttattcttatttctacttttatgggttctatccatgaaaagggtatgtgctgccccttccttctttggagaattcacacggcggtctttccgtctctcaacaagtgtgaatgcagcatgccggaaacggtgaagaaaacagtcttctgtggaagtctagagtgcacatcgaaacagctgtagcgacctcacggtagcagcggaatcccctcttggcgacaagagcctctgcggccaaaagccccgtggataagatccactgctgtgagcggtgcaaccccagcaccctgattcgatggttactctctacggaatcaaaagatggttttctcaagccctccggtagagaagccaagaatgtcctgaaggtaccccgcgtgcgggatctgatcaggagaccaattgacagtgctttacactgtcactttggtttaaaaactgtcacagcttctccaaaccaagtggtcttggttttccactttttattgaatggtaat

SEQ ID NO: 2785 - DNA, 963 bp, Cardiovirus B
  source 1..963: mol_type = genomic DNA
tttgaacgcgggacctgcgatagtgccaacccacgtcttttcccactcctaacccggttcccacctcgggtccattgtaaggaccagatatatcatcccttgaatgctggctaatcagaggaaagtcagcattttccggcccaggctaagagaaacatataagttagaaatgattctaatcccttgacgaaatcagaacgagatgttctccctcccttgccgcttgttcacacccactttattgattcggccttttgtgacaagccccttggtgaaaggacctctctctttctggcgtggttggaattaacatcctttccgacgaaagtgctaacatgcctccccgattatgtgatgttttctgccctgctgggcggagcattctcgggttgagaaatctcagaacttttcctttggaactttggttcccccggtctaagccgcttggaatatgacagggttattttcttaatcttatttctacttttatgggttctatccataaaaagggtatgtgctgccccttccttctttggagaattcacacggcggtctttccgtctctcagcaagtgtgaatgcagcatgccggaaacggtgaagaaagcagttttctgtggaagtctagagtgcacatcgaaacagctgtagcgacctcacagtagcagcggactcccctcttggtgacaagagcctctgcggccaaaagccccgtggataagatccactgctgtgagcggtgcaaccccagcaccctgattcgatggtcattctctacggaaccagagaatggttttcctaagccctccggtagagaagccaagaatgtcctgaaggtaccccgcgtgcgggatctgatcaggagaccaattgacagtgctttacactgccactttggtttaaaaattgtcacagcttctccaaaccaagtggtcttggtttttcaactttattgaatggcaat

SEQ ID NO: 2786 - DNA, 992 bp, Foot-and-mouth disease virus
  source 1..992: mol_type = genomic DNA
ttgaaagggggcgctagggtctcacccctagcatgccaacgactgctcctacgtcgcactccacacttatgtgtgcgcgcgcgggaatcgatggactatcgttcacccacctacagctggactcacggcaccgcgtggccattttagctggactgtgcggacgaacaccacttgcgcacctcgcgtgactggttagtactcttaccactctccgcctacttggtcgttagcgctgtcttgggcactcctgttgggggccgttcgacgctccacggtttcccccgtgccgcacactacggtgttggggccgtttcgtgcgagtcgatcgcctggtgtgcctcggctgtcacccggcgcccgcctttcatttttaccgtcgttcccggcgttaacgggatgtaatcgcaagatttgccttcgcccggaagtgaaacggcaacttcacacacttttgcccgttttcatgagaaacgggacgtcagcgcacgaaacgcgccgtcacttgaggaacacttgtacaaacacgtttcacgcaggtctccacgactgacataaatcgtgcaacttgaagctccgcctggtctttccaggtctagaggggtgacattttgtactgtgtttgactccacgcttggtccaccggcgagagttagtagcagcactgttgcttcgtagcggagcatgatggccgtgggaacccctccttggtaacaaggacccacggggccgaaagccacgtcctaacggacccatcatgtgtgcaaccccagcacggcaactttactgtgaaagccactttaaggtgacactgacactggtactcaaccactggtgacaggctaaggatgcccttcaggtaccccgaggtaacacgcgacactcgggatctgagaaggggactgggacttctttaaagtgcccagtttaaaaagcttctatgcctgaataggtgaccggaggccggcaccttttctcaattaacactgtaatct

SEQ ID NO: 2787 - DNA, 1000 bp, unidentified
  source 1..1000: mol_type = unassigned DNA; note = unclassified Picornaviridae sequence
tacccccctgcatctcttgtctgaagcgtccaatatatttggtcaccgttttggacagattgtaacggttctacctgcatctcttttcaatgactggcaaagtgcccggattagatatattaagtctttcgtagttagcttaggcgtggtgaaaattgactttttatatgctaatcaatccaaaacaaatttgcttgcatttttgtcccaccttcgggtgggttctttttagaacaggtttatcaatgtgacaagttgtgcgacctctagagaaaaatgtcaaaatactcggttcagaccggggttttaataactacatatattgatcgattattgaattgtagtcctcgccagttactaccagatgacggaggatgcatctaatatcatcccaaattaggtgtctcccaactttttggtaattaatgatatatatgtgtgtgttaaaatgtataaacacttttaagtaagaaagtgtagcactttcaaggttgtactcgttttgatactggttattttaactttatatataatttcccttttccctcataagtacacccacgtaatcgtggtaccgctatgacatcatacgggggtgaaaagtgtggctgacagtcccggcaacgttaattcggcggcggtttcctgcagtgtattctgcctcgggctccggtatgtgttatctaagataacagtagggaaattatttgatagctggtaatccttatcttaattagtgcagcgacggagtctttagtgagactaccaaacacggctagcttaatgctaacggtccgatgaaaggctggcggtcggaggatcacatatctctaagatatggtcgtgcagtatccgcccggggtttaaggcaacgggtcccctaatgtccgaatggaatccttttcttttatggtgacaccagtactttatttcgataaagtgctttatatgtgttattcctttataatatttttttcaatttattatataaatatctatc

SEQ ID NO: 2788 - DNA, 1000 bp, Foot-and-mouth disease virus
  source 1..1000: mol_type = genomic DNA
cgttagactgtcgttcaaccacctccagttggactcacggcaccgcgtggccattttagctggattgtgcggacgaacaccgcttgcgcaactcgcgtgaccggttagtactcttaccaccttccgcctacttggtcgttagcgctgtcttgggcacacctgttggggttagttcgacgctctgcggtatcccccgcgtgacggactacggtgctggggccgcctcgtgcgagccgatcgcctggtgtgcttcggctgtcacccggcgcccgcctttcatcccccctaagttttaccgtcgttcccgacgttaaagggaggtaaccacaagcttgataccgtcttgtccgacgttaaagggctgtaaccaaaagcttgtaccgcctttccccggcgttaatgggatgtaaccacaagatgaaccttcacccggaagtaaaacggcaacttcacacagttttgcccgttttcgtgagaaatgggacgtctgcgcacgaaacgcgccgtcgcttgaggaggacttgtacaaacacgatctacgcaggtctccacaactgacacaaaccgtgcaacttgaaactccgcctggtctttccaggtctagaggggtgacattttgtactgtgcttgactccacgctcggtccactagcgagtgtcagtagtagcactgttgcttcgtagcggaacatgatggccgtgggaacccccccttggtaacaaggacccacggggccgaaagccacgcctaacggacccatcatgtgtgcgatcccggcacggcaactttactatgaacatcactttaaggtgacgctgaaactggtactcaaacactggtgacagactaaggatgcccttcaggtaccccgaggtaacaagcgacactcgggatctgagaaggggactgggacttctttaaaagtgcccagtttaaaaagcttctatgtctgaataggcgaccggaggccggtgcctttcctttaactactactactttt

SEQ ID NO: 2789 - DNA, 1000 bp, Foot-and-mouth disease virus
  source 1..1000: mol_type = genomic DNA
cggtggactgttgttcacccacctacagctgaactcacagcaccgcgtggccattttagctggcttgtgcggacgaacaccgcttgcgcatctcgcgtgaccggttagtactcttaccacttgccgcctacttggtcgttcgcgctgttttgggtactcctgttgggggccgttcaacgctctacggtctcccctgcgtaacagactacggtgatggggccgcttcgtgcgagttactcgcctggtgtgcttcggctgtcacccggcgcccgcctttcatcccccctaagttttaccgtcgttcccgacgttaaagggatgtaaccacaagcttgaaccgccttgcccgacgttaataggctgtaaccacatgcttgtaccgcctttcccggcgttaacgggatgcaaccacaagatggaccctcactcgggaagtaaaacgacaaacacactcagttttgcccgttttcacgagaaatgggacgtctgcgcacgaaacgcgccgtcgcttgaggaagacttgtacaaacacgatctatgcaggtttccacaactgacacacatcgtgcaacttgaagctccgcctggtctttccaggtctagaggggtgacactttgtactgtgcttgactccacgctcggtccactggcgggagtgagtagcagaactgttgcttcgtagcggagcatggtggccgtgggaacccccccctggtgacagggacccacgggccgaaagccacgtcctaacggacccaccatgtgtgcaaccccagcacggtaactttactgtgaaaaccactttaaggtgacactgatactggtactcaaccactggtgacaggctaaggatgcccttcaggtaccccgaggtaacacgcgacactcgggatctgagaaggggactgggacttctttaaaagtgctcagtttaaaaagcttctatgcctgaataggcgaccggaggccggcgcctttctcttaaaccactactacatta

SEQ ID NO: 2790 - DNA, 1000 bp, Foot-and-mouth disease virus
  source 1..1000: mol_type = genomic DNA
gatggactgtcgttcacccacctacagctggactcaaggcaccgtgtggccattttagctggattgtgtggacgaacaccgcttgcgcacctcgcgtgaccggttagtactctcgacaccttccgcctacttggtcgtcagcgctgtcctgggcactcctgttgggggcgctccgacgctctacggtctcccccgtttgacgggctacggtgatagggccgcctcgtgcgagttggtcgtctggtgtgcttcggctgtcacccggcgcccgcctttcatccccccctaagttttaccgtcgttcccgacgttaaagggatgtaaccacaagctttggaccgtcttgtccgacgttaacgggctgtaaccacatgcttgtaccgcctttcccggcgttaacgggatgtaaccacaagatataccttcacccggaagtaaaacggcaaacccattcagttttgcccgttttcatgagaaatgggacgtcagcgcacgaaacgcgccgtcgcttgaggaagacttgtacaaacatgatctatgcaggtttccacaactgacacacatcgttcaacttgaaactccgcctggtctttccaggtctagaggggtgacactttgtactgtgattgactccacgctcggtccactggcgggtgctagtaacagggactgttgtttcgtagcggagcatgatggctgtgggactccctccttggtaacaaggacccacggggccaaaagccacgtcctaacggacccatcatgtgtgcaaccccagcacggcaactttactgtgaaaaacactttaaggtgacactgatactggtactcaaccactggtgacaggctaaggatgcccttcaggtaccccgaggtaacacgcgacactcgggatctgagaaggggactggggcttctttaaaagcgcccagtttaaaaagcgtctatgcctgaatgggcgaccggaggccggcgcctttcttttactactacttaactg

SEQ ID NO: 2791 - DNA, 1000 bp, Foot-and-mouth disease virus
  source 1..1000: mol_type = genomic DNA
gttggactgtcgttcacccacctacgactggactcactgcaccgcgtggctaccctagttggatagtgcggacgaacaccacttgcgcacctcgcgtgactggttagtactcttaccactctccgcctgcttagtcgttagcgctgttttgggcactcttgttgggggccgttctacgctccacgttctctcccgtgcaacggactacggcgttggggccgctccgtgcgagcagctcgcttggtgtgtttcggttgtcactcggagcccacctttcacccccctccccctaagtaatgccgtctttcccgacgttaaagggaggttaccgcaagctcagtaccgccttgcccggcgttaagggcctgtaaccacacgcttacaccgcttttcccggcgttacgggatgcaaccgtaagatgatccttcaaccggaagtaaaacggaaacacgcacattttgcccgttttctgagaaacgggacgtcggcgcacgaaacgcgcagtcgctcgcgggacacttgtacaaacacgactcacgcaagattccacgactgacacaactcgtgcaacttgaaactccgcctggtctttccaggtctagaggggtgacactttgtactatgactgactccacgctcggtccactggcgggtgttagtaatggcattgttgtttcgtagcggagcgtagtggccgtgggaactcctccttggcaacaaggacccacggggccaaaagccacgtcctagcggacccactacgtgtgcgacccaggcacaacaaccttgctgtgaaaaccaccttaaagtgacactgatactggtactcagccattggtgacaggctaaggatgcccttcaggtaccccgaggtaacatgagacactcgggatctgagaaggggactggggcttctttaaaagcgcccagtttaaaaagcttctatgcctgaataggcgaccggaggccggcgcctttccattacctaccactacttga

SEQ ID NO: 2792 - DNA, 1000 bp, Foot-and-mouth disease virus
  source 1..1000: mol_type = genomic DNA
gcgcgtggggaccgctggactaccgttcacccacctacggctggactcacggcaccgcgtggccattttagctggaatgtgcggacgaacgccacttgcgcacctcgcgtgactggttaatactcttaccactttccgcctacttggtcgttagcgctgtcttgggcactcccgttgggggccgttcggcgctccacggtttcccacacacggcaaactacggtgatggggccgctccgtgcgagttgatcgcctggtgtgctcggcgtcacccggcgcccgcctttcatttttaccgtcgttcccgacgtttaaagggaggtaaccacaagcttacaaccgtcttgtccgacgttaaagggctgtaaccacaagcttgtaccgcctttcccggcgtcaaagggatgtaaccgcaagatacgccttcacccggaagtaaaacggcaacttaacacagttttgcccgttttcacgagaaacgggacgtttgcgcacgaaacgcgccgtcacttgaggaagacttgtacaaacacgatccacgcaggtttccgcaactgacaagaaccgtgcaacttgaagctccgcctggtctctccaggtctagaggggtgacactttgtactgtgcttgactccacgctcggtccactggcgagtgttagtaacagcactgttgcttcgtagcggagcatggtggccgcgggaactcctccttggtgacaaggacccgcggggccgaaagccacgtcctaaccgacccaccatgtgtgcgaccctggcacggcaactttactgtgaaacccacttcaaggtgacactgatactggtactcaaccactggtgacaggctaaggatgcccttcaggtaccccgaggtaacacgcgacactcgggatctgagaaggggactggggcttctttaaaagcgcccggtttaaaaagcttctacgcctgaataggtgaccggagccggcacctttccttttgaactaccaatttta

SEQ ID NO: 2793 - DNA, 1000 bp, Foot-and-mouth disease virus
  source 1..1000: mol_type = genomic DNA
tcgcgggaaccgatggactgtcgttcacccacctacagctggactcacggcaccgcgtggccattttagctggattgtgcggacgaacaccgcttgcgcatcttgcgtgaccggtcagtactcttaccaccttccgcctacttggtcgttagcgctgttctgggcactcctgttgggggccgttcgacgctccacggtctcccccgtctgacggactacggtgatggggccgcctcgtgcgggttggtcgtttggtgtgcttcggctgtcacccggcgcccgcctttcatttttaccgtcgttcccgacgttaaagggatgaaaccacaagcttgaaaccgtcttgcccgacgttaatgggttgtaccacacgcttgtaccgcctttcccggcgtcaacgggatgtaaccacaagataaaccttcatccggaagtaaaacggcaaccacactcagttttgcccgttttcatgagaaatgggacgtctgcgcacgaaacgcgccgtcgcttgaggaagacttgtacaaacacgatctatgcaggtttccacaactgacacaaaccgtgcaatttgaaactccgcctggtctttccaggtctagaggggtaacactttgtactgtgtttgactccacgctcggtccaccagcgagtgttagtaacagcactgttgcttcgtagcggagcatgatggccgcgggaattcccccttggtgacaaggacctgcggggccgaaagccacgtcctaatggacccatcatgtgtgcaaccccagcacggcagctttgctgagaaaaccactttaaggtgacactgatactggtactcaatcactggtgacaggctaaggatgcccttcaggtaccccgaggtaacaagtgacactcgggatctgagaaggggacaggggcttctttaaaagcgccctgtttaaaaaacttctatgcctggataagcgaccggaggccggcgcttttctaccaaaccactactgacttg

SEQ ID NO: 2794 - DNA, 1000 bp, Foot-and-mouth disease virus
  source 1..1000: mol_type = genomic DNA
cgcgggaatcgatggactatcgttcacccacctacagttggactcacggcaccgcgtggccattttagctggactgtgcggacgaacaccacttgcgcacctcgcgtgactggttagtactcttaccactttccgcctacttggtcgttagcgctgtcttgggcactcctgttgggggccgttcgacgctccacggtttcccccgtgccgcacactatggtgttggggccgcttcgtgcgagacgatcgcctggtgtgcttcggctgtcacccggcgcccgcctttcatttttaccgtcgttcccgacgttaaagggagataaccacaagctcaacgccgtcttgcccgacgttaaaggactgtaaccgtaagcttgtaccgcctttcccggcgttaacgggatgtaaccgcaagatttgccttcacccgggaagtaaaacggcaatttcacacagttttgcccgttttcatgagaaatgggacgtcagcgcacgaaacgcgccgtcacttgaggaagacttgtacaaacacgcttcacgcaggtctccacaactgacacaaatcgtgcaacttgaaactccgcctggtctttccaggtctagagggtgacattttgtactgtgtttgactccacgcttggtccaccggcgagagttagtaacagcactgttgcttcgtagcggagcatgatggccgtgggaacccctccttggtaacaaggacccacgggccgaaagccacgtcctaacggacccatcatgtgtgcaaccccagcacggcaactttactgtgaaagccgctttaaggtgacactgatactggtactcaaccactggtgacagctaaggatgcccttcaggtaccccgaggtaacacgcgacacttgggatctgagaaggggacagggacttctttaaaagtgccccagtttaaaaagcttctatgcctgaataggtgaccggaggccggcaccttttctcaattaacactgaaatctta

SEQ ID NO: 2795 - DNA, 1000 bp, Foot-and-mouth disease virus
  source 1..1000: mol_type = genomic DNA
acgcgggaaccgatggactgttgttcacccacctacggctggactcacggcaccgtgtggctatgatagctgaattgtgcgaacgaacgccgcttgcgcatcttgcgtaaccggttagtacctttataactctccgcctacatggtcgtcagcgctgtcctgggcacacccgttggggaccgttcgacgttctacggtttcccccgtataacaaactacggtaatggggccgcttcgcgcgagccgatcgcctggtgtgcagcggctgtcacccggcgcccgcctttcatttttaccgtcgttcccgacgttaaagggttgtaaccacaagcttggaaccgtcttgcccgacgttaacgggctgcaaccacacgcttgtaccgctttcccctgcgttaaaggggtgtaaccacaagatgtaccttcgcccggaagtaaaacggcaatcacactcagttttgcccgttttcatgagaaacgggacgtcagcgcacgaaacgcgccgtcgcttgaggaagacttgtacaaacacgatccacgtaggtttccacaactgacacaaaccgtgcaatttgaagctccgcctggtctttccaggtctagaggggtgacactttgtactgtgcttgactccacgctcggtccactagcgagtgttagtagcaacactgttgtttcgtagcggagcatgatggccgtgggaactcccccttggtaacaaggacccacggggccgaaagccacgtcctaacggacccatcatgtgtgcaaccccggcacggcaactttgttgtgaaagccactttaaggtgacactgatactggtacccaaccactggtgacaggctaaggatgcccttcaggtacacccaagtaacaagcgacactcgggatctgagaaggggactgggacttctgtaaaagtgcccagtttaaaaagcttctatgcctggataggcgaccggaggccggcgcctttcctttacctattactgttttc

SEQ ID NO: 2796 - DNA, 1000 bp, Foot-and-mouth disease virus
  source 1..1000: mol_type = genomic DNA
cgtgcactgccgggaaccgatggactgtcgttcacccacctacagctggactcacagcaccgcgtggccattttagctggactgtgcggacgaacaacgcgtgcgcatctcgcgtgaccgtttagtactcttaccactttccgcctacttggtcgctagcgctgcttttgggcactcctgttgggggccgtccgacgctccacggtctcccctgtgacggactacggtgatggggccgcctcgtgcgagttggtcgtttggtgtgctttggctgtcacccggcgcccgcctttcatttttaccgtcgttccggcgtaaaggggaggtagccataagcttgcaacgtctgcccgacgtaaaggctgtaaccgcaagattgtaccgcctgcccggcgttaaacgggctgcagccacaagatgaaccttcacccggaagttaaacggcaaacttgctcagttttgcccgttttcaggagaaatgggacgtctgcgcacgaaacgcgccgtcgcttgaggaggacttgtacaaacgcgattcattcaggttcccacaaccgacacaaaccgtgcaacttgaaacctcgcctggtctttccaggtctagaggggtgacattttgtactgtgtttgactccacgctcggtccactggcgagtgttagtaacagcactgttgcttcgtagcggagcatggtggccgcgggaattcctccttggtaacaaggacccgcggggccgaaagccacgtcctcacggacccaccatgtgtgcaaccccagcacggcaactttactgtgaaaaccactttaaggtgacgctgatactggtactcaaccactggtgacaggctaaggatgcccttcaggtaccccgaggtaacctgcgacactcgggatctgagaaggggactggggcttctttaaaagcgcctagtttaaaaagcttctatgcctgaataggtgaccggaggccggcacctttcctttaaacaactactttca

SEQ ID NO: 2797 - DNA, 1000 bp, Foot-and-mouth disease virus
  source 1..1000: mol_type = genomic DNA
tgtggggaccgctggactaccgtccacccacctacggctggactcacggcaccgcgtagccattttagctggactgtgcggacgaacgccacttgcgcaccccgcgtgactggttaatactcttaccactttccgcctacttggtcgttagcgctgccctgggcactcccgttgggggccgtccggtgctccacggttcccacgcatgacaaactacggtgatggggccgcttcgtgcgagttgatcgcctggtgtgtttcggctgtcacccgaagcccgcctttcacaagttttaccgtcgttcccggcgttaaagggaggtaaccacaagcttgcaactgtcttgctcgacgataaagggctgtgaccgcaagatgataccgcctttcccggcgttaattggatgcaaccacaagatgaaccttcacccggaagtaaaacggcaaattcgcctagttttgcccgttttcaggagaaatgggacgtctgcgcacgaaacgcgccgtcgcttgaggaggacttgtacaaacacgatctattcaggttcccacaaccgacacaaaccgtgcaacttgaaactccgcctggtctttccaggtctagaggggtgacattttgtactgtgcttgactccacgctcggtccactggcgagtgctagtaacagcactgttgcttcgtagcggagcatggtggccgcgggaactcctccttggtaacagggacccgcggggccgaaagccacgtcctcacggacccaccatgtgtgcaaccccagcacggcaactttactgtgaaaaccactttaaggtgacactgatactggtactcaaccactggtgacaggctaaggatgcccttcaggtaccctgaggtaacacgcgacactcgggatctgagaaggggactggggcttctttaaaagcgcctagtttaaaaagcttctacgcctgaataggtgaccggaggccggcacctttcttttaaacaactactttta

SEQ ID NO: 2798 - DNA, 1000 bp, Foot-and-mouth disease virus
  source 1..1000: mol_type = genomic DNA
gcgggacccgatggactttcgttcacccacctacagctggactcacggcaccgcgtggccattttagctggattgtgcggacgaacaccgcttgcgcacctcgcgtgaccggttagtactcttaccactctccgcctacttggtcgttagcgctgtcttgggcactcctgttgggggccgttcgacgctccacgggctctcctgtgtgacatctacggtgatggggccgtttcgcgcgggctggtcgtctggactgcttcggctgtcacccgacgcccgcctttcataggttttaccgtcattcccgacgtaaaagggaggtaaccacaagcttgaaaccgtccggcccgacgtaaaagggtggtaaccacaagcttactgccgtctttcccgacgttaaagggatgaaaccacaagacttaccttcgctcggaagtaaaacgacaaacacacacagttttgcccgttttcatgagaaatgggacgtctgcgcacgaaacgcgccgtcgcttgaggaggacttgtacaaacacgatctatgcaggtttccccaactgacacaaaccgtgcaacttgaaactccgcctggtctttccaggtctagaggggtaacactttgtactgagtttgactccacgctcgatccactagcgagtgttagtagcggtactgctgtctcgtagcggagcatgttggccgtgggaacacctccttggtaacaaggacccacggggccgaaagccacgtcctaacggacccaacatgtgtgcaaccccagcacggcagctttactgtgaaacccacttcaaggtgacattgatactggtactcaaacactggtgacaggctaaggatgcccttcaggtaccccgaggtaacaagcgacactcgggatctgagaaggggactgggacttctttaaagtgcccagtttaaaaagcttctatgcctgaataggtgaccggaggccggcacctttccttttataaccactgaatac

SEQ ID NO: 2799 - DNA, 1000 bp, Foot-and-mouth disease virus
  source 1..1000: mol_type = genomic DNA
ccacacttacctttgcgtacgcgcaggaaccgatggactttcgttcacctacctacagctggactcacggcaccgcgtggccattttagctggattgtgcggacgaacaccacttgcgcatttcgcgtgaccggttattactcttaccactttccgcctacttggtcgtcagcgctgtcctgggcacgcctgttgggggctgttcgacgctctacggtctcctccgcgtggcagactacggtgttggggccgcttcgtgcgagtcgctcgcctggtgtgctttggttgtcacccgaagcccgcctttcacaagttttaccgtcgttcccgacgttaaagggaggtaaccacaagcttgataccgtcttgcccgacgttaaaggctgtaaccataagcttgtaccgcctttcccggcgttaacgggatgcaaccacaagataaaccttcacccggaagtaaaacggtaacttcacacagttttgcccgcttttaccagaaacgggacgtctgcgcacgaaacgcgccgtcgcttgaggaagacttgtacaaacacgatctatgcaggtttccacaactgacacaaatcgtgcaacttgaaactccgcctggtctttccaggtctagaggggtgacattttgtactgtgctcgactccacgctcggtccactagcgggtgttagtaacagcactgttgcttcgtagcggagcatggtggccgcgggaactcctccttggtaacaaggacccacggggccaaaagccacgtcctaacggacccaccatgtgtgcaaccccagcacggcaactttactgcgaaaaccactttaaggtgacactgatactggtactcgaccactggtgacaggctaaggatgcccttcaggtaccccgaggtaacatgtgacactcgggatctgagggggactgggacttctttaaaagtgcccggtttaaaaagcttctatgcctgaataggcgaccggaggccggcgcctttc

SEQ ID NO: 2800 - DNA, 1000 bp, Foot-and-mouth disease virus
  source 1..1000: mol_type = genomic DNA
gtccctgcgttgcactccacacttacgtttgtgaacgcacgggaaccgatggactttcgttcacccacctacagctggactcacggcaccgcgtggccatttagctggattgtgcggacgaacaccgcttgcgcttttcgcgtgaccggttagtactcttaccaccttccgcctacttggtcgttagcgctgtcttgggcactcctgttgggggctgttcgacgctctacggtctcccctgcgtgacagactacggtgtttggggccacctcgtgcgagccgctcgcctggtgtgtttcggctgtcacccggcgcccggctttcatcccccctaagttttaccgtcgttcccgacgttaaaggactgtaaccacatgcttgtaccgcctttcccggcgttaacgggatgtaaccacaagataaaccttcacccggaagtaaaacggcaacttcactcagttttgcccgttttcgagaaatgggacgtctgcgcacgaaacgcgccgtcgcttgaggaagacttgtacaaacacgatatatgcaggtttccacaactgacacacatcgtgcaacttgaagcctcgcctggtctttccaggtctagaggggtgacattttgtactgtgtttgactccacgctcggtccactggcgagtgttagtaacagcactgttgcttcgtagcggagcatgatggccgcgggaatccctccttggtaacaaggacccgcggggccgaaagccacgtcctgacggacccatcatgtgtgcaaccccagcacggcaactttactgtgaaactcactttaaggtgacactgatactggtactcatccactggtgacaggctaaggatgcccttcaggtaccccgaggtaacacgcgacactcgggatctgagaaggggactgggacttctttaaaagtgcctagtttaaaaagcttctatgcctgaataggcgaccggaggccggcgcctttctctaaccactaattaattg

SEQ ID NO: 2801 - DNA, 1000 bp, Foot-and-mouth disease virus
  source 1..1000: mol_type = genomic DNA
caactggactttcgttcacccacccacggctggactcacggcaccgtgtggccacttttctggactgtgcggacgaacgccgcttgcgcatctcgcgtgaccggttagtactcttaccaccttccgccaacttggtcgtcagcgctgtcttgggcactcccgtcgggggccgttcgacgctccactgtttctcttgtgtgctagactacggtgatggggctgtttcgcgcgggctgatcgcctggcgtctaggcgaacgcccgaagcctgcctttcacccccatcaccgtaagtaataccgtcttttccgacgttaaaggatagcaaccgcaagcttgctgccgtcttggccgacgttaaagggctgtaaccacaagcttgcaccgccttccccggcgtaaaatggatgtaaccgcaagaagaaccttcacccggaagtaaaacggcaacgttcacacttttgcccgttttgaagaaatgggacgtcagcgcacgaaacgcgccgtcgcttgaggatgacttgtacaaacacgatctacgcaggtatccacaactgacacaaaaccgtgcaatttgaagttccgcctggtctttccaggtctagaggggcgacactttgtactgtgattgactccacgctcggtccactagcgagtgctagtagtggtatcgtcgtttcgtagcggagcatggcggccgtgggatctcctccttggtgacaaggacccacggggccgaaagccacgccctaacgggcccgccatgtgtgcaaccccagcacggcaactttaccacgaagaccactttaaggtgacactgaaactggtactcaaccactggtgacaggctaaggatgcccttcaggtaccccgaggtaacacgcgacactcgggatctgagaaggggactgggacttctttaaagtgcccagtttaaaaagcttctatgcctgaataggcgaccggaggccggcgcctttccattaaccactactcaccac

SEQ ID NO: 2802 - DNA, 1000 bp, Foot-and-mouth disease virus
  source 1..1000: mol_type = genomic DNA
acgcgacactagggtgtcgccctagtgtcgcgtaccgaccgtcaccggttgaaacgctactgctcagacctctggctgtcgtacctctattaggcaggcaggaaccacccttttggggcccacgcgttttcgcccttttggggcccgcggtcaccacaccgcgcctccactaggctgacaaccgtgcctcctctaggctgacaactgtcgcccttttagggcctacgaccttcaagttacggctttagcgtccctcccgctgccgactcgcctacgtgaacgctagctcgtcacccgacggcctacctttcacccgggccgtcttaaagaacgtctccgtcttttccgacgttaatggattgtaaccaaacgctcttgccgtcgtgtccgacgttaaaggactgtaaccataagaaacaccttcccgcaggaagtaaaacatgcacaaagtaaccagttttgcccgttttcatgagaaatgggacgtccgcgcacgaaacgcgccgttgctctttgcattcttgtacaaacacgatctcacgcaggaatctcagaccaactcaacccgtgcatctgcaagtttcgcccggtctttccgggtctagagagacaaacagttgtactgagaccgactccacgattagtctactggcgggtattagtaacactcactttgcttcgtagcggagcacttgagcggtgggagtccccccatggtaacatggacccaccgggccaaaagccacgcttcatgcctcaagtgtgtgcaaccccagcacggcaatttgattgtgaaacctatcttaaggtaacactgagactggtacttggtttctggagacaggctaaggatgtccttcaggtaccccgaggtaacatgcgacactcgggatctgagaaggagactgggagttctgtaaaactgcccggtttaaaaagcttctatgcctgaataggtgaccggaggccggcaccttttccttttaccacaactaatttt

SEQ ID NO: 2803 - DNA, 1000 bp, Foot-and-mouth disease virus
  source 1..1000: mol_type = genomic DNA
atcggcagctcttgcgttgcactccacacttacgcccgtgcactgacgggaaccgatggactgtcgttcagccacccacagctggactcacagcaccgcgtggccattttagctggactgtccggacgaacaacgcttgcgcacttcacgtgaccgtttagtactcttaccactttccgcctacttggtcgttagcgctgcttttgggcactcctgttgggggccgtccgacgctccacggtctcccctctgtgacggactacggtgatggggccgcctcgtgcgagttagtcgtttggtgtgctttggctgccacccggcgcccgcctttcatttttaccgtcgttcccgacgttaacgggttgtaaccacacgcttgtaccgcctttcccggcgttaacgggatgtaaccataagatagaccttcacccggaagtaaaacggcaactacactcagttttgcccgttttcatgagaaatgggacgtctgcgcacgaaacgcgccgtcgcttgaggaagacttgtacaaacacgatctatgcaggtttccacaactgacacacaccgtacaatttgaagctccgcctggtctttccaggtctagaggggcgacactttgtactgtggctgactccacgctcggtccactggcgggtgtgagtaacaggactgttgcttcgtagcggagcatgttggccgtgggattccccccttggtaacaagggcccacggggccgaaagccacgtcttaacggacccaacatgtgtgcaaccccagcacggcaactttactgtgaaaaccactttaaggtgacactgatactggtactcaaccactggtgacaggctaaggatgcccttcaggtaccccgaggtaacatgcgacactcgggatctgagaaggggactggggcttctttcaaagcgcccagtttaaaaagcttctatgcctgaataggcgaccggaggccggcgcctttcttttaccattactaaacca

SEQ ID NO: 2804 - DNA, 1000 bp, Foot-and-mouth disease virus
  source 1..1000: mol_type = genomic DNA
ggcagctcctgcgttgcactccacacttacgcccgtgcactcgcgggaaccgatggactgtcgttcacccacctacagctggactcacggcaccgcgtggccattttagctggattgtactcttaccaccttccgcctacttggtcgttagcgctgtcctgggcactcctgttgggggccgttcgacgctccacggtctcccccgcctgacggactacggtgatggagccgcctcgtgcgggttggtcgtttggtgtgcttcggttgtcacccggcgcccgcctttcatttttaccgtcgttcccgacgttaaagggatgaaaacacaagcttgaaaccgtcttgcccgacgttaatgggttgtaaccacacgcttgtaccgcctttcccggcgttaacgggatgtaaccacaagacaaaccttcacccggaagcaaaacggcaaccacattcagttttgcccgttttcatgagaaacgggacgtctgcgcacgaaacgcgccgtcgcttgaggaagacttgtacaaacacgatctatgcaggtttccacaactgacacaaaccgtgcaatttgaaactccgcctggtctttccaggtctagaggggtaacactttgtactgtgtttgactccacgctcggtccaccagcgagtgttagtaacagcactgttgcttcgtagcggagcatgacggccgcgggaatccccccttggtgacaaggacccgcggggccgaaagccacgtcctgatggacccgtcatgtgtgcaaccccagcacggcagctttgctgagaaaaccactttaaggtgacactgatactggtactcaatcactggtgacaggctaaggatgcccttcaggtaccccgaggtaacaagtgacactcgggatctgagaaggggacaggggcttctttaaaagcgccctgtttaaaaagcttctatgcctggataagcgaccggaggccggcgcttttctactaaaccactactgacttg

SEQ ID NO: 2805 - DNA, 1000 bp, unidentified
  source 1..1000: mol_type = unassigned DNA; note = unclassified Aphthovirus sequence
agggggcactagggcgagaccctagtgtcgcgtaacgaccgtcaccggttgaaacgctactgctcagacctctggctgtcgtacctctattaggcagacaggaaccacccttttggggcctacgcgttctcgcccttttggggcccgcggctgtacgccgcgcctccactaggctgacaaccgtgcctcctctaggctgacaactgtcgcccttttagggcctacgaccttcaagttacggctttagcgtccctcccgctgccgactcgcctacgtgaacgctagctcgtcacccgacggcctacctttcacccccctccccctaaagaacgtttccgtcttttccgacgttaatggattgtaaccaaacgctcttgccgtcttgtccgacgttaaaggattgtaaccataagattcaccttcccgcaagaagtaaaacatgcacaaagtaaccagttttgcccgttttcatgagaaatgggacgtctgcgcacgaaacgcgctgttgctctttgcattcttgtacaaacacgatcttacgcaggaatcttagaccaacccaaaccgtgcaactgcaagtttcgcccggtctttccgggtctagagagacaaacagctgtactgaagccaactccacgtttggtccactagcgggtgctagtaacactcactttgcttcgtagcggagcacatgagcggtgggaactcccccatggcaacatggacccaccgggccaaaagccacgcctcgtgcctcatgtgtgtgcaaccccagcacggcaacttgtttgtgaaacacaccttaaggtgacactgatactggtacttgacttctggagacaggctaaggatgtccttcaggtaccccgaggtaacaagcgacactcgggatctgagaaggagactgggagttctataaaactgcccggtttaaaaagcttctatgcctgaataggtgaccggaggccggcaccttttcctttttaaaccactaaattct

SEQ ID NO: 2806 - DNA, 1000 bp, Foot-and-mouth disease virus
  source 1..1000: mol_type = genomic DNA
acgacagtccctgcattgcactccacacttacgttgtgcgtacgcggggcccgatggaccatcgttcacccacctacagctggactcacgacaccgcgtggccattttagctggattgtgcggacgaacaccgcttgcgcttctcgcgtgaccggttagtactcttaccaccttccgcctacttggttgttagcgctgtcctgggcacccctgttgggggccgttcgacgctccacgggttcccccgtgcggcaactacggtgatggggccgtttcgcgcgggctgatcgcctggtttgcttcggctgtcacccgaaacccgcctttcataagttttaccgtctgtcccgacgttaaagggaggtaaccacaagcatactgccgccttccccggcgttaacgggatgcaaccgtaagacacaccttcatccggaagtgaaacggctgcgtcacatagttttgcccgttttcacgagaaatgggacgtctgcgcacgaaacgcgccgtcgcttgaggaagacttgtacaaacacgatctaagcaggtttccccaactgacacaaaacgtgcaacttgaaactccgcctggtctttccaggtctagaggggtaacactttgtactgtgtttggctccacgctcgatccactggcgagtgttagtaacagcactgttgcttcgtagcggagcatgacggccgtgggaactcctccttggtaacaaggacccacggggccaaaagccacgcccacacgggcccgtcatgtgtgcaaccccagcacggcgactttactgcgaaacccactttaaagtgacattgaaactggtacccacacactggtgacaggctaaggatgcccttcaggtaccccgaggtaacacgcgacactcgggatctgagaaggggactggggcttctataaaagcgctcggtttaaaaagcttctatgcctgaataggtgaccggaggtcggcacctttcctttacaattaatgaccct

SEQ ID NO: 2807 - DNA, 1000 bp, Cardiovirus B
  source 1..1000: mol_type = genomic DNA
tagcatcttcgcggtaaagaacaccccaggggtaacccctttgaacgcgggactgcgatagtgccaccccacgtctttcccactcctaacccgactcccacctcgggtccaatgaaaggaccaaataattcatcccttgaatgttggctaatcagaggaaagtcagcattttccggcccaggctaagagaaacatataagttagatttgattcaaatcccttgacgaattcgaaacgagatgttctccctcccttgccgcttgttcacacccatacatttaattcggcctcctgtgacaagcccctcggtgaaagaacctctctcttttcgacgtggttggaattaacatcatttccgacgaaagtgctatcatgcctccccgattatgtgatgttttctgccctgctgggcggagcattctcgggttgagaaaccttgaatcttttcctttggaaccttggttcccccggtctaagccgcttggaatatgacagggttattttctttatcttatttctactttcacgggttctatccgtgaaaagggtacgtgttgccccttccttcttcggagaattcacacggcggtctttccgtctctcgacaagtgtgaatgcaacatgccggaaacggtgaagaaaacagttttctgcggaagtctagagtgcgcatcgaaacagctgtagcgacctcacagtagcagcggactcccctcttggcgacaagagcctctgcggccaaaagccccgtggataagatccactgctgtgagcggtgcaaccccagcaccctgattcgatgaacgttctttacggaaccagaggatggttttcctaagccctccggtagagaagccaagaatgtcctgaaggtaccccgcgtgcgggatctgatcaggagaccaattgactgtgctttacaccgtcactttggtttaaaaactgtcacagcttctccaaaccaagtggtcttggttttccaattttattaactggcaat

SEQ ID NO: 2808 - DNA, 1000 bp, Foot-and-mouth disease virus
  source 1..1000: mol_type = genomic DNA
aaagggggcgctagggtcgcacccctagcatgccatcggcagctcctgcgttgcactccacacttacgctcgtgcactcgcggggactgatggactgtcgttcacccacctacagctggactcacagcaccgcgtggccattttagctggattgtgcggacgaacaacgcttgcgcacctcgcgtgaccgtttagtactcttaccattttccgcctacttggtcgttagcgctgccttgggcactcctgttgggggccgtccgacgcttcacggtctcccccgtgtgacggactacggtgatggggccgcctcgtgcgagttggtcgtttggtgtactttggctgtaacccggcgccctcctttcatcccccctaagttttaccgtcgttcccggcgttaaagggatgtaaccacaagataacccttcacccggaagtaaaacggcaaccacactcagttttgcccgttttcatgagaaatgggacgtctgcgcacgaaacgcgccgtcgcttgaggatgacttgtacaaacacgatctaagcaggtttccacaactgacacacaccgtgcaatttgaaactccgcctggtctttccaggtctagaggggcgacactttgtactgtgattgactccacgctcggtccactggcgggtgcgagtaacaggactgttgcttcgtagcggagcatgttggccgtgggattccctccttggtaacaaggacccacggggccgaaagccacgtcctaacggacccaacatgtgtgcaaccccagcacggcaactttactgtgaaaaccactttaaggtgacactgatactggtactcaaccactggtgacaggctaaggatgcccttcaggtaccccgaggtaacacgcgacactcgggatctgagaaggggactggggcttctttaaagcgcccagtttaaaaagcttctatgtctgaataggcgaccggaggccggcgcctttcttttaccattactaaactg

SEQ ID NO: 2809 - DNA, 1000 bp, Foot-and-mouth disease virus
  source 1..1000: mol_type = genomic DNA
cgactcccgcgtcgcactccacacttacgtctctgcaagtgtaggaaccgacggactgtcgctcacccacctacagctgaacccacaacaccgcgtggccattttagctggattgtgcggacgaacgccgctcacgcatgtttcgcgtgaccggtcaatactcttaccactttccgcctacttggtcgtcagcgctgttgtagggcactcctgttgggggctgttcgacgctccgcggtctcccccgtactgagactacggtgttggggccgccacgtgcgggccgctcgcctggtgtgcttcgactgtcacccgaagcctacctttcaaagtaacaccgtcgctcccgacgttcaaagggaggaaaccacaagcttgcaccaccactcccggtgtcaacgggatgtaaccgcaagatgaaccttcacccggaagtaaaacggcaacttcacacagttttgcccgttttcatgagaaacgggacgtttgcgcacgaaacgcgccgtcgcttgaggaagacttgtacaaacacgatttaagcaggtttccacaactgataaaactcgtgcattttgaaaccccgcctggtctttccaggtctagaggggtgacactttgtactgtgctcgactccacgctcggtccactggcgggtgttagtagcagcactgttgcttcgtagcggagcatggtggccgtgggaactcctccttggtgacaaggacccacggggccaaaagccacgtccagatggacccaccatgtgtgcaaccccagcacggcaaccttactgcgaacaccaccttaacgtgacactgatactggtactcggtcactggtgacagactaaggatgcccttcaggtaccccgaggtaacacgggacactcgggatctgagaaggggattgggacttctttaaaagtgtccaatttaaaaagcttctatgtctgaataggcgaccggaggccggcgcctttccattacctactactaaatcc

SEQ ID NO: 2810 - DNA, 1000 bp, Foot-and-mouth disease virus
  source 1..1000: mol_type = genomic DNA
agggggcgttagggtctcagccctaacatgccaacgacagctcctgcgtcgcactccacacttacgtctgtgtgcgtgcgggaaccgatggactttcgttcacccacctacagctgggctcacggcaccgcgtggccattttagctggtttgagcggacgaacgtcgcttgcgcgcctcgcgtgaccggctagtactcttaacactccgcctacttggtcgttagcgctgtcctgggcactcctgttgggggccgttcgacgctctacggtctcccccccgcagcagtctacggtgatggggccgcttcgtgcgagccgatcgtttggtgtgcctcggttgtgaccttctcgtccgagtaaaggacggtaaccgcgagctttaaaccgcctttcccggtgttaacgggatgtaaccacaagatggaccttcgcccggaagtaaaacggcaacacacacagttttgcccgttttcatgagaaacgggacgtcagcgcacgaaacgcgccgttgcttgaggaggacttgtacaaacacgatttacgcaggttcccacaaccaacacaaaccgtgcaatttgaaatcccgcctggtcattccaggtctagaggggtgacactttgtactgtggttgactccacgctcggtccactggcgagtgtgagtagtagcactgttgcttcgtagcggagcatggtggccgcgggactccctccttggcaacaaggacccgcggggccgaaagccacgtctttgacccaccatgtgtgcaaccccagcacggcaaccttactacgaaaaccactttaaagtgacactgatactggtactcaaccactggtgacaggctaaggatgcccttcaggtaccccgaggtaacacgcgacactcgggatctgagaaggggactggggcttctgtaaaagcgcccagtttaaaaagcttctatgcctgaataggcgaccggaggccggcgcctttccctatctaccattacttac

SEQ ID NO: 2811 - DNA, 1000 bp, Cardiovirus B
  source 1..1000: mol_type = genomic DNA
agcatcttcgcggtaaagaacaccccaggggcaccccctttgaacgcgggacctgcgaaagtgccaacccacgtctttcccactcttatcccgattcccacctcgggtccaaagaaaggaccaattatttcatccctcgaatgctggctaatcagaggaaagtcagcattttccggcccaggctaagagaaacatataagttagatttggttcaaatcccttgacgaatttggaacgagatgttctccctcccttgccgcttgttcacacccacacatttaattcggcctattgtgacaagccccttggtgaaagaacctctctctttccaacgtggttggaattaacatcatttccgacgaaagtgttatcatgcctccccgattatgtgatgctttctgccctgctgggcggagcattctcgggtcgagaaaccttgaatcttttctcatggaaccttggttcccccggtctaagccgcttggaataagacagggttattttctttatcttgtttctacttttatgggttctatccataaaaagggtatgtgctgccccttccttcttcggagaattcacacggcggtctttccgtctctcgacaggtgtgaatgcagcatgccggaaacggtgaagaaaacagttttctgtggaagtctagagtgtacatcgaaacagctgtagcgacctcacagtagcagcggactcccctcttggtaacaagagcctctgcggccaaaagccccgtggatcagatccactgctgtgagcggtgcaaccccggcaccctgattcgatggacattctctacggaaccagagaatggttttctcaagccctccggtagagaagccaggaatgtcctgaaggtaccccgcgtgcgggatctgatcaggagaccaaatagcagtgctttacgctgttactttggtttaaaaattgtcacagcttctccaaaccaagtggtcttggttttctaattttattgaatggcaat

SEQ ID NO: 2812 - DNA, 1000 bp, Cardiovirus B
  source 1..1000: mol_type = genomic DNA
gcatcttcgcggcgaagaacaccccaggggtaccccctttgaacgcgggacctgcgacagtgccaacccacgtcttttcctactcccatcccggctcccacctcgagtccatagaaaggaccaagtacatcatcccttggatgctggctaatcagaggaaagtcagcattttccggcccaggctaagagaaacatataagttagaaatgatcacaatcccttgacgaaatcagaacgagatgttctccctcccttgccgcttgttcacacccacttcattaattcggccttttgtgacaagccccttggtgaaaggacctctctctttctgacgtggttggaattgacatcttttccgacgaaagtgctatcgtgcctccccgattatgtgatgttttctgccctgctgggcagagcattctcgggttgagaaaccttgaacctcttcctttggaaccttggttcccccggtctaagccgcttggaatatgacagggttattttccttatcttatttctactttcatgggttctatccatgaaaagggtatgtgttgccccttccttcttcggagaattcacacggcggtctttccgtctctcgacaagtgtgaatgcaacatgccggaaacggtgaagaaaacagttctctgtggaagtctagagcgcgcatcgaaacagctgtagcgacctcacagtagcagcggactcccctcttggcgacaagagcccctgcggccaaaagccccgtggataagatccactgctgtgagcggtgcaaccccagcaccctgattcgatgaacgttctttacggaaccagaggatggttttctcaagccctccggtagagaagccaagaatgtcctgaaggtaccccgcgtgcgggatctgatcaggagaccaattgacggtgctttacaccgtcactttggtttaaaaactgtcacagcttctccaaaccaagtggtcttggttttctacttttattgactggcaat

SEQ ID NO: 2813 - DNA, 1000 bp, Cardiovirus B
  source 1..1000: mol_type = genomic DNA
cattttcgcggtgaagaacaccccaggggtaccccctttgaacgcgggacctgcgagagtgccaacccacgtcttttccctcttttaccccgattcccacctcgggtccaatgaaaggaccaaacatttcatcccttgaatgctggctaatcagaggaaagtcagcattttccggcccaggctaagagaaacatataagttagatttgatttgaatcccttgacgaattcggaatgagatgttctccctcccttgccgcttgttcacacccactgttttgattcggccccttgtgacaggccccttggtgaaagaacctctctcttttcgacgtggttggaattaacatcacttccgacgaaagtgctatcatgcctccccgattatgtaatgttttctgccctgctgggcggagcattctcgggttgagaaaccttgactcttttcttttggaaccttggttcccccggtctaagccgcttggaatatgacagggttattttctttattcttgattctacttttatgggttctatccataaaaagggtacgtgctgccccttccttctttggagaattcgcacgacggtctttccgtctctcaacaagtgtgaatgcagcatgccggaaacggtgaagaaaacagttttctgtggaagtctagagtgcacatcgaaacagctgtagcgacctcacagtagcagcggaaccccctcttggcgacaagagcctctgcggccaaaagccccgtggataagatccactgctgtgagcggtgcaatcccagcaccctggttcgatggtcattctctacagaaccagagaatggttttcttaagccctccggtagagaagccaagaatgtcctgaaggtaccccgcgtgcgggatctgatcaggagaccaattgacagtgctttacactgtcactttggtttaaaaactgtcgcagcttctccaaaccaactggtcttggttttccaattttattttatggcagt

SEQ ID NO: 2814 - DNA, 1000 bp, Cardiovirus B
  source 1..1000: mol_type = genomic DNA
caccttcgcggcgaagaacaccccaggggtaccccctttgaacgcgggacctgcgagagtgccaacccacgtcttttcccacttttaccccggttcccacctcgggtccaatgaaaggaccaagcaattcatcccctgaatgttggctaatcagaggaaagtcaacattttccggcccaggctaagagaaacatataagttagatttgattcaaatcccttgacgaattcggaacgagatgttctccctcccttgccgcttgttcacacccatgttttagattcggcctcttgtgacaagccccttggtgaaagaacctctctcttttcgacgtggttggaattaacatcatttccgacgaaagtgctatcatgcctccccgattgtgtgatgttttctgccctgctgggcggaacattctcgggttgagaaaccttgaatcttttcctttggaaccttggttcccccggtctaagccgcttggaatatgacagggttattttctaaatcttatttccacttttgtgggttctatccacaaaaagggtacgtgctgccccttccttctttggagaactcgcacggcggtctttccgtctctcaacaagtgtgagtgcagcatgccggaaacggtgaagaaaacagtttcttgtggaagtctagagtgcacatcgaaacagctgtagcgacctcacagtagcagcggactcccctcttggcgacaagagcctctgcggccaaaagccccgtggataagatccactgctgtgagcggtgcaaccccagcaccctgattcgatggtcattctctacggaaccaggaaatggttttcttaagccctccggcagagaagccaagaatgtcctgaaggtaccccgcgtgcgggatctgatcaggagaccaatcgacagtgctttacactgtcgctttggtttaaaaactgtcacagcttctccaaaccaagtggtcttggttttctaatttttgttgaatggcaat

SEQ ID NO: 2815 - DNA, 1000 bp, unidentified
  source 1..1000: mol_type = unassigned DNA; note = unclassified Cosavirus sequence
gctcactcctgtacaccgtgagtccgcgcagtgctgacttaacacttaagtaatgtttaggccgagaattacaccgctcggctcccacctttcaccaccgtgggattaacaggtggtcaatctgtattcctgtctttggttatgtcaaagcaatacggcatgtgcaatggcgcacaggcccaaggcggagatctagacctcacagattgtgttacagattaagaccatgctggatggtcacgttggagactgcatgtggcagtcttgaaacgtgtggtttgacgtctaaccattatagcagtgggtggagtactgcaaagatgtcaccgtgctttacacggtttttgaaccccacaccggctgtttggcacttgcaggacagtaggtttattttctttcagatctcttttctagtcgtgcatgttctgtatgcacgagcggagtgatactcccgctccttcttggacaggcggcctccacgtcctttgtggaactcaaggttgccaagtcactggtgtttgaagtgaagattagagaaacactagggagtttcatgtggctttgccagggattgtagcgatgctgtgtgtgtgtgcggaatccccctcgtggcgacacgagcctcacaggccaaaagccctgtccgaaaggacccacacagtggggcacccccagcccctccctacaaagctttgtgcaaatgaacttttgtttggcttttcttaagcttctctcacatcaggccccaaagatgtcctgaaggtaccccgtgtatctgaggatgagcaccatcgactacccggacttgtgagccttttcacagacgcatgtggtacccaagccccttccctacggggaaggggctttgctcactcagcacaggatctgatcaggagatctgtctccggtgctttacaccggggcacagatttaaaaatttcccaaggcctggcacacaacctaggggactaggttttccttttatcacaaagatgtcaat

SEQ ID NO: 2816 - DNA, 301 bp, unidentified
  source 1..301: mol_type = unassigned DNA; note = unclassified Riboviria sequence
acagaggaatcaaaatcgctgaatactcttctcacgcttacactattgctcattattgcatctcctaaggacttatacatttgactcattttctactctagatgcactttccctccctctccatttattcacttgcactgaaaaaaactaacagacttaacaagcctttccgtctctcttgtctggatgtttgcgtctgtgctcttggggttcagcgtcctgggtatattattaacaggagccctattcccactagtccaccgactgacaagccaagtcgaccccaaggagattgaacatc

SEQ ID NO: 2817 - DNA, 304 bp, unidentified
  source 1..304: mol_type = unassigned DNA; note = unclassified Mitovirus sequence
ctgtaccttcacaggttcagttaagacgaaatctcgtctttctctcctcaattggagttctatctttagttcttcttctgagagggtcccccagtcttgggtaattaggtagttacatcctaattacttcggccgggagttaggtcaagtcttttgatttgatattgcctcctaaaccgagtgacacccgccatccttccaaaggtagccgcagcccccacctaggggaaactgtaggatagtctctagagggaagtgacgaatggtcgtcggcctggtttagtaacatacaaatcagagtccc

SEQ ID NO: 2818 - DNA, 304 bp, Sclerotimonavirus betaplasmoparae
  source 1..304: mol_type = genomic DNA
tcaagcttcgcatgaccggtaagtagttattttcattatttaataaaacttaggattaaaaaataatctagactacaatatgaaagatatcgcagttaatcttagtgtgttagttcattctttggaattattatcgaaaattctttctcggatcgaggaactaaataagtcagaaaatgagctagatgcaattggaacagaagaaacatggaccttagtataaccatgcattaggtttattttataaaacttaggagcaaatcacaattatccttaagtctttttttgtaattgaagtgaaatc

SEQ ID NO: 2819 - DNA, 305 bp, unidentified
  source 1..305: mol_type = unassigned DNA; note = unclassified Flaviviridae sequence
caagtacgctcatagttctcgagccaaccacacgaaagctagttggggcctttaaatatggaaacttctagtcgtaaggtggggtatctcccctatgggtggtgaacgcttgttcgctgcaataatggtgagtagtctctagactaatgctacctagtgagacaacgattatctgtctcatgtaagatagcattagtttggcgagccaggttgtttgggagcaaccctctgtcgataaactacacagtctgataggacgcacgaccttgcccattatgtaggataaagaatggtctgtcaacaca

SEQ ID NO: 2820 - DNA, 308 bp, unidentified
  source 1..308: mol_type = unassigned DNA; note = unclassified viruses sequence
gcgattggttcaatcgccaatttgagaaagctttaattgatctcgacgtcgcttctgtacccggtataacggccctttctaagtatggcactaccttaggagaaatcctagggtttgatggcaaggcttttgatgcagagcgcatcaacatatttagaatttatgttctagatagattcaaaactttactccgaggagaagaatatgcagatccaattaagttattcataaaacaggaaccgcacaagattaagaaaatagaagacaatcgtcttcgcttgattagtgctgtctctgtggtggatacg

SEQ ID NO: 2821 - DNA, 308 bp, unidentified
  source 1..308: mol_type = unassigned DNA; note = unclassified RNA viruses ShiM-2016 sequence
actcagcgacaactcggaccataccgagagatagaaaaggagccagagtcggcttggtagacccccagaaggaaaactgggagtactgggaaacccggcaacccaccgtgaagaggtagattagccagataggaagacgtttggaccttacgaggttgagcgcacatgggcattaatgtcccggtgttagtgattacggagagatggacgcaatgtacccttagcgacatctagacgcctaatacgagaggcggagcgctatttagcgcagggggccagcccgagtgccgccttcaagttatcgagag

SEQ ID NO: 2822 - DNA, 309 bp, unidentified
  source 1..309: mol_type = unassigned DNA; note = unclassified RNA viruses ShiM-2016 sequence
taaaacttcttaccccaaaggtaggatttgcaatcgcagtgaccctagcagcaaagttttataatttctatcccaaagatagacgaggtgagcgtactcgataacgtctcagccaatgttaacttggctacgtaataaagtcaatttgatgataattagcgtgttacaacgcgtaaacacaataataaaccaacaaatcgcagagcggcagttagctagcaatcaagtatccacagtgtgatatatgtcaaatcaaccaagatattttcctctagagatttccaccacagaagagatagcagagcaatc

SEQ ID NO: 2823 - DNA, 314 bp, Sclerotimonavirus fusarii
  source 1..314: mol_type = genomic DNA
tcatccccaaattccccagactccccacacactgactgcgacagaggtatttaataaaacttaggagtaaactctagatgcgcacaatgacgacctgccaaaaagcattggaggatttggcgaatgtgctcgacattctaacgagatgtctctccgaggctactcaagagaagtctgatttcgaggagattcatactccttctgacgacgtgatttctatttcttctgctgagcaaagtgcattataaagggcaacgttggtattagattatataagtcgtgtattaaataaaacttaggagataaccgcaatc

SEQ ID NO: 2824 - DNA, 314 bp, unidentified
  source 1..314: mol_type = unassigned DNA; note = unclassified RNA viruses ShiM-2016 sequence
tatcacattttatttaataggcttaatatatgtaactatttagtttacagcttattgaatacaatttccatttacctaatttataatcatattcgtattaaagtattcacatttttcatagaagatcttttgaattccgctctagatatttaagttttgaagtattagttttgaaagtaataattatcacgattagtaattccagtcttttcgactataagaaaccttcgaccgttcggtaatctctaaccaaagaagtcctgattgtatttaattttagggggtgtatttattcattcgtcaccatagtacaa

SEQ ID NO: 2825 - DNA, 317 bp, unidentified
  source 1..317: mol_type = unassigned DNA; note = unclassified Riboviria sequence
ccccagcaaagtctagatgctggataattgacatccgctgggcgaatgtcgtagtagctgagagcaggcaggctcgttttattaatgattttaagccagtcgtttttgcttggcacttgcaggttctattgaaccgccggcccctattggccaactccgctggtcggagcattttagaaattgtttttgattttcctgtcggctggtccgatgagagcggtcttttggccgattttgaatcatctgttttggatattatacgtatccgtattttaaatgactctgaggtcgatgacgagattaccgcgcagcagctg

SEQ ID NO: 2826 - DNA, 318 bp, unidentified
  source 1..318: mol_type = unassigned DNA; note = unclassified dsRNA viruses sequence
ttttggaaaattatacgcctctgtttctagagtttcttttccaatgcccatagagtttggtacccatgctcctaagggtttgagccaattcggtaccgggggtaggtttaagcagcgggtttctactccctcccgcactgagttctaccggtattgtaggaccaggctggcaatccggaccagcctgtaggatggatatctcaaggcgatatagttgtcttttcgtggctatggggttagaacggcgctccctactcgatccgagggagcagccccattcgctgtacgcgagactagcacattagctgcctatatctc

SEQ ID NO: 2827 - DNA, 319 bp, unidentified
  source 1..319: mol_type = unassigned DNA; note = unclassified Picornavirales sequence
aagtgttaacactcccctcctgtagcttactccacggttatacaggtagtattatagtgggtgcgtctgtgtgagtggtatgtagcagactaagattctttaccaattttgaggaaatggcctcgatcctaacccgattgtgttaccgcctccatcactttgccccatattacaggttatgcattgagtaccgcttcttgatgtatgatgactggaaggctttgtgagatctcgttctcctgacaaacaggttgttatagagttgggcgtccccccgaaaacaaaaacggcaactggtgagctgactgatctagaaagc

SEQ ID NO: 2828 - DNA, 322 bp, unidentified
  source 1..322: mol_type = unassigned DNA; note = unclassified RNA viruses ShiM-2016 sequence
atgggcagctatatattagctgcacggtagatacttttcaagcaagaggccagtgcagaccccttggtcgtatccagattttgcctagtgcgttaaaagagtccatcctcgccgggtatccagattaccggaggacctcatcagcacgtctgaagcggaatatatacgatagatcactagagacaagtctagacggatcagttagttggatttctctgcagtctgtaacgacgagagtgccagcagagctgagcgacctctattgatcgctgtgcacacccccgaactgacaacacgagatagaatcacttttcggcccatc

SEQ ID NO: 2829 - DNA, 323 bp, unidentified
  source 1..323: mol_type = unassigned DNA; note = unclassified RNA viruses ShiM-2016 sequence
acgggctctgctccgactctggttttgaatccccgttttcaattttggggttaccagagattgtggtgcgcagtggggctatccctaggaaaactagctctagaattagtttcttgaatcagtttagtttaggattagattttagatctcctaacccttctttacacaacgctttagtagcagtcgagagacgtgtctttactgtaggcaaaggcacggagattattcttcccccgcaacctgaggaaaacatttttcacagcttagattactttagagatgctgtggtgagggaagtcggcttttgtaagacctacaccccc

SEQ ID NO: 2830 - DNA, 327 bp, unidentified
  source 1..327: mol_type = unassigned DNA; note = unclassified Nairoviridae sequence
cacaaagaaacttacggctcagcaaccaaaactgtgctactggatcattgtttgtgtattaagtgcttcatattcatatttggtaatgtggtgtatctgcatacgtcactttatctccatttgcattatattatctttcattattgtcttctcttagatataggtatagttagtaataagctgtgaaattctagatagttgaactatagtaaactagtagacattaagaattaaatcactgacaagtagcagataaatcattttttcttaaactggaaagtaagtaaatacccacaagcaactgctgacagaatttgatgagtgaag

SEQ ID NO: 2831 - DNA, 336 bp, unidentified
  source 1..336: mol_type = unassigned DNA; note = unclassified viruses sequence
aataaattaattggtcctaatttattttctttttctgtgtccgaccagcacaaatgattttgtcgttttgacaataattaaacaacagttactctagaacgtcatctaggaggagttctatgttctaacggttctcattatgaggcgcttgaattttggaataacctttgttacagttctctgagtttttgcacgttttttccattaaaaacgtgcagcctgtgttaggtttataaacactagggaaacgccccgaaagtgcgacttgcagataattgttgtcatgctgcattgtatttttacaacacggcttatatagccttaaccgaagattcc

SEQ ID NO: 2832 - DNA, 342 bp, unidentified
  source 1..342: mol_type = unassigned DNA; note = unclassified Metaavulavirus sequence
tcacaatatcttcagaagattataacggcttaacaacaagaccatctaaatactatattacatgcatctatacgattcctttaaaataattaaattaatgacagtgacacaatattacaaaataatcttctagataatcctaaattgccaccctggaccaatttctcattctgatttaacagtgataccttcaccatttgtttttgtaatgatctagtatcagattctattggttttgagctttccaataataaagattttgaaccatcagttctaaaaaaaaccttttgggtgggtgaaatggaacttgggggcgacccctagcctgagaatatcccaaca

SEQ ID NO: 2833 - DNA, 344 bp, unidentified
  source 1..344: mol_type = unassigned DNA; note = unclassified Dicistroviridae sequence
tcttgctatcttaggtaaaatgagaggttaaaataagttagtagtgctatttcggataagatgttagttatttaactttactgcttaggatgcatcgtggcagccccataaaaatccagagcccctccctcgtttctagaagattaagtcgtcaatagaaattaaataatagacttgcgtcaaaatataatgataataatcctagtaatagatctgataatacatataatggtagtttaagtaatgaagatgctccccctactccccaaaatgcacaagaacaggtacaaataacaacttttgaagctgatcttgctgtattacccgagcatgtcccaggagaa

SEQ ID NO: 2834 - DNA, 356 bp, unidentified
  source 1..356: mol_type = unassigned DNA; note = unclassified Picobirnaviridae sequence
cgcatatcctctccctcttttctcccttccccctccccgacctttttcccctctacggcctcggattgcggactgatatgacgcgcctgacgtggaattcaggaattctggaactgggggacttcgcccaagctgtgaaccggattaccgatgtagctccttgggtgcctcagggaagggaccagtagttctagagcacatgtgaagcactgacaaggggactgcgttgcatatccccgaccccggactctgtgtgatgatgctggattgccgctagcacagagaaaccacccttttagggctcgcagggcagtgtgtagcacctagtttgggaaagctaggctggtgtgtactgg

SEQ ID NO: 2835 - DNA, 357 bp, unidentified
  source 1..357: mol_type = unassigned DNA; note = unclassified RNA viruses ShiM-2016 sequence
gggtgcccaacagatgccacaggtcaggggtgtgaatggtctaaagctattgaagagttcaattgtgttcttatcaatgggggtcatagggtgacctttgaccccattgagaggaagcagttgaataaaagctcggaattcccccctgatcgtttgcagtgggaaaccactgttgggatacccaaggaacgtaggtatgttagagtgtctagaataggtcgcgatgtaaatattattccatttaataatgatatacgaactttgcaacgggcggtcgttgaacgagtcttcactgtgaaaagtgatggtgagttttgtcggccaccccgtccagctaaggatcatttccaaaacgta

SEQ ID NO: 2836 - DNA, 367 bp, unidentified
  source 1..367: mol_type = unassigned DNA; note = unclassified RNA viruses ShiM-2016 sequence
agagatcgagcgaaacgggtttcgatatatcggaaaaaccgatccaatcagtagaaatgtcggtgcttatggaacaaattcttacattgcgcaaagatttcctgattttgacagaatcgataagctcgaagagtactgcccgccagagttccacacacagcggcaaaacaacacagcagaactccgaagtttcgcagtccattcaaaaataagacgcgaattgttagataggatacaaccgttgacgacccagcaattcaattcggttttggatcgaagcgaggacgtgttttcaaaaattagagttgagatttctgatgactttctagattttgataaggttttaaaaattgtgctatctcttaat

SEQ ID NO: 2837 - DNA, 382 bp, unidentified
  source 1..382: mol_type = unassigned DNA; note = unclassified Picornavirales sequence
tgatgagggtcgccatcccggttgtggtgacacaacgggcgtccctgcgctggcatgaggcctctttgaggctggagaatcgggatcggtaaccgaagagccccgtgagctagggttgactcctccgcctccctgaatgcggctaatcccaacccatgagcatccggtggcaatcccgccacaagggtgtcgtaacgcgtaagtcgtgggcggaaccgactactttgggaaggcgtgtttccattttatccattctactgtggttatggtgacaagttataaatctagatctatagcgtttgttgagagatatccaacaattgaacaaactcgcacagttcttttctttggaaggcttttctttggaaggcaaacagtgaaa

SEQ ID NO: 2838 - DNA, 384 bp, Salem salemvirus
  source 1..384: mol_type = genomic DNA
acgcttctagaaggtctccaatcactactgttatctttcaatcagtctaatcaccgaacttgattgatttgcttttatcattaaataactcttaaaatcactaaaaaaaacctaggactcaagagaacgagacccaagacagtccgacaagcccggaaccctcccaagagaggaacgaaagccgacaccccgagaacccaccaagatccaacaacaaccgagccacacccaccacaccgccagaaatccagacaaagccccgaaacaatcacactcctagccatccacagcggcctccttcccaacgaattggaaacgccacccaccacgtgtcatccctgacacttgggcataggcaatcaactcactccataagtagtaaat

SEQ ID NO: 2839 - DNA, 384 bp, unidentified
  source 1..384: mol_type = unassigned DNA; note = unclassified RNA viruses ShiM-2016 sequence
ataaaattcagtattgaacgtatgggtgtcctcaagccaccgttgtgacaggcgcctacttggctgaactgaatgagtgcctaaaattgtgttgtttacgcaaaccaactagggtattggtggcgagccaattacctgaaagctctagatgatgttgagcgttgttcatttgaggagtacccaaatctttgtgtacgagccgttcctaggaacgttgtcgagcacacattgatgtagggcccgattacaggacatgccattgactaatcagagtgagtacaattttaggggagtccactgtaagttcttttcggcccagtccccgtgtagacgcaactcacaaaacatgttgacaatgctgctttttatttgccctcccttctt

SEQ ID NO: 2840 - DNA, 388 bp, unidentified
  source 1..388: mol_type = unassigned DNA; note = unclassified RNA viruses ShiM-2016 sequence
gccgttaaggccccgctgcgctgcttcttcggacgctgcgtactgctttgcagatcccggcctacacccttctcggaggtatgtatgccgtatagtcaccgctgcaggttctctgctacgggccgtttactcggcggtgtatttcttttacacttgacttgaggtcacatatgtccaaggacgagctcctccagctgctttatagtcagcgcgaatctattcagcttatatctcctaacgggggtcgtcaagacctttctgtcggggatatcggtgatgcttcgcgctattctgtttcgcaactgcagggctttactttggcttatgcgagcgtgctttatgaacacgctgacgaactcgtcgcctctagacttcttaaggaatcgtg

SEQ ID NO: 2841 - DNA, 391 bp, unidentified
  source 1..391: mol_type = unassigned DNA; note = unclassified Metaavulavirus sequence
cttgtttagttaagttgaacggtgatggttacattcctcattgcacattgactcataactggcgttggtacaattaatctagttgacgaaagaggtcaactagcgtactctaacactaatattaatataaacacttaagcttaggctcacatctagatgtgaagaagcagtcactttaaattcattcaattaaattatcaattgatactgtactgaggcataaccacttacaacttagtgcacagccttattgctttacaatctgcagatagtggtaacttaggtcgaaatttagatttaaatgcataagtgctatactgttgatttaataaaaaaatgggggagaccaccaataaaacagcaactgccgctgctagaagtagacctaatc

SEQ ID NO: 2842 - DNA, 399 bp, Britarnavirus 3
  source 1..399: mol_type = genomic DNA
ttctagaatagctagattttaacctatgtattattattgttttatgtttatatatctgaccatcatgtccttaaactgttcggaggcgcactcatgtgtcaacgtgacttatgtgaaaccaaaaatgagctgtacatactgattacggcagtcgaccttagtgtctaccccttaaatagactgacgcttgtgtatatctgggaagcataatgcttgtggctatttagctgcggaggtcctaccactccaccaatgtagagacaggacatcgctctgaggtgagctttgtacccgtgtaaataaaaataccttaccaactttactctaaaacaaaagtctgtggaggactataaactctacacttatgtgccccaatctggagaggttgggatttcacaa

SEQ ID NO: 2843 - DNA, 399 bp, unidentified
  source 1..399: mol_type = unassigned DNA; note = unclassified RNA viruses ShiM-2016 sequence
acttgcaactaatcttcgagagtctaagaataagacactaatggctggtcaatccgctaataacggtctacagtacggtgaaactttttctacatcactattctggtaagaatgtaaatatacaatttgtcttatagacacctcaatgtgaaatgacgaacgaaaataacattgttgtattaaagcggctctttttagagttactaatcaagaacgcttgttggcagccccaatgaattctagatgttcaaatttgctaacgattaggctgttgttagtgaataaattaagcctgcgaattttataactgaaactttaaagcaagaacaacgacaaattttaactttcgcatcagaaggtgattccaaccacactaatgtgatagcaaaaagtttgcaa

SEQ ID NO: 2844 - DNA, 403 bp, unidentified
  source 1..403: mol_type = unassigned DNA; note = unclassified Botybirnavirus sequence
gcaaataaaagagctgccttttgaagccttttatttgtaaggaaaatttatattgatcgtcattcaacgatccccgctcgggttagaaagcaccacaagcgcagtgacgatcgcttgtgagtagtagtcacactagatggtaaattctatttggaacctcggacactctcaaaccgccttgtcaggatatcagcggatgtgaatagacgtgtggaacacaacgtgcccaccacatcttcaactgctcctgttagtgtataaatcagaaggataggtaaaccgagatctctagagaagaggctacctggcactgctgacgggccgtagtatactacgatatcgggaggaattgaagccttctgtaatcccccagtacccaggctctctagggtaaagtgagaga

SEQ ID NO: 2845 - DNA, 411 bp, unidentified
  source 1..411: mol_type = unassigned DNA; note = unclassified RNA viruses ShiM-2016 sequence
gaatgccgcaccttgactgctgtctgtacgtccggaagacctggacccaacaaaaccttgccaggtagcagtgttaacgccaaggaatgcgtttgtcattgtaaacgcagaaccaccaaattattcaactacagcattccagagttgaacgacagctatgtttggacgcacaaagggtgtgtgtgtaacgaactggtggctctaaaacaacggcaccaactcgatgatggtctcagatatgtttcaaagtctaacttgtctagacatctcagaccgttcatcaagacggttagtccctgctcggaagatactgtgattgcccacagtgcaggcgctaagcgtaaactccttctctcggccaaattaagccttgaagtctatcctattcaacctgaggatggcgcggtgaaa

SEQ ID NO: 2846 - DNA, 416 bp, unidentified
  source 1..416: mol_type = unassigned DNA; note = unclassified Riboviria sequence
ccccgcaattgtcccaaagattgcggggagcgagcctcggtaatatatttggattagcatatacggattatatttatgtgcatatagaaggagataaattgactgacttaatatttcaaaatgctttactagacattccggattttacaacagtatcattatttcaacacgaaatatcatctaccgagagtggatacacattccaattctgtactgttggttatgcttcctattaccagcatagtagctatttcgtgctatttcaatctaattccgataatttccttccattaattaaagattataaaagtagttcagagtttgcagatgtatctcgcacaatttatgattggtacaaccctacatacgatgatctagactactgtagcttttataaagttgaccaaattaataaa

SEQ ID NO: 2847 - DNA, 422 bp, Achimota pararubulavirus 1
  source 1..422: mol_type = genomic DNA
atgagtgctggccagagcattctcaagactcctccaccaggtccacagaacacagaaccccgaatgacaaagaagaggatttgcatcaccccactggacagaaggaaccaactcagatctgctacagcatccacaatcatcacaaagtcagcaatcgcatccttctctaaaaacaaactctctagcttgctcaaaattgcccaacagttaatcaatcatcccgtagatagatagatttccatgctaatacgcttaatgcatttaagaaaaaacttgaggatatatagtctgtatgattgaataaatgagatgggatgatcatcttagaagaaaagaagaatgggcccggaccccataaatgtccggacactctagattccaacatggctctatcaactcatcttagacaagcctattctgtg

SEQ ID NO: 2848 - DNA, 428 bp, unidentified
  source 1..428: mol_type = unassigned DNA; note = unclassified Riboviria sequence
ccacctctgatatacaggtgaaagttgtatatcaaaagaaatttttattttagttttaatatctagttcacagggctataacctaccccttattagtaacaaaatataaaaactcggtacagaccggggtattgatttgatgactttaagatggaattttgtttagtttacggaaggcccgtagctcttatcaatccccctaagagttacccctattctagaattccattttaattttatcaataggtatggataaatattagatagtaaggcaaggtacgtatcttatagaaatgttagtaagtacggagaagtacgcgactctagttgaacgataaatagcatctcgagcttaccagtagccctggcgttaacaatagaatagctaaaggcttctcctgaaagcaaccgctactataagatagcgt

SEQ ID NO: 2849 - DNA, 436 bp, Dipteran anphevirus
  source 1..436: mol_type = genomic DNA
atctaacaacattcaatttactaaccatagatataagatacatttaaagaaaaccgtagtaaaagtcaaatacagtatacatcgaaatggacccagtatattttactaccacttgtcccagatgtggtgaaggaattaaatatataagggttgaaaaaccacttccaactacacaaaatcaacccaaacagacaggttaaatcattacaaatttttcattttgatattaatcccaatttatttttacagaagcttttacatttctaattatttattatttattgaaacatatatgtctgttcttatcccatctcttatttctttatacatctacttttggacataattaaattattattcagttatttatcattttaacacagagattatgttctagaccctttaatatttaaacaaaaccgtagtaaaagtcata

SEQ ID NO: 2850 - DNA, 440 bp, unidentified
  source 1..440: mol_type = unassigned DNA; note = unclassified Bunyavirales sequence
agaacaatcccaaaagctgtactgcctgtgccttttgtattggctccgaagtctgaattgcatgaccaaacatttgtacctttccctatgtcaactgctggtggtaaatgcgaccctgtcatgagactttggcaagcagcatctagaaattacaatcacagacctgcagactatctagcgtcaaagagagaaaggtttgacgagatgtatgaagatgaccctgaagagcagcggaagatacaggaaaagaataaagagaagaggggccttgcccatcgggctaacatcaaaggagaattagctgaagaggacctcaggctgctagcactagatggtgtgtttgggaagaagtttatgagcgatatggaaaagcaagtgaaatatgaagatagcaaaagaccttggaattggaacactgactgcactgatatagatgcttt

SEQ ID NO: 2851 - DNA, 445 bp, unidentified
  source 1..445: mol_type = unassigned DNA; note = unclassified Totiviridae sequence
gtagcctatagccttgctcctcttaaggagggctagtatcatgagcgtcaattcatgacctgatatagctttatgcgaaaatatcggggtcaacaatggtgtattctgtgtgacggtagctccggtttccgtaattctagatagttaataactctagttcccttgtggttagtcgttgtaagcgctggcatagatgcactcaaacgatcagacgccgagtcggtgcaaaaggagtggtttggcagccacactctatagaccgattcattctgactcgcctattgttgactatctactactaccaatcgctattgctctcgtcatcctatcagttcgacttgttagtgtctactctcgctctagactaacaaggcttctagttgtttcaactagattcatataagaactgatctgtgacatccaactttcgttattcatcatcaaa

SEQ ID NO: 2852 - DNA, 448 bp, unidentified
  source 1..448: mol_type = unassigned DNA; note = unclassified sequence
atcaacacaaatcgagaaaaaaacttttataatggcttctaattcagtactaaaaattagcactcatctggagatgaagtttagagaacctcctagaactagtaaagatgtattaagagccttagaactcattaaagacaattataatgggtttccggagaatttagaaattataatggtgttttatgtattgtcgggattcacatgtaaatatttaggaaaattaggtcaattctatatttataaaagtacattatctggagtatttaatggtaggtgatgggatacgattattcataattatttatcctccgggaaatgtctagataaatttttctgcactagatacagtagctgcaaccattagattttaacaagatgagcgtgaaaaaaacagataacacaaatcatattatatcatcttattataattcgaatctatctgaac

SEQ ID NO: 2853 - DNA, 455 bp, unidentified
  source 1..455: mol_type = unassigned DNA; note = unclassified RNA viruses ShiM-2016 sequence
ctagaaatactgccgtactcttgctgactgttagtagaagtgttttatgtgtgacggacggatgtcaaacaaaggttgacatctctctcggcacattccaatacttcgctaaaccccctcctacaacacaatgtattgagcttgttacatctaccgctctagggaaaacagagtgttcccttcctccacactgtggagaagctcaatatgctgaggtcgacagtggatggttttctagagtcggagtctgtcaaggacttggactgacgaaaactactttgcaaggagcaccaactctaattggcaactggctttctgtatataatgttaccattactcgtattcccccagtcatagctgatgaacttgtagtcctttttgaccagaaatccaacgtgtactctttagtaccgcatttctatgttgagacatttttcattaaaacccaagatgga

SEQ ID NO: 2854 - DNA, 458 bp, unidentified
  source 1..458: mol_type = unassigned DNA; note = unclassified Picornavirales sequence
aataaaatataaccgttatgtagttgaaattgaggaaacgatagtaggctgtggtcttgtccaactaagatcgggtagcaattttattgtccgattatgttgtccaaggctccttacgccgattactcataacactatattttattataattttaaggtttaatgtgatcttgcacgataaatgttgatgtgaaaacgtcgtgtattgctattaaacttgcgtacctatttaggtttactcatcaagatcgcggagtgcagcccactcgaaatctagatacatcaactattctattagattaggtagtcaatagtttagtataatattacctgcaaattttgaacaaaatactataacaaaaacgcaacaacaaatattgtctttttcctctgaaggagaatgtaacaggtctggagtattaccagatagagttagtattccacgccaatttctgtcg

SEQ ID NO: 2855 - DNA, 459 bp, Ollusvirus culvertonense
  source 1..459: mol_type = genomic DNA
atcttcacaggttgcccctaacatatgacgactggcatgattaatgacaagagataccttagttttaagagtttttagagttagaccaaatgtaaccacattccatgaagtactattaacattaaccttagacataagttatgtattatttttctatttgtagttcttaattgctttttaaaaactcacagataaaaaaactcggttaatcaaagaaaacccacctgaaagacaaacaatctacttagattatgtctgctatttttcccaagaattcgaaatttgtatgcatattaccctaatcaggtttttacactagtgacgagtataaaagctctagactaataagaggaccagcccgatacatagatagttttaacagaggttgatggtcgagggagtatgatataataattcagctctcaatctatatcgtagtgatgatatgatccattcaca

SEQ ID NO: 2856 - DNA, 463 bp, unidentified
  source 1..463: mol_type = unassigned DNA; note = unclassified Picornavirales sequence
aaaggactgttgtaatacagttgaatcaataagttgtgaatttgcagattgttgagtattcgttgtctcaatcttgtttgaggtgcttctgtggtggtcgcacttctagagtagctaagggtttgacacacatttaaatttcaagatcatgctagtagctgtcgagtcatttttccaaagaaagtccatgggatttacgtgatggacatgggtatgactccggagacggtgtaacgaggcagtaaagatcttgagatggcgtgtgtgaatgactccgccttgcattaatcacatgaaaagaccgttcggatagcggagctgacagtaggcacgtgatgattaatgtgactgtggaaacttagcgcgagattacttgtattctcaatctgctttaaagcaatgatgtgattcaggtgttaaaccaacgattgcatcgtgtgtaattagctagattggaagtggt

SEQ ID NO: 2857 - DNA, 464 bp, unidentified
  source 1..464: mol_type = unassigned DNA; note = unclassified Tombusviridae sequence
agagcccgtgagatattttcactcctaatagtagccatgaaaccttgattggtggattggcgaagctaggggcagagatcgctgcacgtagcccatgagtgacacatgggcgcggactggtaatatgcagaactattctagagaggggggagcatacctaacagtgcccaccctggtccttggtaagtttgatggacccgggaaggagcccgaaatactccggagttgcgagactcccgcggccggcgtaatggcgaacatgggaaggtaaggcgcaccctaaatgcgcaagggacggaaaacctaattacaaaccacaactagggcagcagcccgactcgttgcgtgctacgaggataaactcgcattgcggtcagaggtggtcattgatacctgaccttaaacaatgtcggtttggcccgactggcccccgtagaggggctatcccactacaattttcaatt

SEQ ID NO: 2858 - DNA, 476 bp, unidentified
  source 1..476: mol_type = unassigned DNA; note = unclassified RNA viruses ShiM-2016 sequence
ggggctgttagataatattagggaatttccaatggccttattggataaactttttaatgcacttattaaatacaagctagaaagtctacttttctcaggatgaatgttcaatactcagcacgagctaaaactgcaccacaaattgacctccgtttctatgtagtggaacgtaatggggaaattctagaagccttcgcaagataccatcacctaccacagcagcaaattgcctattttcatctggcaacacaagaattaggatctactggtggtatcttgcctaatcaacgcttcgcctcatatcgttactccgttccaccaggcttccaattacatccagaattgaataagtggttcaatgccacacccgctattataaaacgtgaagtgctgaagaaacctaacgtcgtcatgacgccaatttgtgctatactagatgctgagctggtgagtccttaccttagataatcaaacgt

SEQ ID NO: 2859 - DNA, 484 bp, unidentified
  source 1..484: mol_type = unassigned DNA; note = unclassified RNA viruses ShiM-2016 sequence
aacatgatgtgatcttatattttagaataaattagtgatgtaaaatttgaaatatattgctatcatgttaacagagttacctatttaggtttacttccaagatgctctagaagcagcccttccaaaatctaggaaccatcactcgattatatagtttaagttgactatatagtttaaattataacttgctacaaatcaaaatacaattcaaaatacaacagatgacgatgctagtcgtgaaataagtcaagtacaaaacgtaacatttcttaatcaaggacaagaagttgaagataaagcactccctagcattgttgatattaacccttcatatttaaatgaaacattatacgatgtttctcatgatataccagattttttggaaagaccaataagagtgtggaatggattttttgataatacacaaacaccaaatacatcattggcaactttacgatttccagatgtattattacaaaacaga

SEQ ID NO: 2860 - DNA, 489 bp, unidentified
  source 1..489: mol_type = unassigned DNA; note = unclassified Riboviria sequence
gtatatatcatcattatcatcatttcattatcattatcattatcatcatcacgtacgtactacattctaagttctgaccagcttagtcttatttgtcacatgagcaacattttagtgagtgtcggagcacaatcgagaataaagtatcgttatagcgcctcacgaagagtgtggatcacagttcaagtcaaaccgttattgttgtagggtatatgggtaacctcacactacaaacaaccgcggcattctatatttggatgaatatagtaattactagacctcaatgcttgaaacccgttgaactagtatagacaccaattcgttagtgatctagagttttgtaaattgacttaataatttaccgtcggagcccgcaagcccacctggaataattttctaattttcaagaaattagacgttcagccacgtacggctaccagatctaaaagagctcgtaatgcttaattacaccccaaacagattgaagaa

SEQ ID NO: 2861 - DNA, 493 bp, unidentified
  source 1..493: mol_type = unassigned DNA; note = unclassified RNA viruses ShiM-2016 sequence
ggaagcaatgtccttactatgactttaaactagtaaaggtagtgacttacactcgtctcgtctagacgtaagtagccgagggtggtgaccaacaccacgtgattactgcggtataaggaatgtgacactttatgggaagaccaaaagtgtagagaaatcaaggattctatgtgatcttgcattcatgatatatggagtaaaatcatgattgtattgctatagaattgtcaaggtgctatttagtttcggtgtcctttggagcagtcctcctaaacaccaatcctccaaatttcaagcgttgtacagacgtcgtttgatcttaatattctggcctacaaatacaaacacaacacccgaagagagcgggaataatttctctcaaactaatgtagaagcatctgctacttctgaagtgcaagctactactatatttaatgatgatgccggtattaccaccagttctatcgacaatcctgcgtccatctatcaaaag

SEQ ID NO: 2862 - DNA, 495 bp, unidentified
  source 1..495: mol_type = unassigned DNA; note = unclassified viruses sequence
gtacggcatcattcaccggagagagtgatctcacaacgaataagaaagacgttaagagcgttaacgacacggaaacggacgttttgcggttacctattcaggtcggcttccccgcgatagcagccctatcaaatggagcagtttccaacttcctaagcacttggtcgtgcgaacggattttacatcagaccagcacaaacatttgacaatataccagaaaacacccccaccccctatcttgctgataattcatcatcagtaacagacaacacaggtctatttggaaacacaacacatgagcaaactggaaccactggctttactgatcaatcagtcgaagtagtcgtcaatggcggagacttaacagcaggtctctttgaagatgtagttgcaacagatactactaataccatcgttgattatctatctagatatcgaaaagtttttgactatcacttcggttctaccattggttaccatcctattgcagatttc

SEQ ID NO: 2863 - DNA, 500 bp, unidentified
  source 1..500: mol_type = unassigned DNA; note = unclassified Picornavirales sequence
aagaacatattgattaagttctttatattattacgcggatgatggcttgcgtgagggcctaccattcaaacggataatatacatagatcacttttatatgttttgtttttgtctttacatgtattcctttcaagaatatatggtgatgaagtcctgtaatgccattataggttaagaggcaaggtgtcttaatactaggtgaaacatgcaggcaggtctatttaagaattgattgataacgagactattaatgctgtgagttatttcgtgcaaaccgatcggataaacatttggcgacaaatgcctttgggcagagctgattaatttgcaggttaacattaatacgtattgtgcgtcgagcttcttttatagatatcggttgctagtattgacgaaatctagagtttgttttatgggactgctctgcggctaaagtaatagtgagttcctgactttaggcgtttcaagatgaaatcgtcgtttaaattttaaatctcatt

SEQ ID NO: 2864 - DNA, 501 bp, unidentified
  source 1..501: mol_type = unassigned DNA; note = unclassified Riboviria sequence
tgagccccaactcatggaattcttgttatagatactaagtcaaaagatgtgacgttaatatcgtagtttactgtggtaaaacgctttaaatgtcgattggtattgacggtgaaatctttgtatataacgtgacgttaggtacagcatcatactccggtgaaacgttttatgtataagtcgatacactaacggtaaagttatattctatagttttctcttcaagttttaaaaatgggaatccccctttattttaattgcatttatattcgcgtaagatctcttcttacatgcgtcttattttgtgttcaacgacattatcaaccgcttatctgggatagcaacccgttaggatgtcgtcatggtgtactacctctagatagttaaaagctagcatgatccttaagcaggagatgattgtatctagagaaggataatagttcttctacggaagcaactattttattttattttatttttaagtcttatcttcaatgtgacctt

SEQ ID NO: 2865 - DNA, 502 bp, Reptile sunshinevirus 1
  source 1..502: mol_type = genomic DNA
aaacggaaatgaatgactttgttaagatttgatgatcaagttcttcactaaaatatacactactcagaaagagtagattgtggactttgtattcaaagagttaaacccacgagtcatccttcaacagagtacgagagaactccacactcttcccaattaaaaaatagggagagggagagagattaggcatacctagatctagaagttcagattctcctatctttgagcgtgttgaacaactcccaaaaacctagtcattgaaggcttgagaagaaggcaaagaacacaaatcacttgtttttgaatacttactgtctctaagtatatggacaaagaccccctcatcacaaacattacctcttaattggatgattaaatgccaggttgagatactctaaaaatgaaagaattgaagttagggctgtagttatctatcaggatcacagggtggcttatttttcaaatatattgggttttaataagaaaattgaagggcattaaa

SEQ ID NO: 2866 - DNA, 506 bp, unidentified
  source 1..506: mol_type = unassigned DNA; note = unclassified RNA viruses ShiM-2016 sequence
ccctagggggtggaattaaaattccaccttctagagatttttacccttaataaatgggttaacgatgataaatatttgagtaacactctcgtcaatgctcctagagttaacgaagatccaagtattttattactctcgtcaatgcttatttaatattgtatttagttttaagtttttatgtgtcgtggtgacctaaaaaccaaccaatttttaattcataatatcattttaattatatgataacccgtttaggctgtatattttatatgcgtgttatataatatcatttcattaaatttcatatattcattttaatttttgttaggtcattttcatccctaacaaattcctttggttcattttgagtttatgattttattattttgattagatgttttcgatcccctctttttattttaaaaattaaattacaaataaaagataataagacttctaccagagagagcagttctaaccctgcgcaggtagttgatacgtgtgttagg

SEQ ID NO: 2867 - DNA, 513 bp, unidentified
  source 1..513: mol_type = unassigned DNA; note = unclassified Picornavirales sequence
gctactcacaaccttgttttctttctttgattgaatcaagccactgtgtttctccccacacacaaccactgtgtcttcttcggttgatatagtgccgctgtgctcccatcccacccattgcccttcttgatgtcggttctgttatttataacagcatgtctctggtttttttctttcggtgatctctcgcactagcatagattgcgagaacgatgcccttgaatcggtttcttcggactaacgaattcacataagtcacatatctttaaatgtccctctagacatgttaattagagggaaggtatgtatcagagtgtgtctacggtaccctgtatgtcaatggttagatgtacaaattagggatacggttatggcccaggaaacgttggtttacctgggttatacataacacaaatgctcattttgagcttctcttcttatgaatttattcatgcggcgaatggaacgcgcgtcttcggaccgtaagtactaatagccaaccacacatttgaa

SEQ ID NO: 2868 - DNA, 513 bp, unidentified
  source 1..513: mol_type = unassigned DNA; note = unclassified RNA viruses ShiM-2016 sequence
ttactctacaggagttgacgttttctgtagtgctttagtttggagtagtcgaatctttcgaccccgggttatgagtaaatcctggggtttaaaattttactcgaaactaaatttaataatgaaaaccgagggagtagtaaaccctttacaaattcaaatggtggtattccacaaggactggatggtccgaatcacaaaagagttaactttgctctagaggatacactacatgattatagtgtagcttctgaagaaagtagtgacattacctcacttaggcaacgccaatttctttttgaaattggcgattgtggtaatatttctcagttttgccgtgctcgtcgcgctgctcgttctcttgttcgcttgaagtatgaggctcaatctttgttagagtctattgctgattccaacgttcaagccaatatagttggatttaccgatcacgatgctgggtatgaagcgggtttaatatcagcccgtgatgacagttattatgttagtgatgaaccc

SEQ ID NO: 2869 - DNA, 517 bp, unidentified
  source 1..517: mol_type = unassigned DNA; note = unclassified Hepacivirus sequence
cccactagaaacgatcttctagaatggggaaccgcgacaagtgaatcacgatggactaagcgaccaagagtttaagtgacagggttgttcgcgtaaatcccggcttaaattcaaagttgaatatgtccgtacggagcactctagcaccggacgaaggatcgtggacggtgggcgtagggtacacagggtcagctgtgtataaactcagtactgaagcaggatttgggagcattgcagtcacactcaagtggagtactccgcctttaatacccgtatggggcaatactccgaggagggcgggttttcaaacgaaacttgagtaatactttatatggtctcaatatacacttgtggatgtagggaaaccagccatgggcggacccaaggcggcgcacctgacacatgcggcaagagaaaaaatccttcgggtgatctctgggtccattccaaaactatgaattgcgatttgtgcttacctcgtgttggttggctttgaacactaaatacaaacactaca

SEQ ID NO: 2870 - DNA, 519 bp, unidentified
  source 1..519: mol_type = unassigned DNA; note = unclassified RNA viruses ShiM-2016 sequence
ttcgtgtttaattgagtttccggtctccataagaaaccggcctacttcctagggattagggagccacgtgtggtacacgctatgcagtggtgcgcaataaaacaccgggtttgatctcctttataatgatccatttgtcgatatatgataatcgtcgcaagttaatatgttcaattgtttattgtttctaggctgtatacacttgtgtttttacttgtaatcccttggctatttagccttactaatcaaggtggggagggtaattccaatacctagattctagatagcctctgaccttgagttaaaatcggaggtgaattattgtgactcgctattactaatacttctcaagaaggtgtcccttgtgagacaccaacaaatacctcgggtccttctgctcccgaggtgccttctcaggcagttaagcagaattgtttgtcaaagctagaaggtgcatcgtccactgcctttcaggaagatggtgctgtagtatctggaacaactagatctgttccatca

SEQ ID NO: 2871 - DNA, 527 bp, Alphachrysovirus anthurii
  source 1..527: mol_type = genomic DNA
gactaagatccagtccaccttctagtgtgaccagtctcttattctattggttaatgtctcagcattgtctgccgatacattaaccatatgttactaatcttgtctctctctgttccatttactaagaaaacttgcttccattaccatccaaatctgctcacgttctcacatattcttgttgttatatccacactcgcactcggtacccgtgtacctccatgcttcatactctcgtcttcctctactgcacttctttgttctacatacttcggtatttcctcatccaccatctcattttccaaccggctctccctcctctctggttaatgaatagctcttctagaagcactctgacgtctcccatactggactcactctttaatttacccatcggcaccaactcatctgccactgcacttcttgttaacgcatcgcagtgtataccgtcataggttattcctattatcttatcatgttccactccttttgtaccaatcccatatgcttcatttattcttttatcatat

SEQ ID NO: 2872 - DNA, 527 bp, Salem salemvirus
  source 1..527: mol_type = genomic DNA
ttatttatattaaagatcatgttgctcctcagtcagtatatataatttagctgattgacccgaattactacaacccacctttaaagctactagtctttgctcggccaacttttctaattagaataaagtcgctttccttgcagctaataatcctaaggctacagccaattgcttgactcctggaggttacacatgggtaatcatttgagcttgttcagataattacaagctgagattgagacaaaataataagaggaatttacctgtcctaatttaggtttagaagtgctctaagacagttaatcaattaataaaaaacttaggaatcacgtcaaatgaggcacacactgctctagaaccacacccaagcaccccggtttcctcttacacacccagcctgcatccccacaaaaacccaaggctttagcaagcccaagccaagcaagacgaaacccaaaaatcacggttcgactcttacctcattctccaccggttgcaattcagcctcagcatagcctaagggaaat

SEQ ID NO: 2873 - DNA, 549 bp, unidentified
  source 1..549: mol_type = unassigned DNA; note = unclassified RNA viruses ShiM-2016 sequence
gcaaaaacctacgcacaatatggccttagtggtgtttggccttaatttatagcctttggttaatcgacgccctctttgaggagttaacggacggccagctatggtcaccagaaaaatagcactttagacaaatacatttaaaaattctatattttcttgaattaagattgaagttcttgaactgaaagtcttcaatgaattgtgcaatgtacgtgtaaacagttccccgcgagggtgtcccacgttcttagcgtttcgccattgcattttgaagttgttgcattagtatgtgatagaaccaatttctctatgacctggactgtttttaactagatggttatggcagtaatctagtagttttgtaccaggcattaactcaactttagtgatattgtctacttgatacgtcgcgttttaaaatttaaggacaataggcgaggcccgcgagttgtcaaatcttaagtctatacccagatggtaaatagtatcactctagatgaggctaactaaagacttcttaaaacttctgcctttctttttccaaaattt

SEQ ID NO: 2874 - DNA, 553 bp, unidentified
  source 1..553: mol_type = unassigned DNA; note = unclassified Arlivirus sequence
tagtaattaagaaaaaccaagacgctcaggtctttcatctcttacaagaaaatagaatggcatctacaagctcatcaaaaacccataataccattgaatctgtaaatctggtatatgatttacgtgataataaaagtggattcaattatcgcggtatcataaaattggggagatctagaactgcggaattttcagaacaaacgagaaaaacaacaataaagaaatggataactaaaatgaagattgttcaagggaatcctgtagaacttttaatacaatggagcattcctacaaatcaagatcttgttgaattgtgcttctccacggagatcactagcactgatttgagtatcaatttgggagtccctcgatatgaaataaatattgctgatttggagatcataaagtatgaaattggactgagttcgactcctgctaccaaaactgaactgaactattagggattatttacacatagtatttggcttaattaattgattaagaaaaaccaagaccactcacgtcttattttcctccgtattcctatataaac

SEQ ID NO: 2875 - DNA, 555 bp, unidentified
  source 1..555: mol_type = unassigned DNA; note = unclassified RNA viruses ShiM-2016 sequence
ccccctagccgggggcaagaacgcaagttcacctctagaatcacctgtacaggtgcgtatcagtgattggtacgttcttgtgcggctaggggtccaatacaactgctacttgcagtcggacacatttcagtgccggcatgtacgtggcatttcgcgacgcactcagcctaaaggaggattaacattgtgcgtatttcacacaaatataatcaacctacctggttagagtgtcggtccgataaaaacggcccgttaaggtacgaggaaattactgttgaaggtaattccagtactccagatcgacaaataccctataaggctgcaaagccgtatacaagggcagatgtctttctagatagcagtgtaccatctggcgtcccggctggagttagtcttttagacttgcctacagccgacgacgttgttgcatcgttgttatctgacgagcccacgttggcatcatctgtgtttcaaccctttgttgatacgtcggatatccagaatcaggcacttcaaaatgccattgagtatggaaatatcttactccttgtctct

SEQ ID NO: 2876 - DNA, 562 bp, unidentified
  source 1..562: mol_type = unassigned DNA; note = unclassified RNA viruses ShiM-2016 sequence
tctaggccgatgacggaatttcgctccttcgggggcatgcacggggaacgtaccttcggggcgtgctggtaatactcccaacaattctagatgcgtactgcgctcagcgccgggcacaccgttaagtgcttcaccctggtccttggtaaggttgatggaccctgaagaaacagtaaatcaccgggagagtgaactctcgttacatcatggttcgcccagttgcaaacgcgtctagagacaactaggcagagcggcagagggaagtgagacactctctgaagcgattaaatccgcgtgctgtccgtgactatagctgccgccagcggggattggcgatcgttaagagaataaacccgcccacgcatttgggaccacattagtggtatagcaacaacaaccagtacggaatctggtcacgtaactttccggccagcccattggtttaccactaccacttcggtgttcttgtggcattgggacgtacgctaccgcgagggggccccgctctgggtgatgagacggttgatggtcccgtagaccacacttccccccctacgacatc

SEQ ID NO: 2877 - DNA, 566 bp, unidentified
  source 1..566: mol_type = unassigned DNA; note = unclassified Hepacivirus sequence
gggggcccggcggaggaccaacgattgacgttcttcctggtgacgggaagtctctcgttggcagctccgaaaccgagcgctgcgttaacccgagttctagaatgctacgcgatcagctattcatggacgaagactcgagcggcactagggtaagggttcttcgggtaaatccctcctaatgcttaacgtttaataagttgttgaatactggtttgctacgcggacgaagctcggcagctccggcgccacggtcactggttgtgggttatccgggaacaaaccctccggttgggtaccgtaatataggaaccccataacccgggcctcccgaaaggagctcccggggtaccctaaccctgcaacgggcaaggacatcccactacgccgcccttcaaaggagttactcttccaatatattcttaggcgggttgtcaaagtgggccgcggccgtgcaggtcatcgggcttggggtagccatggggccaccaaggcggggagtccccctactcccctagaccaaaaatcctacgggtgaggtctggtggcactttttccttatattaacc

SEQ ID NO: 2878 - DNA, 572 bp, Myriavirus myriapedis
  source 1..572: mol_type = genomic DNA
gtccttcgcttggtaattcaatgttaattgtcctttctgtcctcatgttacatgtgattttcactatctttccttaatttatcaatcgataattcaaaaaattggcagaccgtgttacttgccttattctagaatattttatttgtatataaaagtctgataatgttagtcttgtaattctttttatatattttaattactattcacattccgattttgactaagctgtcacaaagttaattaattaagacaacacaaatgaaattttttctatgtatattatatattcgtgttttaatgtttcaacatgtacaatttacaatgcatttttacaaacatacattaatcaactatttttcgaagagcttatcggtaagctctcaatattgaagtgcagttttacactcatgtacttaatggataccatttttaacaactatttttggcacattctcgtatgacactctatttagtattataaactttattaataaacaccctcggtctcataccaacctgttttaaaagcggttaattactgagtaattttagatttaacagctttgttcaca

SEQ ID NO: 2879 - DNA, 573 bp, unidentified
  source 1..573: mol_type = unassigned DNA; note = unclassified RNA viruses ShiM-2016 sequence
caacaatgggagaattacacgtcaatttccgcacacagctccaagttgtcaaagtcaaaagctcagaaccaggcgcaggctattccaaaacaaagcgcaggctattccagctttgatgaaaatggatctgatgaaggggaaggaagacaatgtgaagatgctgtagatggtttcgaagactcaatagttaagaggatcaagaagagtgttgacaatcaatataaggttggaaaggaagagtttctgaatctaggggaaagaaaagaaacacttcaaaaggaacctaagactgaatgtgaacatctcaaatttgagaataaagtgatcaaaaagattataaaagaaataacttatactaagactaagcgtgtggatatcacatactcggatgaagcaactactagtgaactggaagaatatctcaagattcacgccaatgaattgaatgaagctggaaaccaatggtataatattaatccaacatctaatttatctaaatccttacctgagaaagtgaggaagctttatgatgaactgaactttgaacttctagagaagctggattcaaatgaa

SEQ ID NO: 2880 - DNA, 577 bp, unidentified
  source 1..577: mol_type = unassigned DNA; note = unclassified Hepacivirus sequence
aacaggggcgagagttcctgttggtgtgtggtggccccacggaccatgcgaagtcgaatcctacgcattctagaatggatgattcccgtaactatccacggaatggcctaccctttggtcaagtctgacagcttcgcggggcttgagacttaggggtggagattccgagaggcctgtacgggtattccggacgaagtgcgataggtaacacggcgcatgtagaccgcgtggagcggcagaacagctcccgtgacaaggtcggttgtcacgttaataaactcagtaacttgttattagctactaggcttgctgtctacggaagatgttgagggaacgtcgcgtctaaagataacaataggctacggcccgcgagttgtcaatcctccctgggaacaggctcatcatctctccaaaaccagttttggctagtatgtgatgtaacatgttaggagaaatccaaccatgggcggacccaaggtggcggccccgacacagccggcaagaggaataaccttcgggtgacctctgggtccatttctcaaagctagagtgggtgtgtgtgtcgtcgtttgcaaag

SEQ ID NO: 2881 - DNA, 578 bp, unidentified
  source 1..578: mol_type = unassigned DNA; note = unclassified Hypovirus sequence
gtcttaggggtccctacttaagatcacccattgggtgtttaaaagggatgtgatcaggtttcatgaccaatcataacgtaaccttttggggtctacaatgattccttttggtggagatcgtaatctccgtgagcatagctcgtgtgtttcgtttaaaacacgtgacttgatagtcgtggttagctaccgtgcacctaggtgcgtgccttgctcaggcgtgacctaacggtctaccctatggggcctcaacagtggtgtctgaagacaaactgtcggtattgtgggtggacttgcgttccacgcgtggtattgcttcggctcttattctggctactgtattcgggttttgaagcgtaagctcgttcatgggattgggcccccatgtctggttgatggtcacacatacgtgtgtcggtactggtatctaatttcctttgttatctagaacctggtttgacagcaaacactctaagctttatttgtttctcttcctagaaacatcagccacgctcttgtcagaacggtgtccttttccaagcggggagtagtgacctttagcttgatccgttaaggatgac

SEQ ID NO: 2882 - DNA, 578 bp, unidentified
  source 1..578: mol_type = unassigned DNA; note = unclassified Hepacivirus sequence
gagcccatccccgaaagggggtgggtcagccttatggctgtgtggtgtccccacaaaccgactcctaaacctcgctggttctagaatggtttgatgtgttggttgaccactggtcgaagctaactagcatatggtgttagggttcttcgggtaaatcccagccacatgcgaaattagaataagaccggtgtgcaccaatgcctctcttccggacgaagccggtcaggcatggagcacggtatgccgagaggcccgccgcatcagttatcgcggtggcgacagggcacgctgtcgttaaactcagtcctgatacagttgctgctgtgggcattgtctacgacactggtttgcggtggaacgccgcgcttttaaatacacagtagggtctgtcccgcgggttgtcaatccgtaacccagaaggggccgtaacctagtgtcaaaaccaatagccggcaacagcgttctgtggaaggagcgtaagcaaccatgggggtaccaaggtggcgtcccgtgcacaggcggcaaggggaaaatccgtatggtgacccctggtaccatttttttcttagtagaatgtt

SEQ ID NO: 2883 - DNA, 582 bp, unidentified
  source 1..582: mol_type = unassigned DNA; note = unclassified Picornavirales sequence
ccgtggggtttaccccacgggatgttttcgacgcagctactgcgagagtgtagcctagtttacacagctagaaatctgtgtgcccttttgtgctcattttgggtgaataaatgatcacgatgcccatatcgttaaatgtgtgctgagggaaactttcgcactgtggcactcttttcggacggatctaggttatgactattgcttgaataaggaaatccccgttctagcggtgtagtgattggcactaaaccttgtgtggagcagtctagaccaacacataatagcatagtgaagttaatggtacgagttatggagtagtcgccttctatatattaggttggccctggtaacaggtctaatatgtaatgggttaatgccatatgtttgacgaatgccatgatgagttaaaggaagataactatgtgaaaggtgtgttggatgtatccctctaaggagcgtggcttacttaagagctaaccctgttttgaatagtacaccagcaaagaagcaagacgtacttatttgaggcagacttttaccaagtttcatattgtgagtagttggaaggttccagaaagcaat

SEQ ID NO: 2884 - DNA, 596 bp, unidentified
  source 1..596: mol_type = unassigned DNA; note = Lassa mammarenavirus isolate LASV/H.sapiens-wt/NGA/2018/IRR_077 Z1R sequence
aatgcaagatcatctcaaagtaccttgcagataatgagaagctatcaaggcagaagttagcttttggtccagaccgaacccagaatgttgctcatggagggactgaaactactatccctttgcattgagattgactctgcaaggccaatggatgtgagcataacactgaagacaaaacggttgaatccattctaagtgatcatgggattctcactccagctttatgctttgtggtcctgacggctacaaactcactggtaatgttctaatcttgcttgagtgctttgttagatcatctcccgccaattttgaacagaagtatttagaagatcacaagaaactagaacaattaagatgacttggagtctagacgcaggacaacattttacaatgaacagatacctgattgggtgaatgacaaactcagggacacttattcactttgttaaatactcacaagaagtaatgcactataagatagatatagaggattttaaagctaggaacaaattaaggcaagggaacatagaaagtcaatttgttaagactgataagatgagattattagaggattttgaaagctaggaacaataagg

SEQ ID NO: 2885 - DNA, 604 bp, Olluvirus shayangense
  source 1..604: mol_type = genomic DNA
attgatgaacagaaacctctaattggtaatttttttcttaaatcgctgtgtctcgcagtggtttaaaactgactaatcgggcattatcccctaaactgacctaattataccgatttctgacttgattcaatataatctcgaagcatgaacaacatgttaccctcaacgtctcgacgaaccggacagccggtggctgttaatcagttgaggcaaaccgccgtaatggctactaaccctgacattaagggtgcaaatgatacagcacgacaactagagtgtatcaatatgcgtctaactaaaattgagaagactctagaatctatccaaaataccatggagattttgagggcagctgcaggttcacctgcaccaatatatccctctgctccctcattagtcactgaggtacgaggactaccggggttagcaactccggtttattccagcatggacgctagacggtttgtataaagccaaataaacgggctcgtcccataaaaccgttaacagctactcaaaaccttttcaagtgttttaaaatcccttgtttcaggctctctatactcgtgatttcctcgtacaaattcctcgaatctatcaatct

SEQ ID NO: 2886 - DNA, 613 bp, unidentified
  source 1..613: mol_type = unassigned DNA; note = unclassified Picornavirales sequence
aatcttcagtgctgtaaagtcaatctaaaatggcagccgcaacagcagtagcagcattaggtaatacagcctcatcatcttcaacagcaggtttacaaattttaggaaattatttaggtaatgctcaaaatttagctaatcaacaaactttaatgagccatgttgagaatacttttaaagagtctggtcttcctcgttatatggcctacactggcactggtgatatgccacagaacaggtatcaggtcagcggtggtaatttctactctgctggtccagttaattctaatttgcctacatttacaactcaggcacaacaagatacacattcaggcagaccaggaagaccgtatgaagcagttccaccttttaatcaattaggtcccaacaatgaaatgcgagttttaggccaaaatgatcgtcaaggtttaggtttcggtcgatataatattcaaaataattttgtagctgggggagtaatgacagcagccacccccaggaatgcagccgctcatcaagcagctgctaggattcttcagtaaaaactttcatccttaaaaacttcggagacccggttagataattgttatatttgtttaagtctagaattaca

SEQ ID NO: 2887 - DNA, 616 bp, unidentified
  source 1..616: mol_type = unassigned DNA; note = unclassified RNA viruses ShiM-2016 sequence
aggggccccttcccctacctctcttttcggccagcggcctgctggtcctatgtgtgctacggacttattttcggataccagatacaagttatctccggacttattttcggaatcaccatagataggcaaccaaaaaaccttcgtgtcgtcattatgtgttaatgttacaagcaagtgtttctcccccttgcttggcgaagaaagtctaataacttccttaacaaagaaccctgagtgaagagccggtgtcaaaaccggaattggcggaaattggcttatgtcgaaactgatcagtatttgttaagaaatagtgttagcaaggctatagtattattgcgcaaacgagaattctaaatgagagtttattctgcccaaactgtgttgggagttcacatcgagaggtgtgcccttcgcgagatctgaagcagatattctcactaatcatggatgattcttgtaagcgtggtgtgctataatatcgatttactcaggttagatgaaatctgagcgtttgttataatagtcttctagagaccttgcgacgaaagtaaaggtaagctgaagtgacttccgagccgtgtgaagagaaaacggtcgtttttcccagtacttgatt

SEQ ID NO: 2888 - DNA, 628 bp, unidentified
  source 1..628: mol_type = unassigned DNA; note = unclassified RNA viruses ShiM-2016 sequence
tccaggggtgatccccctggactactttgaagtattgtgaaatttttcgagaaggattgtacacatgtgaccgtgaagcgcggtctgtttaacgagcgtccttttcgaaggacgcggattgcatcgttacacgctattgagtaccgacttgatgtgcaatgaatctgttctattaagcttatttcaaacttttgctgttttacagatatttaattattctattaacctcgaccttcatatgtaaaggtggaggcgttggttttgaatatttaatattctgtattgttgaggttatcactatacattattggaagtgaaaatttcctcaatcgaggagagtttggcgttttcaattaaaaacgcattttctagataagtgtcaagaggctctaacgaacttgatattgatacttattttgcactatacacttgtattgttctgaatgccatataggcccaacggaacaaattggtgtctggatgaatttccagctagaccactctagatctgtgattttgtgctttttaggaaaagtaatatctaaagtttttcatggtttttcccagagataggggagctgtgtgaagtttccacagttcactttaaataaaccttgttttctcaaga

SEQ ID NO: 2889 - DNA, 631 bp, unidentified
  source 1..631: mol_type = unassigned DNA; note = unclassified Alphachrysovirus sequence
tgataaaaaacaaaaaacctcttcagccagtatctgatcacattttgggcaaccaccgtcgtgttaaatgttgttggaaatatatctggttgattgtggtggcgaggcagatgtgtggtctgggggtacagcctcaggcagtgtcatctgcgatcgtaaatgtctgtttcgcgtgacggcagaacaggctaaaatcgtaatcggtaggcagttactggtggtaatatccgatgataattcttgtgaagtattattctgcccgctgtgtggattgggcgtctacactaacactaggaacatgcatactagcgaagtttacgttgagcacagcgaacttccagtgcctagacagtggtcgcacctgatgtcggcacataagacatgttctaacgcatatgacttgctgttatcgcgtggaaagttgaggacacggcgtaaggcagtcaccggtactcaggtaggtacagtattgtatcgccgagggtcggtatatctagacaacattgggccaattggcgttgaccattagctgaggggcctgatgagtacctctcaggaggacgaaacgccaatgcgtcgccccggggcaagataacagtaccaaaagttaacgtaaggaatcaacaacaca

SEQ ID NO: 2890 - DNA, 633 bp, unidentified
  source 1..633: mol_type = unassigned DNA; note = unclassified Marburgvirus sequence
ttcttattgttcaaagttgcaagggaagttatcttcccgagttgatacaaagacactaaacatttcaaaagcatgtatgtgggcaaaacgtaactagaccatcttgattgaagtagtaatttatttctgtcttaaatgtgattttcacttcaaaagagttaaatggtgatagatcaatctttgaaattacccatttatacattatagagaaactaatattactaacaaaaggggtctacctaacgggtatgatcgagtgatcagtctatcttataaaccaaacaattgacttcttactttttaagaatcaactaacagcatagaaaccacatttatccttacgtaatctttggcttagttggaattaacttttgttgtaattcaatacgtttagtcatagtatattgtaggattttttataagtttagaataccttaaatcatacccacaaaaaatactgttttaattaagaaaaactatgaagaacattaagaagatctttctctcgtagtgttcttttactggaagaagtattccaatcttaacttgttggatcagttgtcacttaagttgttatttttaaaattgattcacacaaagtagtttaaatttgtatctagaataaattttaat

SEQ ID NO: 2891 - DNA, 635 bp, unidentified
  source 1..635: mol_type = unassigned DNA; note = unclassified Picornavirales sequence
tctcggggcagtcggtcggggcggttagtgccatgtgtagggcgtttaaagacgcaatactattggtgcggccgttactgacttcctgtctcgcaggtcccactcccctttcccttttcatgtcgctatcttctctcccccaacttttaaactggactgattttaacgtgtaacagatgatttgtggattatggatgtctagagatatgatctccgaaacctagcttgtttcgctgttattgacgcatttgtcattcgatggtggctaagtgcccacaaccctaaacttgggtgtggtcaacacatgagtcaattcgtctgcctaattcgccatgaggacagtaacgtaattgctagttagtagaaatcgcattcttgtgtcataggaaacctgtggccgatagttggtaaccactccagcgtttaggactcagagaattttatctttctatgatttaacacaaggactagtgaggagagagtagaggctgtagaccggtttgggacctcattgagtatcccttgcctagtagcaccggctatggactccgggttggaatcccggacttggctctatacttcctgatagggacgcggctggccgcttctcactagtatagtcagttgactttcac

SEQ ID NO: 2892 - DNA, 648 bp, unidentified
  source 1..648: mol_type = unassigned DNA; note = unclassified Picornavirales sequence
ttaaaattgtacgtagggaacaaccctacgtacaatggcctgagccaatcagaccctggttttacaccagacaataattggcaaacaaaaacattgggcgctatagcttaacggtgcgtcctgcccccgtatggagtggttgaatataagtgctataccctgaggagggaataatacctaagtctatgagaaacacattatttatcgacgaaaccatttaagctaaatgattatgatttttctataacgacaaacagcgtaaactgtataaacttacaacaacccaacggattacgaaccttaaagtaactgttctagatgaagtctagtagtctccaaatattcccgtgaaacggatgatggacggaacagctctattttaagacgtgaggctttaaatattgataattacattacctgagagccctctttatgaggtttgattattaataaaattagtaccaattcttgatagaatttaagtatgttaacaatgctgaagacatgtatttcgattgttaacctctacatttctatgaaaaggatatgcgagtctcggtggatatcgcattatggtcgcagtcaacctgcagttttattaatcccgtgtcggagcggtggtaatggagccggactactttgccaaaa

SEQ ID NO: 2893 - DNA, 650 bp, unidentified
  source 1..650: mol_type = unassigned DNA; note = unclassified Riboviria sequence
cttgttcttacactctagaacaaacatttctggattctccaaatagaacttcttgaaaacttcgggccctccctttatggcatcaaccagggcgggcactccgtattccaacacatcgggcaggcattcccctttggacctccaatagggtgctcctgctgaggcatttttacttgttgtaacatctgccagcaattccgacaggtcttcagcgtgccagcttttaacctcacccaccggcaacagcttctttagagtggctactttcgcgggtaccactcctgtcgggtccacttttatatcgacgcacttacggcttgtcatcaaactaagcctattaacaaatccatcaacggttccactcgagtatatggtgctgttcattgactcggcgacctcctccggagagtacacccgaacaagcccactcactgttgccggtgggtgaggttaaaagctggcacgctgaagacctgtcggaattgctggcagatgttacaacaagtaaaaatgcctcagcaggagcaccctattggaggtccaaaggggaatgcctgcccgatgtgttggaatacggagtgcccgccctggttgatgccataaagggagggcccgaagttttcaagaagttctatttggagaatccagaa

SEQ ID NO: 2894 - DNA, 651 bp, unidentified
  source 1..651: mol_type = unassigned DNA; note = unclassified Mononegavirales sequence
tgaggtcctgatcgcctacccctagcccccttgagcagaatctcataatcccttgtgtaatccccgtctgatgcctcctcctcttgaggcagctgttttaaaacctctaccatgggaatgagatacaatgtttagcactaaacctagacgatcaggacacgatgatgacgatgacgacgaggtgccttatgtgcacacccctagtacttcaggtgtcgtcactaggagggtaatgtccttggacgaggtgattcttgccaagctgaataagctcgaggcagcagtggccaagataagccagacccaggatgtcatggcggcagagatgaccaaaatctcgacggtgctggctactgttcaagcaatcggaggacgcgagagtgcatttagaatcagcaagatgtctgatggccctcaggactctaaacggaacagaccgtagctcgtctagaagacctgtggttccacaaaaaccaccataaacaatattaacaaaatgctgttttaagtagatgatcggtccgatctcgtgcaccctgttaagggttagctgtgtctgttttaaaactccttttcttctgaagagaaaatggaaaatataactactatcctttttatcataggagcacgattgctggacaaagcgataaa

SEQ ID NO: 2895 - DNA, 652 bp, unidentified
  source 1..652: mol_type = unassigned DNA; note = unclassified viruses sequence
gtgcagtttttatactgcacgcacaatgacccgctaatatatcggattctagtatttctagacaattatatattagacctaatttgttttgttaatattactttcatggtctttaaatgaggcgaaaagtaaatttaaccatcctaattgtttgttagtatatttcatggatgtaaaatgaggcgaatcaaactaacaactattttaatcaattccgaatactatgacgaaaccatttgaatactattcttgacctgattatgatataacgacaaacagcaattattataaactgtataaacttttaataacaacaatggactacgaacctatatgtaaccaagatatcgatgagcaatctcgatcccaatataagagtgaaatctttgagggccgttttggcaatgtatatagacgtggggttttaatggctagtaaccacattacttgtgatgaaactcaataactagtactaattcttaaataatttaatcatgatataaatgctgaagacaagtatttcgatttatatcctctgaatttattaaagaatatataattactcggtggtaattatattttagtcgcagttaacctgcagttatagagcatcctgtgtcggagcagtagtaatgcaacctatcaacgaaac

SEQ ID NO: 2896 - DNA, 653 bp, unidentified
  source 1..653: mol_type = unassigned DNA; note = unclassified RNA viruses ShiM-2016 sequence
gatatacacttattagtgtatactttatttgcctgaaccgatgtgagcagtatctcccggagtgcggtaaccatttagcggtcccagacacagctgtctctgtgtaaaacgggtaatttcgggtagggtttattcatccggtcattttattccgtccattatggacttcatccatcattgacattttatttttgtggttggagagctgttagaagaagctctcgtttgcaaggtaggctttattttaagctgaggttgacagatcatatctatacgacactttggtgttaagtgtttagtcctcaggtctagctatgcgattcgtagtctagaccttaatggcagtgaatcgtacagtagctggtggcaatatacgtaagaccaccatactggcattccagcagtggaatgtgacgcatccttagatagttgatgctttcatcctatcttccgctatggggcatacccattcatgattcacaggtttcccgttatagtgcattttgaaaacgtttctattgaacacgactgacaagcatgttgggggaatcctaataggccccaacggaacactcgcagagccgttaacaattcattagagtaaatcgttagtagagtgtaccggtagggcactgtcattgaaaatatttcgc

SEQ ID NO: 2897 - DNA, 656 bp, Ranunculus white mottle ophiovirus
  source 1..656: mol_type = genomic DNA
ataaaacaagcctataatacaaatctcctgaaaacatacaaacttttgagataaaatttcaaatacaaaatagtcaaaacatgaatagtgctgattctagaattattccgatgaataaacacaaggaatttgagaaggataagctaagcttgcaaaaaatagtgattaatcctcaattgcaagaaagaaacaatcatttccttgatatattatcacgatacaaaactagttattgctcaaaagaacgttttttgtttggatcatggttaattaacaataacttagtcacttctccttttagtcctaaagcgtttataataattaaaacgtcaaatgagctaattgattatgatttgtttgaaggattggaaatctatttgatcacttctcttgaatttgcaataagttcgtatgctttacatctgttcaaagaagattttattatgcaagaaaaaagaggagaaacctcattgatcctcaattcttataaaattcctaagtactccctaaaacttgagaaatcacaagagaatatcctcaagaaaatcaaagaagactatagttatatcattaaaatgaataaatttaaatgaggagttaaaacaaatcaaccaataaatttgcatgaaaaatacaaaagaatcttgcggcttgat

SEQ ID NO: 2898 - DNA, 664 bp, unidentified
  source 1..664: mol_type = unassigned DNA; note = unclassified RNA viruses ShiM-2016 sequence
cccccttttcaacggcgctggcaaattcgccgtattgactattatgccatcctatatcagtcatccgtggcctttatatcgattcatattagtcaaatatttgccaaaactttactttcagtttagtttttcagtgtattttctttttgtgtatgtacgttgtattttctatgtaagcgtttgtcgcgagtgttgaaaattctctacaattacaatgtgtgaaaatttgaattatgctttataactctaccctgtattgtttatctaagtagtttcggttgaatctaaattggtgaatttcgtagatcatgaccaagcattttctctgaccctatgtatgttaaatttacgcaggttaaaagttattttagtgtttttcgagtgagtatcagttgtgttgatgaggcttcaaattttcggttttgacttgacacgtgaaaacccattatttgattctaagtgcttaactgaattctaggctctgtacgattgcttgttaaatccatgctgtcaacatgtgctacgcggctgtagcggtacaatttcctagtgtaaagaatggctggttagaacagtccccctcctaaagggaacctccctggtcgccggagtatgtaaatgcgacaaatgtctagacgacaagtttctttttctacgtatcact

SEQ ID NO: 2899 - DNA, 669 bp, unidentified
  source 1..669: mol_type = unassigned DNA; note = unclassified Picornavirales sequence
agagacccccttttcaagttttgtgtgtgattacattgcactttggattacaaaagttttccaagtttgatcacatgaaactgacaaaactcgacttttcgttttgttttgtcttgtattttgtttgcatgtgtaatgcaaatatgtagtactgttatgtacttatatatcgaagctataggtatttaccgaaacctattccatctgatggctatggttgtggttaagtctcataaacttaatcaccattaggtgagcgtctgttgacttaaggaatgatacagcgtttaatctcctagtgtcgctttgatgttgtgtgacatttcaagttctcatacttgtgttatgtattgcggtttggtagttgtcacgtacacaactactgggtttgtttttgcgttcagatgtctagacggttagtttgtcttgttgtatagacccgctttctcactttagtgactttgcgttagtggacattgcgcatcgtgttccctcaaaagcacaaatgaatttcatcgtttcggcagtgtgctgcaaatgttagaccaagttgtcacattgcagtttccggatatttatatccaccgagcgcggacgtgaaaaataatccgacacattatctcttacgcgtataaggggatgctaggattcatttaaatcttacttatc

SEQ ID NO: 2900 - DNA, 670 bp, unidentified
  source 1..670: mol_type = unassigned DNA; note = unclassified Picornavirales sequence
aggtggggggggcgcttatgcgtcccccccttcttttcccttcctgtccgatgtcggtctgtctcctgcggtgcgtcgctctatttagagtggtaatccgtgggttcagtactggttgaggatgggttgggtcccattccccctccctttaacgtcgctatcaacttctttgtaaccccacactttacatggactgatttaatggcttttgatgtttttgaggattatggatgtctagagacatgatctccgaaacctaacctgctttgctattattaacaaatttgttatatggtggtggctaaacgcccatgctcctaaacttggagatggtcaccgtatgagccaagctgtctacctaatttgttatgaggatagtagcgtaagtgttagttagtagaaatcgcattcttatgtcatagggaacctgtggccgatagctggtaaccaacccggtgtgtaggacatggagcaagtcaacactctatggtaaacataaggactgatgcgagaagagcagaagctgtagactcgtttgggacccaatttggtatcccttgcctagtagcgcgagctatggactccgggctggactcccggacttggttctgtacttcctgatagggacgcggatggccgtctcgcattagtatagtcatttgcaactcac

SEQ ID NO: 2901 - DNA, 678 bp, unidentified
  source 1..678: mol_type = unassigned DNA; note = unclassified Riboviria sequence
cgcgtgcacgttcacacgtgcacgcggatatgtagatttagatctatagcaatactatagttgatactttttgatggatgatatccaatttatgagagtttcgactactcatttttggattatcacatccatacttaaagattgattgttattgagatacatttacttcttcagtacttattaggtttgaatagccttaaataaactacttttctaagaaatagacacttaatgcttatagttgtaagctgcaaatactgtcttgaacagtacaactaccccccttttttctattaatcatcatttttctcgtagaaaatgaagatttgattgtcataattgacatctcagatgcatggcttgccctgtctgttataccggataatatccgttgacgtcttttgtgttttgatgtaaatataacgaaaacaccacacatacacacccgtctcgaaatcactttgtgttactagaggcggggaaccgtagagtctagagttatgtcattttgaaggagcttgctcctagatggtaactatacattttcttagattttgagtttcgccacttattatccttgatagagaactaaaactagtctcgtttgttgaacaattttcttttgactttgtcagaagtttatttgttcactcggttcatgtattttaatttaataac

SEQ ID NO: 2902 - DNA, 681 bp, unidentified
  source 1..681: mol_type = unassigned DNA; note = unclassified Ourmiavirus sequence
caaaccgattttagtcggtctgtgtcgtgctcatcaaactggaaactgagaaattagaatctggtagcgtgaggtgaatggatagctcgtccgttcattgcgaggccccccctgagatgacgaagggagagggtactgtgcacgggtaaaagaagaaaacactctatgatccgagttgagtgaaatcctgttgtgacagacgccggttgaggcagtcgcgcagagaggaagcgattcctggatatagaggtatcggcaatactgatcagaggcgtgaagacgcaacatcagatcaaacccaacaaaccggcacaggcgttatgaccctgtgttacgacagaggccctactgtccgggacctgagggaagcgcgttcggctgagcgctgccggctttatgcccgcagaggagtcgtcagaggttgctgtggagtgaccgccgtgcggggtggtggcaatgagtgccgccgccgtcagcgaggggaggagtgagcccaacccccataccaaatcgcgaacccggtgcgtattaacgcggaagacgccggggcctgtagatccagaaacgcggggaaccaaatcccgcacaagaggacgcaggaaaaattctgcctcgttttggctagagcagattgaagtctagactgacactgacccgggcttggaattgccggaccagtgg

SEQ ID NO: 2903 - DNA, 683 bp, unidentified
  source 1..683: mol_type = unassigned DNA; note = unclassified RNA viruses ShiM-2016 sequence
atgggccttaacccatgcaccttctttcgcggaatctatccgcgtcgctttaatgcgagcaatatagacgtgaatatatacgataattatatacatatatagttttagtttggtgtccatttgacattattatctttttatatatgattttgaacaatacatgattcaagcattatcttgccagagttgcgaagatttagttctgtaggactttgtagtgacttaagcacctaatagttgtggtagaagattgtagtagtttgtttcgaagctagatgaaattgtaggctgagttcagagtgagctagaggactgccatcctcgttgtagctattctaactgtactgtttctagttaactagtgatgagaacaaattagtactatgcttttatgtattctgatgaacggtggttttgtgaattatctgttgtgtgttgtgatattgattgtgtaaattgtgcgttttgtcgatgaagatgagggttttggtgtaagcagcaaaacttagtttgatacctcattgtagactgcaagcgttcgaaatcgtgaatggtcgatcggttttctttttatgactgttttatagagtttctagagtgattacaagtttatttgctggcaggcaatttttgatttaaaaggtaaaatattgagagttatttgttaaataataaattacaca

SEQ ID NO: 2904 - DNA, 695 bp, unidentified
  source 1..695: mol_type = unassigned DNA; note = UNVERIFIED: Potato virus S isolate 18-1113-2, complete genome.1 sequence
cagcttaggtaatcagcttagtagtattgaataaatggatgtgtttttgcaagttttgaataaatacaagtttgagcgtgttagtagtgctttgaataaaccaatagttgtacatagcgttccaggtgctggtaaaagttccgcaatcagggaactactgaagttagatagtaggtttgagtgcatcacccgcggccggccagatattcccaatctagagggtgctttcatcaagagcgaacgtagtggtgaggataagctgttgctggttgacgagtacatagaggggcccgttccagaagacgcttttgcaatctttgcagatccgctgcagagcacagctgttagcccatatagagcgcatttcatcaaaacactaagccatcgctttggcaagtgtactgcttcgctcttaagggatttgggttgggacgtgcaagctgagggtcaggattcagtacaaattgccgatatcttcacggttgaccctaaagaaacagttgtttactttgagccggaagtcggggagttgttgaggaaccacggcgttgaggcgaattgcattggtgaggtgcgaggagctacttttgagcacgtgacgttcgtcacttctgaaaacagcccactagttgataaggccgccgccttccagtgcttaacgaggcacaccaagagcttgctcatactgtgcccag

SEQ ID NO: 2905 - DNA, 697 bp, unidentified
  source 1..697: mol_type = unassigned DNA; note = unclassified RNA viruses ShiM-2016 sequence
cgtatatgagctgatcactcatatacgcacttacgtttctaggggatgctatttagcattcctaggatggtatccagaccaatccgagttctataacacatttggacctaactaaaaggcctaaatggtactagggagacatggaattatgtgtgaacgcacaaagacagagctacacgggctgcgtcttttggcgtatgcagcgagtttataacgtgtctttgatgcaatctggattagggaggggacatttatgtcaccctccagtcaacgatcacaaagagttattttgcttccgaactctataaataaaggaatataccagacccgaggctaccgcctcacctttattgtctattggcaatatttaccctactgttggtgaataaccaaccttattgtatttttatatacagtatgacacccactcaatcattataatcgaattgatgaaaaattggacaagcatgctgtgatgatgttttatgaaatattagtaaatgttttagcttttctactttaggaattgaagacgataagactaggcgcacttctctagaatctagatgggcaaaccccaaaactagactgatgtgattgcgttggttgccgagtccgcggagaatatccgttgctcctttagcgaaatctattatgttgaaattatgaattgattcattattggtacgaaatctca

SEQ ID NO: 2906 - DNA, 698 bp, unidentified
  source 1..698: mol_type = unassigned DNA; note = unclassified RNA viruses ShiM-2016 sequence
tggggagaccccccagtcaacattggtagtttctatcaatgccttcgccaggatttcttaactatgataaggtttaatcaccggttcatgcattatatgatagtgcaaaatttttgagtaagatcaacatcggtctcatagatttttctctatcagttaatgttacagttacgtgaattgaagattgcgggtggcgcccgcttttgggagcatctatgctcccgcccctttttgagttttagtgttcacttttgtggacgtcactcaattatgtctctctatctagagatagctctagatataatcatttgtcagagagaggaagaacaaatgctaagtgtatagttacctgtagctccgccaagcctacctggataccttagaaatcgcggttttaaccgcattattggtctggcaaaccttctttgtttgttaaccggaggcaccaaggttaatgaacgttaaagtttttacgtgtcgcaaaccccctttatcgaagcgtaggcttcaacctttttgatgatactcctgatgagagtggattgtttgatgttgaagaaacagaatttgatcgttgcgatgatgatcgcattgatgttgccgaattgcaggcattttttgatgaggaggatatcggtcgaagagccgatgagaaaactgttgaagagacagttgaggtgaagcggcgtaaaggcaag

SEQ ID NO: 2907 - DNA, 699 bp, unidentified
  source 1..699: mol_type = unassigned DNA; note = Human parainfluenza virus 4b strain HPIV4b/Seattle/USA/SC0496/ 2019,4 sequence
ttgcaaccaagaggcacattttgcaaatcttacctagatgcatctagacaaatcgcccacaaagaaaaacaaattcccaattcaccaaaagaaatccaaaatcaacggagctacagctatcctgaaacaacactgcgaccacaatgacattcctcaagaaataaaggacaaatccaggaacagaaaaaaacagcccagaacaaactaacagacagagaaagggagaggcaaacccgtctcagcaaaatctcccatcaacatcactcgaccaagaccgaaccaacagcacaaacgcagaaacccactaccgcaaaactacagaaattctcccacaatcccccaccaacattcaccaacaaaccagaaaatcattcaaccaggcaacctccacatttcaagtttaagaaaaaaactattataggggggaacgcacttctcagctctaaccacacgaggccttgtcttgtaaaacaagatcaatctcacacagttcaaaacaaaatctgactacaagtagaacctccacaattcaaagttagaccaacgatctaacaacaactcatcaactagcaactatcattgaactaaacaatccagaaggacattacatcaactcattcgtgaatctccaaaagaaataacccaagtaaatttacaatctactctttaattataaataaactgaagtaggtcacaagg

SEQ ID NO: 2908 - DNA, 702 bp, unidentified
  source 1..702: mol_type = unassigned DNA; note = unclassified Orthorubulavirus sequence
caaccaaggttcatactttatgaaattcatctagatgctccaggaaaagccatccacagtgatgcaccgaccctcatctcattgaaagaaactcaaaatcaacaggatcacaaccatcccacgacaacaccacgcccacaacaacgccctccaaaaaatgaaagacaaagccaagaaaagggaaaaatggaaaagaacacaacaacagacagagaaaaagaagaagaagggcaacattgccctggcaacatcactcacaaacatctcccaaccaagaccgaaccgactgcacaggcacagaaactcaacatcacaaaaccagaaatggccctccacaatcctcccccaacaatcaccaacaaaacaaaacgacacccaatcaaacaatctccacatttcaattttaagaaaaaaactattataggggggaacacacttctcagccctaactgtacaaggccttgccctgtgcaactgagacacccccacgagcaccggaacaagacccgacaacaagtgcagcctccacgaccaaaaaccgaatcaaagatccagaaacagcccatcgcccagccatcatcatagaatctaacaatccagaaagacgctacatcaacccagccacgaatctccaaagggaacatctcagacaaaaacacagcccactctccaattacgaataaactaaaataaatcataaga

SEQ ID NO: 2909 - DNA, 702 bp, unidentified
  source 1..702: mol_type = unassigned DNA; note = unclassified Dicistroviridae sequence
gtcatctgggctacaactgacgcttttgagtgattaacccgcctttatatattattgccgattaaatactcatgattcttgtgtgtgtttattttggacaaggaaactagttctgaaaagactttgaagagcgcgataacgtcgaacttttagtttgtataaccaggagctctgggaactgtcgttgacaggaaattgagaccgttgtgtatgctttgtgatcttcaccgtctcacccacctacctggacgattgtcgtccttggatttgagcctttagaaaaggaagtccttgaattatagaggtacattagtgcgttgtctgccaaaacaggtacgtacggattacactataaggacgtctagagttgttcattttgcccccttaaccggattcggcgaacactctattttatatacccacccatttatagttaaagctttataacttaaaagtaagccgactggaaatcgttaatccaattttattttattttattttatttaatttatttcaatatagattattttagatatataagaccagtatttagctgccttaagcaactattatacttattttttgttattcttaaatttttaggagctaaggtagcgttattagctattgcacttttatttattttaggaatattgtccccgaggaattatttgttaataacactttgtttgtcattatata

SEQ ID NO: 2910 - DNA, 708 bp, Hepatovirus D
  source 1..708: mol_type = genomic DNA
ttcaaaagagggtggggagttttctccccacccccttttggatacccatggtgcgggggtataaattaccgcaccccctttgctgtgcccagggtatgggcacctttctgtctgttttgtttcgtttgtctgctttatgtgtgctcgtcccctatagggcactcatttcagctttctttcattctttcttttccccggttctcaccttaccggaggcactggccgttgcgcccggcggggtcaacctagtgattagcactaggctgtaggtgtctaaagtggtgacacaaagaggtgtttcctgattccagcactgttaactgatacagatgaaacctgattgatcttctagaaggggtaggctacgggtgaaaccccttatcttaatactactatgtagagatagatccagtaggttaagggcagtggataaggttgagttcaaatggacaataaatcttcaacactggtggacccaatctcactggctagttgccttcagtgtggattctgtggaggggtgtttcttctggatagggaaccatcacactggtgcctgagactcagggtgtctggccttaaatcacagaagccgtatggtttttgtggcctagcttctgcctctaaacagactctggggcccaatgacaccctgagcccttcggggtactcaggggcatttaggttttccacatttcaaaatagtca

SEQ ID NO: 2911 - DNA, 710 bp, unidentified
  source 1..710: mol_type = unassigned DNA; note = unclassified RNA viruses ShiM-2016 sequence
actgcatctattttgccacgctccacattggcccgtgtatatggctatgtgctctggattcgtgactaattcgcgaacggtttcccgacgccgcctgtcgagcgctttgacgttatcgtagagggtttttaaaagtcgatgagtggtacctactaagtgacacaattgatatccgtttctgttcgcagtactaatttagagtagtttcgatttattttcagcattgtgtccttttcctttagtttagtctccatgtcatcgccgttagtacacggggtgccgtttgcggaggcaagactaaccacttttcaggtcaatgagctatgattgactgaggatagcaagtacggaccacgttatgaatttaacgtgatttacccgaaggttcgctccaacggggttttaggcttgtgaataggctgccaagccgttctttggaacgttgtttacgatttgattttgaagcttgggaatggcgccttttgaaggccaaccactgcttgtttcttcttatggtctgatggggcgtttttatcaccccttgtctagaagcctatttggctttgcacgacttcgattacatgcaacttcataccatgcggcttttgcctcaaacccacttgggggggaacgccccgagcatcatggtggctctgatgtcataaccactatacaaaacaacaactatcatacaacacaacttaaccaat

SEQ ID NO: 2912 - DNA, 715 bp, unidentified
  source 1..715: mol_type = unassigned DNA; note = unclassified Picornavirales sequence
taaatcgtgagattgagaataaaggtaagcgagatgtagccgatcaaaatataaaaggtaattggttaatacaagatactaaaaatcgcggtctattagaattacaaaaattaatcggcagtcaaaaagaaaacataacgactaaagaaataaatggccaattagaattgttgagagagaaactgggcaatcaagataagtggaccgaagctggacgtgatgcattcactaaagctggcctcccggaatttactttctgggaccggggatctagaggaccactcgatatcggatcaacgcgatcatacatcggaggcaacaattttgtcaattcctatggaggacctgacaccaaactgcctaaaaccggtgagtcgccgttcgcagatatgaatggactatcccgcccgtactaatcttgttgctcataacatcgatcaacaatctaagctgtcttaagtggtttgtcgggtgtcgcaggctactgttccactcggggtcatggtgccgcgcttaagcgtttcactgtaaaaccatttcattcagcatcaaaaagaaaaatacctaggtgagcttaactcaccgtcatttaagctaaagttacaaaatttaaattaacttacgttctgttttcttaacctcaactttcaaaattaaagtaaagaattctagtaaagtaaatttcaaaatttgtcatccaaaaaaatcatggatc

SEQ ID NO: 2913 - DNA, 727 bp, unidentified
  source 1..727: mol_type = unassigned DNA; note = unclassified RNA viruses ShiM-2016 sequence
ccatggacgcccctttgtaattcgtcgttgcatgtatttagtatgccgttatacgtattcccccgtgagaaacggtcgttgcgtgtattcctcatgctattatatgtattccccgttgaaggaatcctgaacccttattttacccatttacaaaattttctaaattttatatatttaattaggatcataccttttacatcgatttgccatacacaaggtgtaattgctatgataaccggaatgataccttccggacagtggaatctgttactttcccatctttaatcttcagatgtaaaatatagctagactgataccgtctagacagtggaatctgtatctttcccatccttaaactttggatgtaaactaaagccgccctgatatggcgtacctcgtggtgattcgctcccataaggataaaactatcaaggttctattttggacattttaacctaaagaaaaatgttctattggccagatcaatctcacttactcaacatttgtgagaggctatttgcctgtgcgttgtccagacccagatgttaatactgcatgacccactacactgtggaataagcaaaggaaatactttggtataaatacctccttattcttgaacgcaaccaggatttcgttccctggcagtgatatgctcatgtaagatctcatcaactgtcgcaaaggacttaaagttattatctctacgctgtggcttaatacaact

SEQ ID NO: 2914 - DNA, 730 bp, unidentified
  source 1..730: mol_type = unassigned DNA; note = unclassified Rhabdoviridae sequence
ggccctaagaacattgaccctgaaaacaatagacctactcatccatccatatccttctgaccggttttagccaaaaggagcctttaagaacaaatcatccaatccaagcaaaacctcactctagaccaaaaaacccaattcttctcctcaaccacctatgccattgtagtaatcttcccttctttccgcaatagagaccagcaataatctgataatgcttttctctctgatttccttaatatcacgaaaaacctctatgtaacggagaaaattacaaacttctaacagcaataattttttagatctcatttttcaaaaatttgtgtcaaatacaaacattcgataggtctcttactcaaaataaaataacaatgtctattaaagaaattgattaataaacactaattattaaaaaagaatgtttagaaccgatagtggtaaaaaaccattgctcacgaaagtatagaaaatttgagagagctgaaaaactgcattaacttttcgggtctattcaatacaacagtccaaaccaacctcagataaagcaagccttaacaatcaacaactgcgtcatagtgattcgaaaccgtagatccagcaatacagctcggcccggtaggaatttaaatccgagttactctaaaaatctagtcaacgacacatcaaggaaccatttgtccaaaatcagagtccccgaacgcataccacattccattaccaaaacgcaacg

SEQ ID NO: 2915 - DNA, 730 bp, unidentified
  source 1..730: mol_type = unassigned DNA; note = unclassified Negevirus sequence
ataaaactatactaacgtattggcttatcaggtttgtatccaggtacagatcatagtcggtttccatccaggtgggaactgtataccggcggctcgtaaggcgagttgctgtaaactggtacgtagccagactacgtactgtaataactggagtcccgaattacgcgactctgtaaaccccggtgttccgctagacggatcactgtataattgctgctcatctaggtgaggagtgtaaactgaataacgttaagcgctattctcaaacaccacgacgttctttcgggagcgtcgtttaactgctgactttctagaaagtcagtgtaaaaattccgcaagttcgcttgtggatctaaaataggagaaactttcgaggtttctcccgtctgtcttgtgctcagcttgcttttgacggacagtgttgcacacgcgttgttacagaagaccgaattttgctcttctacgcctcgcctacgcttcacatctctgtctctcgcagccgcactgtcttcgtgctttgcgacttgatagaacaactgcacttccatcatttggaactgctgaggaccggacttgctcctcacgcacccaactcgttgttggtgcatcgttcttctttcgggaagcactgtctcactgtctccggatttcactttccggggtctgtctagcgctctactgagcccttctctcttcgtctcttggccaaggacgattatacactttcatc

SEQ ID NO: 2916 - DNA, 736 bp, unidentified
  source 1..736: mol_type = unassigned DNA; note = unclassified RNA viruses ShiM-2016 sequence
ctgggcagtattgcccagcaatctcttaaggagtttctcctttaacaatatcgcaacaattttatgcaagtttggtgatgtctaaaaatcacccgatcctttctatcttgttctttacgacttttctataatattattttattaatcatattataggcgagtaatataatatggatttcacgaaaaatattatagttctgattatggtcattttagttaggatgtgccttatcttgttgtcaggcttggtctagccttgatagaccattttaaggtttagtctaacctctaaatggactactcaattgttttagagttttgttggtgttgctagccataaatagcacactcggattgttatccagcgtcattgagtggattaacttaagcaattctctctatataattttattaatttaattatacttactgtaaatgtctagacgtgtacttgatgttttgccttttcggaaagcgagtataatgtaatcttttgaaattaggtaaacctgtaatccagagagactgatcagtagatatttcgaatgtaacctttatggtgattagtagaaagacctttcattatgagggtcctgattaggtaaattattaagttcacggtacaactccatctgttttactattaaacatccagattgtaatcctgtttttactttaataattttattttcatctgacttaagtaaattaagacgttttaaattacttttattca

SEQ ID NO: 2917 - DNA, 745 bp, unidentified
  source 1..745: mol_type = unassigned DNA; note = unclassified Tombusviridae sequence
ggtttctagaaccgcttgaagaaatttcggccggctagcatggtatcctcccctcgaggataattctgcgaaccggtcagaaaggtggacctaccgcatatgcacaaacatgtgcgggggggctggtaatatccaccacaattctagatgaggccgtgtcccgcggtgcaagtaggcttggctccggcttcagcggcttgcaagggcgtatacgggtccgctcgtgtacgctaaatgggatcgcattggcatgtgcaaggtacatgccaccgcttatagggacagattgctgagtcccagttcacggaattgaacttcttccccgagaccggttgcaagtctcaaagggtcaaggttacgtgcgccttgtgtcccctcctaatcgcactactgcaaccctcatacggttgtgggagctcgaactggcacccacggtggtggaccggcattaagttggttcgagcaagtccggtcccagacgtgtgtggtatccacacgggtgtagcaaacacctaaacagtgccgcggaccgtgaaaccgaggacaacacgggttggcaacaccagccgccctggcagagggtagaaactctgctgtcacgcatctgacgatcacttcagtgatgccggtaagctaaggccgtaagccagccgttactccaagcccacaattcgcgtttgtgggtcataacgtgaggaggtcgcggaggcggttataactcaaccacccccccaacacaacaatc

SEQ ID NO: 2918 - DNA, 746 bp, Rajidapivirus A
  source 1..746: mol_type = genomic DNA
tccgttataggattatttggacctctatattgattgacgagaggttaaacaatgtgcgtttgcttcatgatttattatgttgtgatcgttggtcttcttaacacattgatgtcaatcacccttttactttactttgtaactaagtttcatacatttctttgaaattctcatttacaatattgtcgagctgattcacatgtttcatttacttttactacaaatctaaatgttccacaatcatattttgtttattcataatcaaggttgtaagtattatgcagggcaacccacgcagtcaattggtcactcatgaagtggctgtggattaacgcctgaatgtatttgcttattaatatcttgttttacgaatagataaattatgtggtctttttaaactacccttgttgttaattgggtcgaatcatcgcacacataatgctattttagacaaacgttgttcgcgagtatgcacggtattggaccattattgcttgtcattagcaccattggtaacaatgatgacaatccccggttttcacttaagacagctccgcgcttcgtgctgtgtttgagccttgagtgttgacgtctgggatgggtggttgtgctccactttatctagactgtgtatataagttagcaagctgttgctttcttagcattatgtggtgggcccgaccacaaagggcggtgggatgtgccaccgtaaataatcatatcaaaaccctttattttaatatgtagac

SEQ ID NO: 2919 - DNA, 748 bp, unidentified
  source 1..748: mol_type = unassigned DNA; note = unclassified RNA viruses ShiM-2016 sequence
catggtagtacccatgcagcgaatctacgtaaagtgtaattaactgacacacagtgcccatcttttgcacactgtctcttagtttttacatgtagttttaatcaaagtacaatttctattagtttcttctactatccttttagttttagatcaaaaccctaaaaactattataattttaaaatccaaaaatattctagttttaagtgttgagctctaattgtgatacttaaatggaaattgattgcgttggtgatgattttgatgacggatgtacctctattaggatcaagtatggcgacatactccttttggcacgggaaccctgagaatgactctagacaatattaatagaagtttttgttgatctcttatctcacctctagcgaggttaaagttagtaacacggttttatgatgtgaagctcttctttctcttttctcatctacgagattcttttattttacttcacattatttatcgtagttacggcaatacgttacttctccgggtgttatggcgtccggtaagttaggtatatgtccacgtagtaatgcgtggagtccgccttgtattctgactgtggtgagtataaggtgcctaatgtggagactaaagcttattgcaactccaatccacggagcactttacttaacgtatcgtctgttgctacataacttgatacttcacgtgtagtaataaatttcttgaaagtatcgccccttttctttcttatatggtgacaattat

SEQ ID NO: 2920 - DNA, 752 bp, unidentified
  source 1..752: mol_type = unassigned DNA; note = unclassified Hypovirus sequence
gctggctagaattttaaaagaaaacttgcgtaggtatgaccgcccaccatcgcgttagcaacgtaagcggcacgctccttccttggaaaagaaggattctaagcgtccagagctggcacctaaggaggtgggcagtcggaattcggtgtgtcccggaactgacccttgggcaaggcgtgagcttcactggacctgtagacgccccggtgtctccatctctagacgaattttcctgacttaaagtcaactgtatgctacccgagatgttggaaggggaagctagaaccggggactcccggcatgttgtatacgctgaaaccgtaacgggttggggccgtccgcgcctttagctgttaacacaacatgttgggtttgccaaccgtaatgggaaggcagcctagcgggcctttaggggcgatgctttggtcctcccgggtgatgaactgtcttctgattggctgcgaaagctgtaccacagatgttcaggggattcatcgggggttaaataccggattcttccttctctcgtttcgggctgaaaccccgcagggaatgctttatggactttcaagaaaagtaccaccgtgatggaccggagatccaggttaccagatgtggcagagcttcctaaaagcggcgcccacgcccagagtacaacgactattacacgtataactcgacggtgctctcagtaaagacgggacactaggcattgaattcaagatttccgacttcccaattctcccttcgcc

SEQ ID NO: 2921 - DNA, 761 bp, unidentified
  source 1..761: mol_type = unassigned DNA; note = unclassified RNA viruses ShiM-2016 sequence
cttctcacgctaaacgtatgattcttttgactttggaaacccatcctggtacccgcagtgctatgctgttcagtcattacatgccaaccatgcactgctgcactttgatgcagatgcccatggttgagatgcaattgatcaaagcagatgcccactgatgatattcagtcgtgtttccatcgtactcacgagttatcctggtgcccacaacattatgttattcagtcctcttgtgccaactatgctatgttgcacggagatgcaaatgcccatagttgagacattaggatcaaaataaatgcgtgttggtgacattcagtcaacaatctcacattctcaaaaatttcacaaatcacaaataattgctggtatcaataaatttgacactggtgcgttataatctaagtatgacttctggattccgaatgaaggcctaaaacctgatgtgcttgaaggaagtctagacataaaccggcgtagattcggcttgtgttggctgcacgagtaacgattacaaaggtgtaaggtcaaatacttattttatagtgtcatcttttgacaatttattggtaatttgcggtagtgagctaagtatggtccagcaaagccatcttagtttgaaacagatctaccatatattaaactaattcctatggaatcttgtatggatattggcgaaaacccgatacacgtagtagacggctagtagtcaagtaaatcaactccggtcgatagttatccattgatttgggtagcggtcc

SEQ ID NO: 2922 - DNA, 761 bp, unidentified
  source 1..761: mol_type = unassigned DNA; note = unclassified Riboviria sequence
agcatacatgctatacccaaattttaacatcttttcttatttattctagaacaacccgtgagacggctaacccccgttgatcggcatccctagaatttagtacataggggatgaccccctatggaaccccaagggaaccctacccttacccaacgcacctggtcctcatgcgtttaatgatgttggcaccgcaaccttgcggccttgctggtatcaatggacccctaccacctaacccactcacttgacacatgtggttcgcccacgaaaccccctttgtgtggctagcgccatctgagaggagtgcggaactcccccacggtaacgtggcccgcactggcctaaagcctagtgtgcaaggacacatgctggtcggttgtacccacggcctgcctaccatgtgtcctgaagctcaccgctcagacctcgatcccggagacacactggggctagtactgtgcgcgccgcctggaccaccaagtccttgggcagtgcgtaggactgccagccttagtagacccccagcaggtacccccttggatctgagctgggccctgtgactataccgttccggtaatgcagggttagaaaaatgaacgggttggcaccacttctcttctctttttcacctttttaatgcagacatcaatggttgtattggtttttgcaatcttcaccttggctgtgatattcattgctatctgcaatctcttgtgcattatcctctggtgtgggttttgtgctgaacctccgctttcact

SEQ ID NO: 2923 - DNA, 764 bp, unidentified
  source 1..764: mol_type = unassigned DNA; note = unclassified dsRNA viruses sequence
tttggaatgctgcgctagctgcgactgcccgtgagcattccatcatcattttctctcgggtacttcagctctttgaagaacctgttaaggcagccgttacagacacgttggcccgtaggagctttaaattgaggggccgaatcttttatgcattctctgaaatttgtgcagagtgggacctggctactgctcctaatttagccacgcatgagaatgagaaagtggtgaaagccattttaacctatatctttattcaccccactcctatccaggtatatgaatatataccacgcttggccgtgaatcactcaggactgtcatctaattttaaacttagttatacgagaaaagccattgaacaggtaaattctcacacacacacacaggtgggcaaatattcttattataccaacgattcgggcgtattgtccagctgcgcgactcgagtttttaccttactcggtattcaatgggagcactcgatctatgatgctgttgatcctgctaagtttggggtgatagctgatacttttaacaaatatattcgtagcagctggcatccaaagttgcaaatcctaacatattcatattgctacgatggggaagtaccaccgtttgaagggtgggagcaaggtgacaaagaacttttattatttgtgtataatgatcatgtagcctatgctttgcggcaggacatatgcgccaaattacaaaagttggatagtgatctacgcacatacaagtctagacttgctattaaagag

SEQ ID NO: 2924 - DNA, 767 bp, unidentified
  source 1..767: mol_type = unassigned DNA; note = unclassified RNA viruses ShiM-2016 sequence
cctgcagctcttatcgatgttgattacttggtgtattcacccaatgtattttgaatattcagaatctagcggtgtacgtcaccgctttattttggtataatattcaagatcattgttatagtagttttcgttgatttgaacttattttacctccttatatttctgattgaggagatctttagtcaagatttatcaaaacgaaaccttatttgtcttgtgcattcaggtacaccccctgatgcgtattcatttttgtatattattgaacatattttatattttatatattgcgtatccgacgatcttcggtttacatatatagtaaaatcacaacgacggtatctactgagactgtctttgtatgacagtgtctctttaggagtccgtgtctagaatttgttctaggaaattcctcgttaatttgttacgaggtcttctgtttttagatgatttttaatttggatggatcacctcttcctatcttgtgatggttcactgtcctgaattcttacaataactctatgagtactattggttttcattatggatataactacagaacttgagaagtcgaggtttgtcacgcagaccaactgtaagtcgtgtgtgaaatctgatgatttttgattcttttaatggaaaagtgaagcgttacagtgttgttatgatacttggaccctgagaagtccacatacagctgaacgtgtataatgctcgttacggagcatggagagatccagtgaagtaactattcggttggctccggt

SEQ ID NO: 2925 - DNA, 768 bp, unidentified
  source 1..768: mol_type = unassigned DNA; note = unclassified Picornavirales sequence
cggagtgatcttttaataatatagctaggtatgcttatactaccgaacagtaaggtactactttacaggcttttaatagtgcgtattaacacgtcgctactatttcataataatatgtgttacacaggtttagtgtagataaactttttatagtgcgttctagattatcgctactatatcatatgaaaatctatttagttgattggacgtaatttattttaacaatcctatttttagttttagttttaactatatatttattttattttattctacaactcgtttgtagatgtcgacaataattcattaatggctgcgtttcctttcagtttaagcatgtaataaagtagtgacagtgatttacatgatactttgggttatgttcccctcttttcggattaagtcaaaacacgttttgcgactctgccgtgtaagcagaagcccactgattttctaaattttcttttgattaatcacatacaaattttatacaaacatgtcgactcgtgtatatcacctgtctgttaacctctatgatcttgcctatatttctagcgtctatgaccacttaattgtgagcgatataggtatttttgattatgttagccttatttgtataatagctgttgagtttaaactttagtggagtatcccctaacgttctgaggattctttaaagtgaaggccgttcgcttttatgcgcgctatatgtggtagtaccaacttagtgttaaataacggaggtccacatgggagaacgaacaatca

SEQ ID NO: 2926 - DNA, 770 bp, unidentified
  source 1..770: mol_type = unassigned DNA; note = Trichosanthes kirilowii marnavirus strain pt111-mar-9, complete1 sequence
agacaataacacatgcgtgcggaactaccgcacgcatgtattattggcgaccttggaaggtcggccaaatttggagtctgtgactccctctttgtttaaatgttagaattgaacctgatttgtttaccccgagacctcacttgttcaagtttacatttgggcattcttgggattacacttcggcagcctttctagacatcactttacactgaggcaatagctagctccatcttttctaaatccgatgatggtaaaccatcacccatttatatgtatagtagcgtgtgcccttaagcaaggcaagtcaaagtttactggttatctttaaaacctttattaggactatttcgtcgttgacgcttgcagtaaatcgagtacgcttcggcggtaaatccgtacatctgtcaagatagttcctgttgtaggagacaaaagctacaaacaaactctagaaaaatcttcaaacacaataagctcctataacgaaagcttaggtcaaatattaagcctttccccaaccctactagcaatccacgcaaacacctctccgctcctattggacgacgtgaaaagttaagtggtggtaaggtacagctgcagttgcagccgaggcctgcctggcaaggtaataaggattggcccaattgtggcctatgtccggtactccggtagacttcctggtttgttgaattaaaaccaggtgcggcaatctaggggccaaagaaaacaacctatttcagaaacagagacaaccacaaacgacaacgcaa

SEQ ID NO: 2927 - DNA, 781 bp, unidentified
  source 1..781: mol_type = unassigned DNA; note = unclassified Ampelovirus sequence
gcgagtgtcatttttaaatatttttatttggtttaagccgatgtgtagctatttttagagccaatactttattcgtttctttgcgtaattgcctgatttgttacaatgcgcaattttgtttagcgtattgtcattttttgattctttattgcttgtaccgtcatgtgaatattagttgagcttggttttcgggttttaggttgtttctaattaatgttcgttttgttttgtacagcttcatacagaccctccgattatatcgcttgcaaggcggttagtgcggggacacggggggggtcttagtggtgatgttggcctgacacagtaggtctcctcacagcatcacacttttggttgggagaggagtttgcgagtgaggcgcatctcctttgtatatatacgcgttatattgttgttttaattatagcgttggtattactattataacatattctcagggttttttagtttatgttagtttataattaggttttcttacagttaatataattctattttttcacgattaggtattggctctatcttgcgtagagtggtagtattgtatattatcgattgtagattgtcagtaacacgagatgatatgagtgtatacattaacagatgttagacgctttcacagccataactatcatagcctctttaatcttagcttttctttttctgttgatactatttatagtggtactagtgtataattattattctagaatgcacagttcgatgcgatcgtatggagcggcgtaagtagtcacgacgt

SEQ ID NO: 2928 - DNA, 787 bp, unidentified
  source 1..787: mol_type = unassigned DNA; note = unclassified Aquaparamyxovirus sequence
accgacctaggatagtccctccactggagacctcaacacacataatccgtcaagcatcacaccgaggaggtctccaggaacacccagactatatgaacagctgatccacatgtctcgttctctgctctgtcacattttcttataaataaaatatatctactgtagttctatacttgaattatttagcaacaactatctcatcagaggcttattcttagcgggtctagatatttgtgtgtttattggaaattgggtcagggttttagtagaacactcgcgaaaagcctctgagagcctatctctaaaagaacgtggaacaaagccagcaatctccagaaggcacacgtgcaatgtccattccaagcttgtaattgctcaggaatcgtaaagcatacatgaatcagtccatgagtgtcaggacatcaggtgatctctgtgttgatatatctgtcggttgtacttaaattggtgaccttcaacgaacacttaaagacccggatatttagtgactttgcacattcactaacgggtaactcaagccagtatataaaggtcttactggaaaatagttgtatgataactcgcacttatcatgtattgtctaaagccgttatagattacgaaattatttcggatatgtttgttagttttttgtctttatagattgagatatcgttgcatctcgtttatgtcacttgtcaatggattaaagaaaacttaggatcaaagcaattgatatctactctagttgataccgactactttgatctttttcccatattagcaa

SEQ ID NO: 2929 - DNA, 804 bp, unidentified
  source 1..804: mol_type = unassigned DNA; note = unclassified RNA viruses ShiM-2016 sequence
gcgtagaattcctctacggaattctacgcatgtgatacgattttatcggtcatccctgcaaagggtttatttctagtcatgatataattcatgatattgcgccgctttgtgtgttgaaccaaattggcgctcccaatttgcttctatttcacatgaaccgccgtaggtatctatgagttatattatgcaaaattcggccaggcccgatccacctggccgtcttatatacggatcaccccctatttgttatttgttcactgtatgtgttataaaactaaacaatagtggtgttggattatatccattattttaaatcataaaaatgtgtgttgtatatcatcattatatattcgatttggcacatctttttaccatttctttgattgattatttgttagttgagtaatttccaagggccccctcttcggaaagacgcttaatgagcatacgaattctacaattgagaatcgtttgaagttgtttgattaactgatcgactagctcttgcttttccctctaggacctgacgacctcctattgggaactgtaagatactcgcaatactttttcatgggtatgtgtgagtttttgatgatcctgtattttgtggctctatctagagtcaaccccctgaccccagttatgtgagtcaacttaaaatgacaaactccataacatttcttatgtaagcctaagttggcaattagtgaaataatctttttcgcttggtagaatttcacacacgacaagtttgtctactaaagcaaacaatactgatcagcttgcagatcataatcccgatca

SEQ ID NO: 2930 - DNA, 805 bp, unidentified
  source 1..805: mol_type = unassigned DNA; note = unclassified Totiviridae sequence
tctcggcagctcggtttataccgcccgccggggcccctcgtaagaggggtgacagggacacgatatgtgtagcgggactcgttcgcgggtctcagaggatcggtgatctgatttcccctttccttctcgaggtttcaagacgcacaatacctcgatgcgatacgtcataaccttggcggttgttcctttctgacagccggggcataatttgacgtgttaaggccgcaagcgttgttccgggcttttggctgtatctttggatcggtactgatacaggtgatgagctcgttaaccagataggaggtgggttcacgtgaatgcgtgtgtccacgcctaggctggcaagtggcaatttatttacagtgatctagtcgtctaagtggtgataatcctccctaacccacacctcggagcgagctgaaattagacgagtagagcatatgtttaggatacaggcgacgggctacccgcccggcaaggaaatctcttcggagaggcccgccttgtagaggtatagttacgggcccgagcgattccgacgaagtcgcgcttggctgcctcccatgccttctcatcctcaggctataacggtaaagatcacccgttgttgttaagtgataccgataaaagagcgacggtacgcgtatctgaggaatcatagtcgaatgtaccccgcgtgaaactatgtcgttcgaggtccgaacatatgtaaagctcgttttctagaagttcgtgtctatggttaggttagtagttaggttagttggtcgcctcacccgttagttggggcaatctcccaaaaatc

SEQ ID NO: 2931 - DNA, 827 bp, unidentified
  source 1..827: mol_type = unassigned DNA; note = unclassified ssRNA positive-strand viruses sequence
aaaatgcgaggcatgggttaccttcccatgccccctccattttaaacaacattatttcaacattttgtgttttatcagactcagtttattgcgttactaattagttttgcgtttatctgcccccgtggtttagcactttatgtgtaaagactcttgattctaaccttgccgtatggtgccctaacgggttcatttaatcatgcgatgagggttgctataccgcatccattctaaggcgattcaatgcttcatttaggaattttgttgacgattaaaaggtacccccacaaaaacaaaaccaatcttacttgattttcgttttaactgaccactgcgatcccaaattttcgccttcttatcaaagtatgttgtgttctttgggtgtacaacctgagaacttgtctacaactacatattactcgaggaagaaattcggtttaagccgtgccttctcacgtttagtatatctatctagacacaccttcttcatcttctaatccccatctagtctcctgatcagagacgtcgttattaacaaataaccccccttgttaataagagacaaagtacaatcaagctaagttctcttggagttcctgtaggaacttagccattgtgatagagtcataagtctatgtgcatagacagctctagctcaccatttccttcccaacccatcttttcatcagcttaactctatgaatccgatgcaaaaaccattctaacatcttatggtgctttccaagccaaatgagagctcactcttttgagccgctatttaatggacaataaacgttttatagtgtacatcatattgtaaaaacaaa

SEQ ID NO: 2932 - DNA, 828 bp, unidentified
  source 1..828: mol_type = unassigned DNA; note = unclassified RNA viruses ShiM-2016 sequence
catatgcggagttctgattttagttgtcatatatagtttgggtaaaaacccggtagtagctattacgatggctattacatggtttttgcttaaccgactgtatatgggtactaatgacgagttcccataagtttacatttttatacatacgtcaatcccacgacacgggatagaattttcgaattcttgttaaaacggcttaattggctgtattgttcatctacagtggataaacgacccagcgaccctacaatttcggttcgtcttcgatatagactgataaaaatattttagtaattttaagacaaaattactgcaacgcacacatgtggttgcggcgcactgcgccatttgatatagaccattagcctcaggtctagaaaatgagggccatgtcaccggcaaggagatattctatggggtagcatagcccatagtcttaaacccgtgctttgattttagatcacaactacaggcaataaaggacatatacagttgcctgtacccacgacggcgtagaatagtgaaaatgcctaagtaactattcgtaggagcgtaatgaacttgaggttgatgtgataggtgtgattggttagaatcacattgtaagcacacgtacctcccgtccgaagccatgccaaattgagtatggtggaaaagtgggacaacaaggcgtcaacaacaaaaccaaagatttctctttggcttgttgttgactctttgttgtgtttgtggtctgcgaaatttagctgaataatagtaggttattaaagtagcagacctttacaaatacaacaagagtcaataacagccataaagtacagcgta

SEQ ID NO: 2933 - DNA, 833 bp, unidentified
  source 1..833: mol_type = unassigned DNA; note = unclassified RNA viruses ShiM-2016 sequence
agagaaccatggaacatcccgttccatggctctcccttgctgattgtagtgtgtcgttttaccgcgacacccggctacatcacatatattcatctaagcttaattgctccttttataaacagacacaagaactgataaacaggggcaacccccttgtttactgcgtcttaccctgtaacaggagaccgtacaggcaactatttgttggctgtacgaacctagcatttgaattatatgatatttagtcaccataccggattaaaaacccgttataagtgacaagcgcttgagtgtagatagttgtggctactatttactatacttttgcccttgcccaagagagtcaactctttttcaaatcaagccccttctggcacatttgtgtttaggatatgcggaacgtatcccgaatcactatgtgtcataaactattgctccgattaagatgtcaagtatattaatcgcataattaagcagtgtttggttttgttagcagaagaatcccccctactagagaatgatttcgttttaacgactgtgcctccgcagaggactcgcacagatctagatctaacaactcttttaggaagaattggtcttttggtacattttggatgctgatatacgcatcacaaactatactgtcgcaatataactctttataagtatgtttacttcctgacaacctgagggaagaggtttggacacctaaattttccataccgctgtactgagtttgaggttttgctatgattatttatttgatggactttttggactatagttttggttttgtttagcctgttgaggttagttctacgcctactaaaatt

SEQ ID NO: 2934 - DNA, 838 bp, Phyllomonavirus gysingense
  source 1..838: mol_type = genomic DNA
gataagaacgttatctttttccttctttgacaattttcttaagtttgaacaatcactattaaaaacttgaacaatgagaaaagacactcctctaagtttacctctctttaagatcttcattatcattatccactaaccaaccattagttggaaagtcacaaggtgatatccttgatgtgtcgtaggtgtgtattgttagcctcattcactccgcattatcacagaattgtattaatattagctaaattgttcttgggtcatcaattgtcctgtctgaactgtttaactctagtcgtccatatcctagaagttacaactcgatcctattattcatccttatctcaatatttctttgtggtgtccgcgtggagtcttatattggagcatttattgtcgaatccaatttccttacagcttctagacaatcttgatctctttcttcttgtatccgatttggctcaccatttgctagtcaaacatgcttgtgctgggattggtatcgctctacgtatacaataaaattacaaggatgaccatgtttgaagtttttgaaggatcagaagttgatgaattattacgtcttaaaatagagcaagggaagcttgaccatcatgatcagattatggaagaaccaagtgttactcttgaagattacctccgttccagactgttactaccattccgtgtggaaaatgatattgttactgtagtcaatgatagaaaactcagattattccatcacattcagacaaatccgatttctgaaattgaactaactgccttagaactcttgcaatttttctctactctttaatgagaaaagccatcattttaaagt

SEQ ID NO: 2935 - DNA, 838 bp, unidentified
  source 1..838: mol_type = unassigned DNA; note = unclassified RNA viruses ShiM-2016 sequence
ctgggggccaaccccaggaggatctcacctttagaagtgcgcgaagcgctgtaacggcgttagtgaaccttgaggataatttctatttgtcaaacctaatcattggagtgtgacggagccttaggccactagtccctctttggagcggcgacctggtcttgaagtcctcacctttgactcaatacagtgccttaggccactagtctcctacgtgttgcgactcactgtgacggtgttagtgactgtagacggcaacctggtcttgaagtctggagaagttaatccaacatagttcaacggaagaaggtgtgatgtgtcttttaaacccctattgtatattaacgtgttacaaagtaataatgtgatgtataaaaagctcttcaaaatggacacctggtccaccaaaaatatacgtgtaatctatctatgttttcttttcttgtttccgaaattccagttagtgctacaccttagacctaatctatcaagtcggagtcggaagtaacgtgtttagtacagatttctggaacgaccgaagtcgactaattctagtccggatttccgcctacacgaaagtggtggttggatacgggaaacaaagtaagcctttagcgaaagcgacgaaagtcggcctctgctctagaattgtcggagttactgagacgtgtagtattttctggtcataccctatgggactaagaggcaggtgtccccggtttcaaggctaccgaaaaagtccttttgataaaactccccaaagtgatgaaatattttaactcgaatgttttcttctcgcacatgatgtgactttgttaatattgaacgaataactgacaaa

SEQ ID NO: 2936 - DNA, 839 bp, unidentified
  source 1..839: mol_type = unassigned DNA; note = unclassified RNA viruses ShiM-2016 sequence
gggtgttttcacccacacacttttaattagggacttattagcaaacctctcatttcgctccttttcgctatatgccattacgagccatttcatgttaattgcttttattttcttgattgattgtgtaatcacatcttatttatacccattgactccctttctttgtcaatttctctttctcatacttcatttgtacatagttatgcttatatagaggtgttctactccgacctttctatgtacccttcttctagtttagtatttctagtcagaaaaataccttatataccgttccctgtatctcttgggaatttctacctgtatatttttccgttttaaggcttaggctttatatacagtgtatttctttcttcttcctaattgtatattttctccgttttatgtttcgtttgtctccgcacgagatgtttagctatgggattttccgaattaacgttgtgaagagcgtggtggtttttaccgaccatttcacgtttcatttcgacttggattttctctacggcgactattgtgttatatgtattttcctgtttgtatgaatgctatgtttttgtttgtattatgtttctctgtttgtaatttcaatttctagacaatcactttttgtttcattgtgtactttagcggttttctgcccgccatttgaatttagacgatataagttagtaagattttgtcacaaatgctttattcccgcgtgttatcgcttcttagccccgtgacttaaaaactgctttcttcagtctttgttcttatgtgaagctattgtatgtgtgttaactggataattttgctagcccagttttcatacatacgag

SEQ ID NO: 2937 - DNA, 850 bp, unidentified
  source 1..850: mol_type = unassigned DNA; note = unclassified Riboviria sequence
gaataaagcagttgatgccccctctcagtatgagggagggtgtgcccccccggtaaaacggggaagaggatctgccgtccagcagactctggaattaaacatcgatgagatgaagcccaaacttgaaggccccaacaacagcgtagtgttggtggttagcaaggatgtaggcggtcaaatcgattttctagagccgactggtttcgcgggtcttaagcagaagcttagtgattggtcatcacaacgagtggaagcaaaacatgatgatgggttagtaaccatcatctcaagtgcccttcacaatgcgccacgcgctttcgtgggattgtgggggttgaaggatgaagtgacaagtgatagtgtcattcaatcgatcgtggacggagaagtcatggtcacgcacttggaggagaaagatgaggaatctcctaacactactaagaaggtcaaatccgttgacctttgcggagacggcgtaattgtcgttagaaccaacacccacaagcgtacgaacaaacgcacagggttccgcattccagtgctagctggagacgtcgctgccaaccttaaaggtcggcacggattcctggaatacaatccagacaacgtaaagttgatccgtgctgatgctgcgcgaaaggttgaagcatggcgcaaggaaggagatgcggaatggttaaacttgagaggagttgaagccacccgaatcatcatgcatgcggctaacatgtactggcttttgtctcaagatgaggcagatgtccaggaaatgtacaacacaagccacatgcgtgcctcgcgcgccgcccggtccaagatggccggtgcggcccctagatgctagggccgc

SEQ ID NO: 2938 - DNA, 853 bp, unidentified
  source 1..853: mol_type = unassigned DNA; note = unclassified RNA viruses ShiM-2016 sequence
gtgtgcaatatgcgtaacaccgcatattgcacacattaaaagttatatcatacgtttaaattcgataaacctcaatttacatgtgttctttggtaaattgatgcacattttaaagtattatagaatcatagtttatatgatctgaaatatcaaaataatttgtaatcctcacagattcttttattatgatacatgtaagaacaaatatgtatgtacttctagatattttaatctacacaactttacacatttataggatggatatcctttaaatatccaaaacaaatatacacatataaacacgcacactcattcatgctaacttaacttgttagcaatcatagtcgttacacattatatgtataaatatttgatttatgcacatcagaattggtttttactaggttcgattcctagctgatgttttaaagttaaaatttttatactacatcacatctcatgctgtattttaaagttcacaattcacatattcatctttattttggattgtttaacaaaattccgatttttaccagatagttttacggaaattaaaattagcaatcataccgtccttgattgttatttaaaataaaactactgactgctcaagcttcgagcgtccataaggagatcatgaaaactgttgaagtaattcatataaatttaagtagaagatcccgactgtgtatggtggtaaagatcacccatcatatatggtaggaaaattacctactttatttgtacggacagaaaagacagcgcagggtgatgcctgatagtgattggaggccgatgattataagccttctcgaaagagagtaaattatggatataattggacaaaataccc

SEQ ID NO: 2939 - DNA, 856 bp, unidentified
  source 1..856: mol_type = unassigned DNA; note = unclassified RNA viruses ShiM-2016 sequence
tgtatgggtatttacccatatagagtctcctacttgttggcatttcgttgtctgtttgaccgcagactcggctttcttgtcaacctattcagtcttctgagaatgttgagcttcatgcgaattttcttagaagattcgcatgctagatttcgcagctcctagacgcgttgattaatacgtctagagacacattttgagtagtattcatacatcctaggtcaccacaaaatctttgtttttgatacgttagcatattaggatgttatgctgtattttaaaaacagagtgcgcacctggcgtttccaggtccactttcaccgcgtggtcacattaaccgcgggaaccaccttatttggtgtggcattatacgccctcgagagtattttgctttattgattaattcaattacaatatcaaatcgcattaagcgatccgagcactcaagtttaaaaaggaacccagagcgccttgagacattaatattttagaacctccttttggagtggcttagcacgctaaaccgtaacggttgtaggccccaacatcaagcatatatcattttctcttgataaattacacagtgggttaaattcccagctggaagaaatgatatttagaattttgtgaggcaagcctcccgagcacattacgttacgtcctaagtaaaagtattatgagaattagccttcgaacgtcgtacaaactataagctacgatatttgaaattgttttaaatctttaactgcaattattctttgtaaattcaaaatgaacatacttgattaaaattgttctgaagctgtacccagcagcactaccagcctgaaggtagtgtgttattataaggcaccttttc

SEQ ID NO: 2940 - DNA, 858 bp, unidentified
  source 1..858: mol_type = unassigned DNA; note = unclassified Picornavirales sequence
tggccactttagcagcactccttgctggtggttttggcagcgatatactcggctcgtatatcaaaggccaaattcagctcaacaatgcagagagtctcgagcagttcaaacaacagacgatgacaaatgctggaatcaatcccatgttggctgcgatgcaagctgctggcagcggcggatcagtgatgtccgaccagatgaccagtggcatgctctccaacatgtccagcgcagtgatgttgggaggtgtaacaacaaaaggaatcctcccgtggatgcaaggtggtcagcttggtacacctacatctgtgacagccaattatggagggatgcgtgtgacagcttcaggaagtccctcctctggcacctcttcatcgaaccccctaggggcttacagttcgatgcctcctcccagtcgaccaacttctgggaatacttatttcaacaacccatccaatacgacgaatgtcagtggcaattcagttgccttcgttccatcaagtgcaggaaccgcagctaatgaaagtgctgcacttgtcactggcaatccccaaccgtctatgacaaattctgagtttcagactgcgaacccatataacagcgctttgacgtcgtggggttctgaaatggatgttcgaaatcctggcggcctcgacacctctgctgtcggagccagtgatccatccacaaccgacgtcatgtccagtgatgacgcagtcgcggcttctggatcgggtttagtttctgccattggctaaactacgttttctagaaactgcgtttggcgacgtagttttctcaatacgatattgagcgtttcttagtgataccagaaaaaacaagaaaaacacaaaaaac

SEQ ID NO: 2941 - DNA, 860 bp, unidentified
  source 1..860: mol_type = unassigned DNA; note = unclassified RNA viruses ShiM-2016 sequence
tgagccccggggggtcatcccccccggactccgttcacttaagtgtgggcttgccgaagcagggactcttttcaccgtctgtaaaaagacaaattttagtttgtaaggaccttagttttaagaccgaggccgtaatctcactggataatcgtagtatatggatcaacttaggattgagatgaatataaaataaatgaagttggacagtgtctctatattaatatagctgtagccaacggacttgcttatatgattgccaattctttgccatagcagtattaaacctgcacagattattatcagtattatctagacttagtttgcggattcgacacccgtgtggcgacggctctaggtatacgtaaacgcccatagtcagtaatacggctattcctttaaggacatgcactgtatcaagaaaggaccagtgtcaagtgtgatatatatcccaacgaccaaacccccacgatacacaccccaatgtgcaaaattgtattactagctgcttatgctaattttcccaaataagctattttctacttatataaagtagatcgttgttagagaactaactaggatcttagtatgtagatgggatgatacgggaacgctgtatttcaaaggcatgtattttggtacatagtccgtattccttgaatctatttacgctaatttctgaaaagaggacctgtctctataaccagtagtacctacagtgccttacgggttaccactatgaggacagagggatttgacccgcagtgtggtaatattgggcgtagtcacgagagtcacttggcttcatatcgtgcttaattccgttaaacggtcgccctcttagatatttaaaaccatatacc

SEQ ID NO: 2942 - DNA, 865 bp, unidentified
  source 1..865: mol_type = unassigned DNA; note = unclassified Luteovirus sequence
acgtcattcccgactttatctcttgctgtgatgttgtccaggtggacactggtgaaaagctcccttctaagaaagataaagaagggaatgaattgccgcctgagcctaagcttaaaatgtttagaagggtgaagcctgagcatgttggtgatgccaggaaatacatctgtcaacatattcgcaataataatatgaggttgatagacggctctgatgtttctcatgcaaccatcaaccgatatgcgctcaagttttgcgaagacttggagcttgatatgaccagcactgaaatgctcatcaaatatgctatggtcatggtcccactccctcgaaaatctgatattgaggctgctaaaatcgtccaatctcctgctgccaggcaaataaggcatgagttgggcgtgcttaacgccgaggttttttagaggggctctgctccgactctggttttgaatccccgttttctattttggggttgccagagatcgtggtgcgaagtggggctatccctaggaagagtcgtagtactattaattatttgagtcagtttagtttaggtctagattaccaatgccctaatcccagtttgcacaacgcattggtggcggttgaacgtagagtgttcaccgttgggaaaggaaatgaggtagtgctaccttacaagaacataccaggaatcttctctaatcttgattatttccgcaaatctattgtggataaggttggttgccccaggacgttctcccctgaagaacttgcagcgacgtatcactctggtaagagaacgttgtataatgctgctgttcaaagtcttaaacgtaaggctgttgagaggagtgacgcgaatgtgacagctttccttaag

SEQ ID NO: 2943 - DNA, 870 bp, unidentified
  source 1..870: mol_type = unassigned DNA; note = unclassified RNA viruses ShiM-2016 sequence
atctcatagggtgaacccctatgcacattttgaaatagtttcaacttatgttggatttgtttgacttagtaatgaatttgtcaaatttaaaaggtcggaagcatgaaatttattggcgtatataattatataattgattggcgttttatagaattcgtagctatatcactgatttcaattatactttgtatacaggaactctcagtggttggttaactgagctgcggcgatactaaattgatgatattttgattactgattgttgtaaatatttccaatgtaaggctttatatttcaatgactcctggaaagacaggtatggtttgaaaaccaattttaggtttaagatacttagcgttgctggaagtgagtactattagtgaagtactggacttttagatgcttattgagatatattagaatatgtactagtacctctatctgatattttcaacacataagttctctctaagaaaggtatggatcttcctcatggaaaccaaggctaaactgttaaagtcagtctgtactgaggtacagaagatctagtcccgtttatggttagcatatacatatgatgccgctttgtaacccaaatgcgtgcgcgtgattactgtatatgtccggaagcggaaaacacactctagatgattctcgtctggtgaagtacgtacgtctgatcatcctatgagcatgagctatctggcaatagcgtaatggtgcctcctaagtgctactttgtgggagtgaatctcaatgtcccgtaaaacggatacagtgaaactacacatcgacaataggcattgcggtacggagtataccttgagatccgcgtcggagcggtcttcagtgtgactttcattttattcc

SEQ ID NO: 2944 - DNA, 877 bp, unidentified
  source 1..877: mol_type = unassigned DNA; note = unclassified Picornavirales sequence
tcctgcaaacgcggggggcaaccacccaactgctacaccctgcacaaacaacaactaaccagcaaaagagcaaattaatcaacgccaagcatgtatgacagtctcgaggacgcgtaggggtggaaacccctacgcgccctcgagactgtcatacatgcttggctttgattaatttgctcttttgcttgttagtttttgtttttgcatggtctagaatttgactacttccccccctcttttgcactacgtgccactgtttttcaactttggttagttttgcatcccctttctccgggaacttgtttcccaccccctttttgttgttttggcggctatgttgtggcttttcaaccgcagtagcagtagacagaagaagttgagaaaacgtaagatttattagtaggacctccgaaagtaaacccctgcgcactactctgtgatgtccggacgagctatgtaaggagattcatctaaattatcgatttggacgtttagtctgccgataagcatttgtttttcccaacgtttgtaggtattcacaccccagacttctgaccgactgaattacggatttttctttttgaacaatggaattgacttgacgaagcttggctgctctttgttgtccagtgtggcatttgtaggtgtacttaagtgtatgtttacatttgtgtgatatcaaattcacagcgcaaagacaaggtttttcaaagcgtgcagtttcctaaaaactgatcacaaggtagactgggcatgcctctattattaggccaccataagtccttttagtatgcgtgtcacgacgtaccgtccatcgcgagcgaattccggagacacctcgtggatgatgtatgcaacttccggcccaaggtgaaag

SEQ ID NO: 2945 - DNA, 883 bp, unidentified
  source 1..883: mol_type = unassigned DNA; note = unclassified Picornavirales sequence
gtttacgtttcttttacctgcacgttcgcgtgtagggttttcttgcaaccactatggttcgccatagttggatgcgatccccgtcctcgccaaccgacgttaaactgttggtatatgtaacctccaatcccccctaacctaagttttaccagtttctcggtatctgtaagaaccgagcgcacaccacaagtggcgacaagacttgtggaggtttgtacactaaagtacacgtctcttatagattttatctagagatctataaatagatgtaaaatattatctagacccccaccacccctgtgccatggtgcaactggcctatgagtcggattcccttttgatccgtcagcacccattctaaagactgttagcatggtcattagtctgtgaactctcgcgaaagcgttagtgttttctagcgatgcattgattgcgcgtggattccccatctggtgacagatgccccgcggcccaaaaggctagtgtgtcacaacacaccgtcaatgtgccagaaaccccatctggcaacactaattgttagtaccgattggtaaccactaatcgtccattctggctgaacattctttgggatgagcatagaagtgagtagaccccctagcgctaccttcgggcgtgactagggccagttgactataccgctccggtaataactggttaaaacaatgaaagcttactatgcgaactgccctacccaaggtagctgtacccacggctatcctgaacgtcggcagcctttcctttttattctttaaaatgttttatggtgacaatattgtgttatttagtttgttaattttgtttcttttgccttttaatttaactattgttaagcaaaacccccttgtctaattaaactgaaacc

SEQ ID NO: 2946 - DNA, 886 bp, unidentified
  source 1..886: mol_type = unassigned DNA; note = unclassified Tombusviridae sequence
tcgtcaacgggaagagtgctgccgaggttgaatcgggcattgcaaagcactgggaaatcttcggcttccaatgtgttgtcgaacccaccgtccataccctagaacatattgagttttgccagatgaagccggttttcgatggtaaatcctacgttatgacacgtaatccgcatatttgtctttccaaggatgcatatagtatcggtccatttaacacgacactcggggctaggaaatgggggaaagctgtcggtgaatgtggtttagcattgaccggtggtcttcccatcatgcagagtttttacggcatgttggtacgtaacgcgggtgatgttgggggaaaggtttcacgtgatgttgcatttgctagcggctttgcagcattggctaagatggggaaacgggtgaagagtgatgtcagtgaggaagctaggttttctttctacctcgcattcgacattagcccggatactcaattagccgtagaacgcatgtatgatgacatggttcttaacatggaattcgtcccccagggatcaccagccattgattcagacttaacatggattctcaaacacctcaaacagtaaaccgcggtaggtcaaaggaaagagctcagggtaaagatgatagcaagggatctttgaagaggcgtgttgccactgatgcgatcgcagccggggagggttctgctttgggcactatggtcatacaagctgaaacggtcactatgaccattaatttcaacttctagacatgcagtgtacctgtgtagtgcccagggatagcctcctcgacactctcaaagcttatattgtacttctcatagctttcattctcttcttcatcacaatcctttcagctcaccaaacacaatacataaata

SEQ ID NO: 2947 - DNA, 889 bp, unidentified
  source 1..889: mol_type = unassigned DNA; note = unclassified RNA viruses ShiM-2016 sequence
acgggagcgagagctcccgtgctttgattgtctatacgtcgttcactgatactttgcgtgtgaaccacgtatcgttgaagtgttacttcttattggcgattaattacacaggatattaatcccgtgcattattggatctgtttagtctttacgacttcttttcgcaccagagagggcccacttacctctttggcaaacatttaggttggttttgtttacaagaccatattctaaatgaatactgctttgtttatcacactagaagaagaatccctcagattgctgttggattctactctagcataacttagcccccctccatgttttatgttttatgtcaccatgtcgaaggaggatgtacctcctgccggttgcgtaagaatgtaggctaccgaaactagtacatactaaactctcattccattaggggtgttagtatatgatttttaaaattgtctgtaaatagttatacccataaaaccaaataaaaattagtctagatcatttgtcaagtcagcaacttcttcactgagggtacagctatccctatatgggatgttgcgttaccgaaatcgaggagactggaggcgtcttattagagattaggagcccaccgcaacagctgattgattgaaatcttatttagagacccctgatgataactaatattaactgtattcgatgtcgcatgttttgcgtctagtagtaggttgtgataccttcaggttatagttattgtgccaggccacctgaatagacggattgattgaagcgccatgtgtagtgaacaccacaagcttgcatggtttgccgaggccacagtggagaggccaagcccacaacccgccgttatatgtgttatagaggtttttaaaatttagcaccaaaa

SEQ ID NO: 2948 - DNA, 890 bp, unidentified
  source 1..890: mol_type = unassigned DNA; note = unclassified Riboviria sequence
atggggaggaaaagagagatatagagttgtaccggccttcgggctggagggacactacatctctccggacctccaccttccagctgccggcctggggctggagagtgtattttgccgggcccccactgcctccggggagggggtgtaatcagtttcctcgggttgaaactataaaacgaggagggtgcgcccttgacagcgtgatggtgcatgggtacgcggcgtgattaaaactgagctatggtggttgtctagtcgtccaactgctgggtggatcgtcaaaagttcacgccccttctagacatcctaagtagtaggctacccgactcctctgtgagagggccgtgcaccaggtccgaagtggtcttccagaaggctttttgccgaggtaggtgaccggaccacaacgcctctattctctgttcctcctgcttcagggggagaagattaaatagaggcatccttcgcgccgcggattgctctgcgtgagcaaagcgcactgcgtcgcgggtagcttgcaactaccgaagccctagtgaagcaggtcctagggcaccttccgctaaagcctgtgagactaatggtagcaggggccttgcctatgaacctctacgctctcgggcggtatgtgacggtgagtgacctttgtggctggtggtcctttgcggctatgaacctctacaccttcgggtggtatgtgacgctgcgcacggggctattggcctgccaggtcgaatcctcctgtgtgatcacttgctccctgagtaagtgtgaagcgagtagggaaccagcatcgatggacgtaagctgggtgtggtgtggcttggtgccatgctgctaacgtagtctgcgtaggaggcctttatgcctatgaacctctacatcttcgg

SEQ ID NO: 2949 - DNA, 891 bp, unidentified
  source 1..891: mol_type = unassigned DNA; note = unclassified RNA viruses ShiM-2016 sequence
tgataggatttcctcacggaaatcctatcatatgctagattagcaaatttttgttattctggaagctcggaaaattctcattgtattagtgttctgggcaaatggactttgatcggtccataccagaacttaaattagtcatatgcggactaagctactactatgaaaatctacgcaaaattatttctgtagccctaacttcgggtgaataaatagaagtgttcgattgtcgaatcgaactaaaataaggcagacaacagataaaactgtttgtttaaaacttcagtcagcactgaaggatactcttatatttgagatcgaacatgctgatcaggttcttatattataaaacataaaaacattgggaaagttaattttgatcaacctctcgttcaagttaatgatcattatcacctctcgaaccccaatggcctgattttattttgtatatctgctctagcttgtggcagatcgtgtctacaacaagcttttatttctaaaaccatagaaaaagtataaaatgagccaaaaaaaaacacataaaaattttgtatattatgctcagaaagactctttttaatggaaatgattctagatgtgacgatggaaacctctcagctgtaaagtgctcagctcacgtttacctgacttaacatggtcaagatactgccgtagcccctcgatgggtagattcttttgagtcgcagatctatgatgtcatcggttcccatgccggtggataggccttgctagatgatttgaaattaacaagatatatccctaggtaaaagtcccaagggagagaatcagaactctaaatactgatatggcgtgacggacgcatgaataaaatatccaactacgaatcagatacgaccatcgaatttcacc

SEQ ID NO: 2950 - DNA, 896 bp, unidentified
  source 1..896: mol_type = unassigned DNA; note = unclassified dsRNA viruses sequence
cgagcgtacttcttccttagcagctgatgcttaacgacattaaactggtcggtatcagagatcgcgctaattagacggggtgtgtgcgttgggcatacagagtctagatgggggagagacatcaatgatggactcgaactcagccaggtcgtattgcaataaggacggttttgaaaggatctggcaaattcttttgagaatccgtgaagtcagtagaagggatgagtcaatgacgtaagcccgggccactggtttcaaatatatcaaaatctcatgtagctggctccggtcggtgcaaatcttggcggattgcttgaggtggaggtagagtagatgcggggactgtagtttcgtgacttgatcatggctcagtctgacagttaccgcggaaaattcagggctatgctcggatgctcttgctaacggctaacgccgtgcagtctagcacaagactgtgtcacagggatggccccacacatcggtaacttcatacgatgtgttaaactattacgtaaactcgtggtgcgatgtataagcattagaagcggggtgtggtgttaggaggaattctaacattgctaacgtatgctcaaccggcgaaagcagcgtttaagtagcgtatgggttgggtagaacgtgccttgatgcataagttatcaaggtggaacggccgggtaatagtattcagcgattaggcgcggggaacgaatggcctaccataactggtgtccgatagtgacgatattttatagatttaccgttgactatcgcagagaacagagaagtctggccgaatatttaatattctaatatctttctatagtagtagctgcgtttattttataaacgtgaaggccaagcatagttagacggtgacagtacattcctcaaacatc

SEQ ID NO: 2951 - DNA, 896 bp, unidentified
  source 1..896: mol_type = unassigned DNA; note = unclassified Picornavirales sequence
ctttgtcccgtccgtaatgacattaaactaagtctagctctcgactttaaattgagcaccaaatccacacgcaagtgtgaagagagaatgcatggacgtggagtaacccctaggactccatggatcgcgctctctagaaataggggttcgagcttgagcacgttgatcagctaaactcaagcctatcgtgaaattggatcgccgaaaatacatttgaaaacgaacccaaaactaccgtagacagtaatggactcgtagattttatcgaagagtctaaaactgtgcgtactgctgtcccgagattaccacgacctcgtgatatctcgccttgggcagatcaaacacctgtaaagatacttgaacgtgagtatgctttggatgatgttgtttatagcacttcttcaaattccgtgctgagatatttacctaatatttttgcacaaactgcctggaaaaacgcaatgtcttcgtttcgttatataaggtgggattttcttgaatggcgttatcaaataatgtcagttcctcaggtttggggtgctgtaggatttacatgcattccaatggacccgcgtcgtcgcactgtactatcagaagattatggtttgctatctcatactgattgccaaattgccgatttttccactgctaacagcggaagaataatggttccttggtgctctttgaataagtggcttgactggtcttctcgtcaagaggagggcttcgacgctcaaaccttcaatgagctgaagattgttggtggaccttggatatattcagccgattcctcaatcccgactagtgttaccataaatttgtggtgtagcttgcatggagtgcaagtagcaggacctcgtgtccctaatactgtgacggatgaaggagaagctcag

SEQ ID NO: 2952 - DNA, 901 bp, unidentified
  source 1..901: mol_type = unassigned DNA; note = unclassified RNA viruses ShiM-2016 sequence
cccatggcaagttatggtctgaagctagataagcctctcgagaccggtgtgtacaagtactgtgctcttttacctattacgatatcactagaatttcgtgttttaaagagcacgatcacactagattatcgttttcgatatttagagattttactttgcacatttgttgtgttaaatcaaacctgcatctttctttttagatgcaagctcgtcattgactttgagctagttggcaacaaattgtcaccaacgaatcaaaacgacggtataccctgtggtgacacacaggggaatccgtgcctcatttgaggaattagtcaatgtaagatagttccattaactattaaaattctcccactgggagtgtcagcagaacgactggttctgccacgcttgtttactgtcaatccgaaagcgtaatagtcggatagaatatcccattgaaatgggcggtatgaggaccaagacttcgtgttttgagcctcgctctccgatatgagccaagctatcttttaaaatagcccaattgacatcaatttacttactccacttgtggagagtccccctattatgatttttaggctgggcatgtagttgatggcttttgtcacgggccacattgtatggatacatccaggacgaaacgttctggacatgagaatcatcacacatcccgggcagtcttttgactgtttaccattgggatgtgtgggtgcaagcatgctttgtggtaggctgagggcgtctcatctagaccatgagacagcgccctatgaagcctgcggtagctggatttaatcaccagtgatggtacgtggcaccctgcagcagcagtttccaatacccggtctattccggatattggtagtgttgtgcaggaccccgggcgatctatatcaaa

SEQ ID NO: 2953 - DNA, 911 bp, unidentified
  source 1..911: mol_type = unassigned DNA; note = unclassified RNA viruses ShiM-2016 sequence
ctgcatgggcgttccccatgcagacttttgcatttagttgtgagttttctaactcaccaaatatcgagcgtaaatcgctccttacaactcagttagagatatgtggattggagcgtacatcgctcctctatcactgtttcaactaagttcttacaggcgtacatcggttgtatgtatctttttaatagcttagttgtatgatttgtatatctacagaagttctgcaagattctttattaacgcaatatcttgtaaccaggatttgatcacctgaaattttagtaatgaattgtttgaattatgtgatcgataattagattcattacggtgcattaagataccaatatgatatagctcctattaagttagttagagcgtcattttggtggattttttgtgccagctccttttaattattaacttcgaaataacgtaaagtgactacgagcattcttggactcacaaggtaataagagactcgaaccccgaagcgcgaggaggcacacgcattctctattctcgaaaggaatggaggcaatatatgttctgaagttattggttagatagcccgaggcacacgactagagatggttactataggaagtaattgtatagaaaatttgttgatatgagaattgttctaacatccatctcgcttactgctgtgtagtagcaagctgtctatctagactaaaactatattgttctgctaaacggattgacacccggccgacaccttagttaatgcaaaacgtaggtaattgaaatgattcggtgaacattttaagttgagcaaagttctgatgtgcgttatagaacatatcaaaatcacgcacagaccctgttatagatcagtaaaactagacctcttcatgttatttgatcacatcatgaagattctttgatcagcc

SEQ ID NO: 2954 - DNA, 913 bp, unidentified
  source 1..913: mol_type = unassigned DNA; note = unclassified RNA viruses ShiM-2016 sequence
ttgatgcgaattagctattgacagtttcgatcttgtaacgatttcttttgagaattttgttagagatctagatttcaattaagtgccagttgtggcgattttaattgtgatcgactccaacgtctcagttttatagatccagttgtggatgagacttgtatataaatgtcttacactttccatgtatgtttattttgtcttttgttcatagtttccgttgtaccagttgtggaggaaatttgacgataaagatttatgtgtgcgtgttctattgtcttatatatataggttcattcatacttgtttgctaccattttagtttcatgcaattgtaccatatcattcacgaaacttcatgttaggaactttcaacttagttttgattagcacgttaatgttttgaaagcgttgagcaattgaggttgttgggatcgcgtaaagcggctctacgttgttactctttccgtagagattttgttatgttccgaccctagttaagctttttggtggttcttaaagccggttaggttaggccctgcaaagaagcttcatatctgaaacgcccttactttgattctcgaaggcgcgcaagctaccggatgatgataagtaacatgttggcaatgtatttgtacattgtagggagatcactgaagcactcaggcattctgcatagctgtcggaatggcctgttacccgtatcagcgaaggtttgacgtattaattaacctcttttcgtgcaaaagattctattttgatatcaacccggtgaagatgcttaatccactgttccttttaggggagcaacattttgcgttcgatccaccccttatttgtgcgttgatctatcagtatgatctcgtagtgatgcgcgtatttaaggtttttccaccccaggtggcttattttaacc

SEQ ID NO: 2955 - DNA, 933 bp, unidentified
  source 1..933: mol_type = unassigned DNA; note = unclassified RNA viruses ShiM-2016 sequence
tgtgggtacaaacccacatacatctgtcgtagatcgcgacgtaaaataagcgatcattcgtagctcacgaatttaaataagcgagcagtcgtagatcgcgactctaaataagcgatccggagttgatatgcttacgtgacaaaaatatattcatcttttcatgatgtaaactgaatttgtgttttataacacacttctataactcttttacttattttatatttacttgagtttcccctcattttctatgaggatctaacctgtatttataccgtctagaattttataagtacgggccattgcctattttctgaaggtatacgtttacgcctatagccctatagtattcgtgtatctttctttcctttcttaatagcactttgcttagtaagagtctatctctcttagctactcctgctataaagaggatgtcgttgtcacgactttaaatgaaagacagacctgtgtgaagacacaataaaatacttccttatatatcgttttagtatttgaaatgttgttcttaggtagtagtacgttcggaggtgtgaaaacctctttcgcggaacctactggtatgagcttcaggacattgaacgaattatatatatgagagttggtagactactctactcgtcagactcatgacgttaattatgatagctagcttgacatctagtgaatgattttctgtataaagatattgtttcattgtgctaagtactcaggtaagctgtacagcaatgtatagtttcagagagctgtttcacaaccagttcttttgtgagtatgtcgagagtaaatcttagtgcgcctacgtggacaataatcttgtgatgaaggattttcattttatggtcggaaggtatccatatgacttccctctattgatgttccccgttcgattggattaatcaactaccatttctttat

SEQ ID NO: 2956 - DNA, 934 bp, unidentified
  source 1..934: mol_type = unassigned DNA; note = unclassified RNA viruses ShiM-2016 sequence
cacggggggaacccccgtgcgtccttttcttctatagacactttgttgtttgctttgaactaacttctgcaagtgtattttgaatttcgatttgaagtgattcattgagatttcattagtgctttgctggagtttttcgagaattgtgagtttgtgttggattgtttagtgtctctagaagagaaggtaactttttcataacataggttaattatgaatgaatgtgtgtatgtttggttgtgaattgaaagctcagctctgcacacaattgttattcttgtgttatgagttttgtttcagtttgcttgaaaccagttattttgaaagcagttatgttagtaagtatcctcctcccagaaggagcctggtgaaagcaaccgctaattgtaagtaaagtaactagtttagtaaattaatgttcgttttattatgtgcttcgaatgttttttagtaaagaaagcatatacctcatgtacttgacatgtacttgttgtatgtatctttaagatacaattgtcccatagatctgttgttctctagtagttgagaccttatcagtatgagcagagcgtagcctatacctcaaaacacacactgtatctgtttggagcagtggaaagaagttagggttttgcagagtgatatgatctgcaatgtcagctagccggcaggtgttctgtatgctagtgattacgcgtagtcctaaaccgctgataagctttccgaacgatgaactaagactgtgaagaatctgtgggttgaccgaccatggattgtaaagattgctatggtacgcccaggcatgaggttggccagttcggggtcgctccgttcatttccttaattacgataattacgatttttgttttgttgtttccttgtactgtctctaatcttgatatttttgaatttattgtaatttaatttttattgt

SEQ ID NO: 2957 - DNA, 940 bp, Apple stem grooving virus
  source 1..940: mol_type = genomic DNA
aaatttaacagcgcttaatttccgcgcattacgtcaatggctttcacttacagaaaccctctagaaattgcaattaacaaacttccaagtaagcaatctgatcaattgctttctttgaccaccgacgagattgaaaagaccttggaagtgacaaatcgcttcttttctttttcaatcactccagaagatcaagaactgttgaccaaacatggtttgacacttgcaccaattggatttaaatcacactcccatccagtatccaaaatgattgaaaaccatcttctgtatatatgtattcctagtcttctatcttctttcagatcagttgccttcttttctttaagagaaagtaaggtcaatagttttattaagatgcattcagtcttctcacatggaaaaatcaagtctttagggatgtataatgcaatcatcgatggaaaggacaaatataggtatggtgaggtctctttcacttctttcagagacagagtgattggtttgagagaccaatgcttgacgcgtaataaatttccgaaagtccttttcatccatgacgagttacactttttaagcccttttgatatggccttttttatttgagactataccagagattgacagagttgtagctacaactgtctttccaattgaactactttttggtgataaggtttcaaaagaacccagggtttacacttacaaggttcatggtccccctttctccttttaccctgatggtgttgcctctgaatgctatgagcaaaatctcgctaactcaaaatggccttttacctgtagtggtatccaatgggccaacaggaagatcagagttaccaaattacagagcctttttgctcaccacgttttttcatttgacagaggaagggcttgcaatgaattcaatcacttcaataagccgagttgcctacttgcagaagag

SEQ ID NO: 2958 - DNA, 957 bp, unidentified
  source 1..957: mol_type = unassigned DNA; note = unclassified Mitovirus sequence
tcggcaagggctcgggaaggtgccgaccttcctcagagtcctgatcagactctggaacaatctacagactactctgttgttaaacactgtacgtagtggatatcggcaagggctaatttatagatctgatcaatctatatctaatagtaacagcttattcttaagactgatcatcttaagtagaaagctttctcataatttcactctctactaaccttcaaattgttctcataatcttaaagcgctatatctaactcttcttcattaataacattaccaactatggttaaatagtaaagtatacactatgcttgacactaatccaaccttaatgtacagtaaggccattagtgatgtggacttcactcagtttctcttacattccttccaatactaaatcggatacttgttactctatgataagagttgtcttggtcacggctactagcagctgagtggcgaaatcctctcagggcgtgtacacccaccaaggttaagcaattctaggattagggagcctaacaggttcaaattcgatggacaatctggaaaatagggagacgatccaacatctaacgctaccgcggcacaggttcttctgtggaaggtttgcagtcacctaccacggtttgtcaccggtctctctaataaactctccccccttcaatttaccattttcccttccattggtatctttgtaacctatcgcagacactgtgtgggtagagcctcaaaaactgaagcacagatgataggtaagtttaacctagcactttacaataactaggccgtgcttatgcatgcaaatctttatccttccactcctcttcgtgcaagcatggctgacgcaacgagtgatgtaacacttatgcttgaatcagcttaatagattcttgtatctaggtttctagattttattggacttcttatgattagtaaacatacgcctaaagtgct

SEQ ID NO: 2959 - DNA, 969 bp, synthetic construct
  source 1..969: mol_type = other DNA
taaggctgactaaaacactatataaccttctacttgatcacaatactccgtatacctatcatcatatatttaatcaagacgatatcctttaaaacttattcagtactataatcactctcgtttcaaattaataagatgtgcatgattgccctaatatatgaagaggtatgatacaaccctaacagtgatcaaagaaaatcataatctcgtatcgctcgtaatataacctgccaagcatacctcttgcacaaagtgattcttgtacacaaataatgttttactctacaggaggtagcaacgatccatcccatcaaaaaataagtatttcatgacttactaatgatctcttaaaatattaagaaaaactgacggaacataaattctttatgcttcaagctgtggaggaggtgtttggtattggctattgttatattacaatcaataacaagcttgtaaaaatattgttcttgtttcaagaggtagattgtgaccggaaatgctaaactaatgatgaagattaatgcggaggtctgataagaataaaccttattattcagattaggccccaagaggcattcttcatctccttttagcaaagtactatttcagggtagtccaattagtggcacgtcttttagctgtatatcagtcgcccctgagatacgccacaaaagtgtctctaagctaaattggtctgtacacatcccatacattgtattaggggcaataatatctaattgaacttagccgtttaaaatttagtgcataaatctgggctaacaccaccaggtcaactccattggctgaaaagaagcttacctacaacgaacatcactttgagcgccctcacaattaaaaaataggaacgtcgttccaacaatcgagcgcaaggtttcaaggttgaactgagagtgtctagacaacaaaatattgatactccagacaccaagcaagacctgagaaaaaacc

SEQ ID NO: 2960 - DNA, 975 bp, unidentified
  source 1..975: mol_type = unassigned DNA; note = unclassified Sobemovirus sequence
acaggcatggggacctagtgtacatagcagtagcggaaagaatatgtatgttggctgaggctgatcttgcagatgctccagatccagtggaccttgtgaaagctggatactgtgatccgataagattatttgtcaaacaggagccccacccactcaagaaggttgtggaagggagattccgtttgatttcttcagtatcactagttgatcaactagttgagagactgctcttcggcccacaaaacgaaaccgaaatcgatctctggcaatcagtcccgtccaaacccggaatggggctgtcgcaaccgtggcaggtgtccgctctgtggaatgacttagagcataagcataagctcagtcctgcagcagaggcagacatctccggctttgattggtcagtccaatcatgggagatcttagctgatgtgtgcattaggatagatagagggggttttaaaggtaacctccgtaaagccgccctgaataggttcaaatgtttctccaatgctgttttccaactcagcgacggaacattgataagtcaaggcttaccgggtctgatgaaatctggaagttattgtacctcgagtaccaacagccggataagatgtctaatggctaaaatcattggagccccgtggtgcattgccatgggcgacgactcggtagaaggatatgttgagggcgccagggagatgtacgactctctcggccacacttgcaaggattatataccttgcaaagctgatctagacaagttagaggaagtgaatttttgctcccacactataaggaaagacagctactacctccaatcctgggcgaaaaccttgtttcgattcctcagtcaacctgaagatgtcaatgaacttgctgtggaattgaaaggatgtcctgaatggccccggatatccaagtacctccgtcggattggaaagatctccgacaaaacttcagaaggagagggaaaacaaa

SEQ ID NO: 2961 - DNA, 988 bp, unidentified
  source 1..988: mol_type = unassigned DNA; note = unclassified Iflaviridae sequence
attgaaagagcggcggcgcgtgtttttcacgcgtcgtcgtcttattcgggttgcccaagtgcctgctacattgtttatttgtaaattctttaccaggcctactctcgaagtacactgctaaagttttgcatctcgccttgtacctcgtcttggttttcttgagtagatttcgattgttgtgttttacatagttgccgtctctttcataccctttattggaacttattttataatttatattattattatacattatctggttataaatgttaatattctttgtgaagggccgcattacactaatttagtgttgattcaattatatttttgctttgttacattatttatcgtgagggaagtagtccatgatagtttaatgtgatttggccggggtatttattgaattaggaatcttttacagcaatatgtgtgatagcgtcaaaattttgtttattgttctcattctaaattatgtttatatctttagagcgatgattctatcatattgtaatgtaatttgtgttagagcctgctgagtttcttttcggacattcccaagaagaaagatcaactcagtaggatagcttttagtagccagtacatacttatttagtcactgtgcgtatggtgaagaagcctctacaagatttcagatgtgtataactggtgctagtcattttccgccagcctgtcttaacttagcgattaacctctttatataccaagcgctgattctgtattttagtagtgtattttatttaattggttgggcttagttataagctaggatattcaattgtctatctagatattttcttttatctcaaacggatatgatatcaaattgatgattttccaatttaccgtcatatcgtctgtgtgtgatctatatcccagtgtccttattcatccagtctaaggaaggtaagatatacgtagaaattattttaactgacaattgtctagagttggaaattttattttaaaa

SEQ ID NO: 2962 - DNA, 991 bp, Tropivirus B
  source 1..991: mol_type = genomic DNA
ccggggggaatccccggtaatccacttttcggccagcgtctgttgctggcactctcgcccaatcttataacactaggtattgggtcttacccgaaaggagaatcccactacaatagattataatgataaagagatagatcgacggttgcgggtcttaccttaaccgggaatcccaaaacaagcgtctatactccagagagagatcaaataagcagcgtaatggtgatacgttaaacaatccgtcatgagaagacgtaaaaatccttgtactgcaagtaaaattgcaacttttgtaattaagtaaatatgtacctcacacatgtgagcactctctaacatcagagaggaaataatcttaaattgtaatacgtgttctggtgaaccgtttagaaaccacgtccgactagagagactagtccacggagaaatccagatgttcaagttcactacgctttcctgcggaaacaatggttagctgagatttgaacgggcgtttaagttctagacacctcacagtggagcgatccacaacagagctacaatcttcagggctaactctggtgcgccgaggcatagcggcaactgtgtattaggagcatttcagggcttgaagagcaggcacgtgcttaaaatgtagcaaaactcaagatgttgagcaatgcgttctgtttgaaaaccatgagtacatggtaacctaccacattgacctatagtgcataacgagtgaagatgtagtttgaaaacatgcagcggatcatggaattgatcgcggtgtttcagatgaaattttcattgcagtgaacattatagagggctcgtttttcgataaccctttgtcagataatgttggaggtgggtacacccacttacagaaggtaccgttttcgtgtgggttgcgaaaatggcgttattagttaacacctaataatgttgtgcagggtgacagcctgtcggcgggtgcacatcttgttttaatccgttgtcttgccat

SEQ ID NO: 2963 - DNA, 1000 bp, unidentified
  source 1..1000: mol_type = unassigned DNA; note = unclassified viruses sequence
attctaggaattgatgttctttcaaacaagatttcgattggatcattcaaacattgattgtttgtttgttaagcttgcgcccatcatgttcgcgtttgactgttaattcttttccctggcaacttgacgtcttgtcacccggttacgtatttatggcttgccttgctagggcgcgtccgcctataaacgacttaagcttcggtctagatttgctgaaagtagccctttcaccatcactctgccgtgcgtagtgagttttgtagaacattgagtgtttgagcccgtactcatcacgtgcagtcttttcaactatgctaccttgagttgtaactcttgatgctctattggaggctgtatctcgaaggctatatacctctgtatcctgggtgaaagtacccgtccctcggagcatgtactaatttccttgtgtaagatgttgctcgatcaactctacttggagagtagctttcattaacctcttggagaagaacaatgtttatacccattctttgacgttcgatgtcgatgacacaccaactctggtgagtttgatactgttgaactcgtgagtacgtctttgatgtttccccctcagaaagttgcttcaagttggttccggttccgcttgccttttcaaatcatctttgggtagacactggtgtctgtaaattcaaactggtggtaagatccggtttcccaaatctctgtctattggaggtaacgattcatgcggtgacactattagttttgacctatacccgtttgtaacgtttcgatgtccaagacacaccaactctggtgaactgaatcccacatttggttcgtgagtgcgttgcagatatctcttgtcaaacttggttgttcatggcaattttcacatggtaagattgtgagaagacccctgactcaacagtagttaattgcgccgcggttccgtattttcatctaatttaccctactttcatgatgttgaggagtaaacctcctcttttcgtttata

SEQ ID NO: 2964 - DNA, 1000 bp, unidentified
  source 1..1000: mol_type = unassigned DNA; note = unclassified dsRNA viruses sequence
gtacagatccgatgataaattccggtgatgtttaatatagcgagtttagtctcaaagctcgtcctgcggatatacaccagctcaagggggtatggactgcccttgtaaagtctacaattctagaggagaaggtgtaatttgctaacctccttagataaactgcctcatttatacatcctgtgctcaccataagctaggatggcgcttggtattaaattgagcgcaatacctccctcgaggaaagccgggggcccatcaatggggatatgaaactaggccctggtagcaatctcaccagtaagatgattttagctctaatgtataggcccggacattagtaagattacagggcaagaactatcctagtgggtctgttctcgtcgttgcgtttaacgccggcattcaggtccaggtgcgaggtaactgagattttcgactcaggtgtgatccggtggtgtcggctaccccggtgagctatcgtaacatcctacgccgttagcctcctatctagcctctagtaattatttccactgctatgctaatccaggagtgagtagggatgggaacgagcctttcgatggaataagtccctaaatagagtggcatcctacaaagaaaggtggacagactgacactcgacacagagcaaggtgaatcctgctcctagcaaacagtcggttggggaaataagagtacccaatgatggttcatcccttcaccgggtggtatagaacggcgcgtgaggtaatacatagtattatccacctcacgtatacctacccacttgaagtagggttgttggacgtcccttgaccaacttatatataccgggctgcgcaaagcctttgtcacccatttgtctaatcaagatgccagtatcgcctaccacatcctcatccccattaattttggacgaaagaagccggtagatagttgctatccaagatacactgattagagatctgaaagtaccgagtcataaatttgctgcacgaacaaa

SEQ ID NO: 2965 - DNA, 1000 bp, unidentified
  source 1..1000: mol_type = unassigned DNA; note = unclassified Tobamovirus sequence
caagtcactattgggcaattgtctgattttgactttgtggatctgcctgcagttgatcagtatagacatatgattaaagcacagccgaaacagaagttggatacttccattcaaacggaatatccggctctgcagacgattgtgtatcattctaagaagatcaatgcaatttttggaccgctcttcagcgaactgacaaggcaactactggacagtgttgactcaagcagatttttgttcttcacgagaaagacaccagctcaaatcgaagatttcttcggagatctagatagtcatgtccccatggatgtgttggagttggatatttccaaatacgacaaatctcagaatgagtttcactgcgcagtagagtatgaaatctggagaagactgggtctagaagattttctggcagaagtgtggaaacaagggcataggaaaaccactcttaaagattacacagctggtataaaaacatgtttatggtaccagagaaagagtggtgatgttacaactttcataggaaatactgtcattatcgccgcgtgcctagcctcaatgttaccgatggaaaaactgattaaaggggcgttttgtggtgatgacagtctgctgtacttcccaaagggctgtgagttccctgatatacaacaggctgcaaacttaatgtggaactttgaagctaagttgtacaagaaaaagtacgggtacttctgtggaaggtacgtgatacatcatgatagaggttgtatagtatattatgatcctcttaagttgatttcaaaactcggtgcaaaacacatcaaggattgggatcatctagaagagttcagaagatccctctgtgatgttgctggctcgttgaacaattgtgcgtattacatgcaattggacgacgctgttggggaggttcataaaaccgccccccctggttcgtttgtttataaaagtttagttaaatatctgtcagataaggttttgtttagaagtttgtttatca

SEQ ID NO: 2966 - DNA, 1000 bp, unidentified
  source 1..1000: mol_type = unassigned DNA; note = unclassified Cucumovirus sequence
aacagaacattggaagaaaccccacaacaacatctttgtccgactctagtacccacttcaatctttctttttatctttcaaaggtcctttgggtatcttgctcaaaaccttcgcatcgaacactgcatattgcttcttaatctcggcaatcgccttttcaccaaaagagtccacttgatcttcatatttctcatagagcacaggcacagtatgaagcaaaacaaaagctatgtagaacaacgtcaagaagttcgcccagctccccagaatagagaaaacccataatccagcaatcactgataagaacttcttgagatcccttccggatgcaatatcccttaacactgaaaatgcccgattaatctcaattctaagagcagaggcaaattgtaaaatagggtcctctggaatgtgcacttgtgggatctttggcggcctcttgttgatgaaagtggatgcattggaccacaagaacaaacccgcgagggcaagtattacgaagtggcaaaccagagtgaggaggtggtactcaagcaattcaaacagaatccatatgactgtagcaactccgagtgtcgatgctgatatcttcttatttctccacagaaaaacatcagcctgttttccgccaccaagaacatggtgaatgggcttttcccttccgaaaagcctgaaaacctttgacttcaaggaatcagagggcccggttttctcgttgtcggaatccgaggaagacgatgaatcgtggtcgtggatcttcccggaaatcttgtccaacaaggactcacccttggcctcctcgtgctcgtggtgctccgccatcacagaatcgccgatcaatggaagcgtctagaaggaataagaaactccctttttcaccaagagagagagtatgtgtgtgtgcgtgtgtgtgtgtgtcgcgtcgtgtcgagtcgtgttgtccacacatttgagtcgtgctgtccgcaccttcttttcagtgtgttagaatacccgaggc

SEQ ID NO: 2967 - DNA, 1000 bp, unidentified
  source 1..1000: mol_type = unassigned DNA; note = unclassified Arlivirus sequence
actcatagtaggccaacaatatacttgtcgattctactagcgtcctgtatcaagacaccatcggttgagtaagattatgtctaaccattataaaataatagcagatattggtttgttggaactagacactggaataactagaagagtcaaggctggattagggacaatatccatctcaaatgataaacttcctaaagttagagaaattctagccaatcttatattactatatcaggtacaagagttagagcactggtatcttcgtctagatttccactctcccagtatgaaaaccctaattgatatgtattcagcagagttattatctcaagagcaagtttggtatatgagaattagaaccctgctaggatctggaagtgcatgtttggttaaaagtggctttgaagtgccgactatgcaaattatattagtgaaatatgtttacccatcggcattcatacctgaatagattcttttaaacagggaactttatttataacactttcttttctttacgcaaatttatcaatatacttgcatatctagcagtctcaactggaagtctctttaatttatttatcaatacacaagccagcttatctatatgattatattatgtatcaaatgcatgcgttcttagaacattaattaataaaatatgtctgctatacacaggtgataaccaatgagattatagagtaccattacaaaattgtgtctttattggcaataactagatgcttatctttctgctttaatttacacttagaaaaactcaagaagtgccatctaatagctacaatataaacataagcgcgaatacaaccaatataaatcgtcaccaaaggcttatgcgccagacatctcaaaaagaactcttgccagaggaatcagaagctataaataaagaagcatcagcattgcgagaacagaaatcaattgaccagaatatataattgaaattcaaagtgaataaatcttgcttaacataatctccagt

SEQ ID NO: 2968 - DNA, 1000 bp, Berhavirus beihaiense
  source 1..1000: mol_type = genomic DNA
atgcttgaatcttgagggaactcacatcgacatctcataactatgatattgattgctctggttttgattttatactttgatgttgagatatgcggggggaaacaggccagagtgctctttatagaaaactgaatttttaatcatgcatggaagggaaactgcccgatcctccgggaggttagtgctataggatttctagagcagatcagtagaattagtgttataactttggcttcttgatgtatgttattattcttgttatattacctgtgtactctatatcatactttactctattaaatccagctatccattcctgtaatgtatgcctaaatgtaaccttatagtgctataaaaaaagtaacattacccaacaaaactcggaatcctctttaacaatgaatagtgattttactgatataagctcagaatatagcgactctgctaaaggagacaaacaaactcaatctaagcaactgattaagaaaataaggagaaagttaaagacaagaaagaacactaaacagaaaaaaacctgtgccagaagggacagactcatcagatcaggaaattcacccctatcagctattatacgacagagaaaagagactaattgagaaggagtcaattgagaaacgcgtcttgaagaggaaatctgccccaccgcctgagcctcctcaaatagaaggtgatttatcggacgagttgcacctcttgatagacgatcaatcctccaagagagcttgcaggccgacagaaatacctacggacataaacagccatatcgtgacagctctgcacggcctcggagagcagatcgggaagctatccaagaaggtggatgagatcttggtgaatcagcgcgatcagtggtcagcaattagaggactgcaggctcaggtggctaagctgaacggagaagccgtagagggtctgctgtctccccaacaggaacttcggctagagtcattcaacacgaggaaggctgctaggaccatcg

SEQ ID NO: 2969 - DNA, 1000 bp, unidentified
  source 1..1000: mol_type = unassigned DNA; note = unclassified Morbillivirus sequence
tcctaaattacttgttaagccgccacctagggtaaaaacaagcgttgatcacagtaatccattaaaaggggccacaggagggaaattagcctcacctgggatggagactacattattcgagaggagtggtgcaaccccatctgtacacccatatactcaacctgcaagcgacttcaatgtaggtgcaagcaatgtccatcaacctgccctaaatgtgaataataattgcaatgatggtagggtaacagcgcctaactcacataaagatatcgagggtgagtctgaaatatctattcaagatatatataacttgattcttggatttaaggatgattacaggaaattatcaaacaaattagatatggtattagagatgaaacaagacattgacaatctaaaaaagaatagtgctaaagtgcaattggctctatcaactattgagggacatctatccagtgttatgattgccatccctggttcaggtattgattccacaggggatgaggaaaaggatcagataaattctgacttaaaaccactgctaggaagggatcattgtagagcatttcgagaagttaccaatcctctagatgagtcttcactagccaattctccaacaaaacatgttgccaaggtaaacaaaaactgcactcttcagaagatcaacaagaacgaaacatctgcaatcaaatttgttcctagtgacagtcatgcaagcacatcaaccatcagatcaattatcaggtcatctaatctcgatcaggatttgaaaacaaaattgctcacaattctatcccagattagaggggcagacaatattagagaattctatgaaaaggttatgatattaataaagaataagaattaaatattacaaatctacattcattataggttgtaattgtcttcaataagatttggtcagtttcatatatatggttattgatttgtgataattataaaaaacttaggagctaaaggttactcagtcatatacagc

SEQ ID NO: 2970 - DNA, 1000 bp, Small ruminant morbillivirus
  source 1..1000: mol_type = genomic DNA
gggtcccggaaatacccgatgtcaagaactctagaccatcagcccaatcaattaaaaagggcacagacgggaactcagtcttatctggaacggtgacagagtgttcatcgataagtggtgcaacccaagctgtgccagagtccagatgggagtcatcagagcgaaatgcgtctgtggggagtgtccccaaatctgcgaggagtgcaaagacgatccaggggttgacacaagaatctggtaccatagcatcactgactcagcctaaagagaatgactccgagtttgagtatgaggatgatctattcacagagatgcaggagattcgtgcaagcattgctaagatccatgatgacaacaaaactatcctctcaaaacttgattctctactgttattgaaaggagaaatcgatactatcaagaaacaaatcagcaaacaaaatataagtatatctaccattgagggccatctatccagtataatgatagccatcccgggctttgggaaggacatcaaggacccaacatctgaggttgagttgaacccggatttgagacctataatcagccgtgattctggcagggctcttgcggaggtcctcaagaaacccgctgttgataggtctcagaaaagcggaatcaaagtcaactccggttcaaagggtcagctccttaaggatctccagctaaaacctgtcgacaaacaggcaagctctgcaatcgagtttgttccatctgaccatgaatcatccaggagtgtcatccgctccataatcaagtcgagcaagcttaacattgatcacaaggactatcttctagatttactgaatgatgtgaaaggctccaaggatcttaaggaattccacaagatgctaacagccattcttgccaagcagccgtaacacatcctataatcaacatctcatactcggttgaaaacatcctctcaatcaggctattacaaaaaacttaggagcaagggcaactgagcttcacagacaag

SEQ ID NO: 2971 - DNA, 1000 bp, unidentified
  source 1..1000: mol_type = unassigned DNA; note = unclassified Bunyavirales sequence
ggtttgacaaatgtacttgactgaccagcaggtatgaccgatgtatttggttttaaacaggtaggtatgtcaggtgtatttgattgacgggtaggtatgccaggtgtaacggggagtctattttaacaatgaggtggttgctttggctgactgatttttagtaaacgtgcttcctctgaatgtggataagactcaaataatacattttaaagcaaattacacaaacagttttcagcaaatcagacttctaaattctcggctggtccctgaagatatttgttgaaaataaaaatctgtttcctcacatttataaattgggtaaaaaactaagttcaccaatctttttccttagaattatcactaaagtcacaaagacccaattggatatctatcatccttatttttaatccctgttgaattagggaatttttgtatgggaaaattcaagccactccataagttcttaaaacatcagaaaaaaatcaatgtgtactatagccaactatacttacaatattcatgacaatatatttttcagcagtttcaagttttcatattttatgacaactacattttaaaatagcttattgggtaaagaataactggttcacattcagagaatgccaatcaaatgtgtctatgccactagatataagcataagattaagcctgtaaatcataggctaagcctgtaaatcatgggctaagcctgtatcagtgatcagtatactagaccacaaatatataacgttccaacaaatttaaaaatatcaccataagttttagattttggaaaaactaaagaatggcttttaacaaaaacattttattctctagaagaataatttaaaggaaacgggaaaacttgaattcattaatagattaatttttctcttcattagtactgtaatttgacaaaagtgttctgtcattgtttaagggcagataggtacgactcaagcacgctgaggttaaacacaaatgagtaatctaaagaaaa

SEQ ID NO: 2972 - DNA, 1000 bp, Mamastrovirus 9
  source 1..1000: mol_type = genomic DNA
ctaaagataagtaaaattgaggaagaagacattaggcaaattgtttgtgctgatcccattttttctagaattggttgtgtatttgaagagtaccaaaatcaattgatgaaaaatagaaccctgacacgtatgggtcaatgtggatggtcgccgtttatgggaggtttccataaacgcataaagcgcttagttgataaaggcaatgattatttcattgaattcgactggacgcgttatgatggtaccatccctaatgaagtctttagggtcattaaggactttagattctcgtgtcttaggggggatttgcaaacaaaggaaaatagagatgtctataattggtattgtgagaatatatttagaagatatgtgatgttaccttcaggagaagttacaatccaggacagggggaatccctctgggcaaatatccacaactatggataataacatttgtaatgtctttttccaggcatttgagtttgcatatctgaatactgaattggattctgatgaattaaaggaaaattgggataagtatgattcacttatatatggagatgacaggctaactacaacccctattttatgtgataattatgtagacagagttattaaaatgtatgctgatgtctttgggatgtgggtcaagagagagaaagtaaaagtttcaaataaaattaatggattgaccttttgtggctttactgttcaagagtcaaatggcctttttgtccccataccaactgatacagataaattacttgctggtttaataacaccaataaagaaattgcctgatattttgtcactctatgggaagctcctttgctaccgcatccttggccataacttgccggatgaccataaatttaaaaattatattttggtcgccttggaggtagtggccaggcacatccgtgctagtggtggggaagaaccctactatatcacggatagcatgctggataggctttggaggggaggtccaaagcaaagtc

SEQ ID NO: 2973 - DNA, 1000 bp, unidentified
  source 1..1000: mol_type = unassigned DNA; note = unclassified Picornavirales sequence
gccgcttatgttaagtcagaacggttatggatcttgagcatttactttataggtttaggcccgaagcgaagggtggcgtaatgatcaccgccgtgaaagccagtcgtgggggtacctctatggagtacgtgttccttctaatctgggtatggttttgattaaccagtacacttatgaatgagcaccttgaatgaatgtagagtgaatgtttgtatactatttagtgaagctgtaatttggaagtagtacggaagtagtacggaaaccgaagcctgaagccgaattacagaagtagtagcttagtgtgtgtatacaaaacagtagacatctgtggcttgtctagaagctgagtatcttctttaaatattactcaattctgcgtgttatattatctattatattagtaatattagtagtgcgtaactaagtacctcctctttgagtttgagtctacttagaccactgcagtatcgagtagtaatctttaagaatagtgcaatatgttgatcgattgtcaaccaccgttaagggtaacccttagcctgtggtaaaccaatgcatgcgaaggtctagcaaactggaacatgtgagttggtattccctatacagtgtgccaccccagagagcgggtatagggcatgtcatgtcaacatatgaattttctaaaggatgtgctgcgatgaggtagggacccctctatcctctaggtactgtatgtcgcgaaagtatgaaagtataagaacgtaatataatattcagacgtacaatggtatactttaagcaagtaatactggtgtgttgtacgttaaatttgcttcggtatcactctcacaccacagccgttagtgtctcacagtggagtagggaatctttatttatttatttattgctgattccattgctgattatactgctgcgctcttgctaatttatttgctgatctatttatttatttattgctatttattgctgattatttattgctaataaatcatataca

SEQ ID NO: 2974 - DNA, 1000 bp, unidentified
  source 1..1000: mol_type = unassigned DNA; note = unclassified Picornavirales sequence
ttagttcagtggaaagcacaacaccgcttcccccgattatgtgacatcaagtaagtgggcggatgggagcccctcagaatccccgtctcccttgacgggtttgacttttaaaattcccataccggacgaaggcgcttgcaacaagtcaggtttattttctagaattcttgtttttcttaaccctacgtgatctatgcgtagtgggcggtttagtgaggaaccgttctcaggtgatccccgcacgcttgtgcggaactttggacaccacctcaggtcaggtgagacgaaggtagtgtatcctttctggaaatcttgtaatgaaaccctaacagttcatcctcttggtataagctgttcccacggctgaaacttgaggctctgatttgcacggaggctgtggacgaacatctggtaacagatgccacagtggccaaaagccaagtgagcaagaaagtccccttaataggctgtacccacggctgaagactgggatggactgcgttcaccacgtgtatccactttaagtggctgtttggttagtaagagcttgatggaaggtttggacgactgctataagtccacttgattggtttgtgtaggaatgctgggcaggtacccctatctagggatctgagctcaggctaattgtctaagcaaacccaaacttcttttcccttttttcttttcattggtgacgatcacaggagctatcatggcttctcaggcaattcacggtgtctataatctcccaatggattctcttgaagctttcaacatgattcgcgttttttaccgcgataaccaccttgacttcatttcttactgtgcctcagtggtgcggacctatcccgcggtgctgcaggagttggctcaactggttcgagacccggaacgttatgttctgttttgtgccttacattggcagaacaaccatgatgaaggttatgagactgaccctaacccggaacctatggaccaagatgaatctggagatgaacag

SEQ ID NO: 2975 - DNA, 1000 bp, Cardiovirus E
  source 1..1000: mol_type = genomic DNA
tcatgtgtgtcgcggtccactccctcagcaacccgtctttggacgtgggtactacgatagtgccatccaattcccctaaccttgttaccttccgagcgacctccaacacccgaggtgctcaccaccctgtaaggaaaaatgaaatttcgtctggtgctggctaacagataagatctagcattttccggcccaggctaagaaacctctataaagtagatcgataaacttaaattggcgaactgtacaaagaacggtcctctaccttgccgccacacacacccaaccctaaaatttggcctttagtgtgtggccccttgtgtatgacctcaactcttgcgtacacgcggaatttaacatctttccgctgaaaggagttttcgtgcctccccgattatgtgatgctcgtcctttgctgggcggagcaacgcacgaaacaagccttttctttactaatggaatccaattcccccggtctaagccgcttggaataagacagggttattttcaccccctcttcttctactctcacagagctctattctgtgagaagggaatgttgcgcccctccttcttgggagctcgcttggcggtctttccgtctctgtgcaagagcgagtgcgcaatgtgttagaaggtgaagaaagatattttgggactaacgtttgacacggaacgaaaacgtctgtagcgacctcacaaaggcagcggaacccccctcctggtgacaggagcctctgcggccaaaagccacgtggttagcagccacctttgtgagcggcgtgaacccgacgccacggtttcgttgtgtgacactcactacccccattcggtctttcttaagccctaacacaggtccaccaagaatgtcctgaaggtacctcttcggagatctgatcaggagcttcatgccggtgctttacaccggttcggaagttaaaaactgtcacagtggacccaaatctagatggttctagatttctattggttttaaaatttcatt

SEQ ID NO: 2976 - DNA, 1000 bp, unidentified
  source 1..1000: mol_type = unassigned DNA; note = unclassified RNA viruses ShiM-2016 sequence
aacccgcaccagtgctgtctattagtttacaaagtgatcgcttggcgtaaattattagagagcttgcattgctctcctctacactttctttcgtagagtcattttatttgtccgttgaaacgtattaaaggacctattttgtgtctaaggtcttgtatatgtgtgtggttaaattcatcaaaatcttaactatcactattatatgttattgtcctttgttctatgttgtatgaaagtgtttgtgcttatattcttcaaaacacaaaaacattgttgttgactcctatagtcactatatgtgtatgaatgttgtatgaatgtatcccggattacactaaatgtacctgcttcagcatacaatggctgtgtgtagtaagggtccagcggtgctgcccccatgatagggaggagatttgcttgtgtgtctagaggagtttgttctaccggcggctgaattgctgcgtctgagagacaacttcttgaaccaccgtttgcatttggccttccttgagggatgttcccgtcacgcccggaaccacctgtcctgtcgtatttagtgtgggaaacagtgtaagatggcgttaccagatcgaaactggacctcagcacttcttcgctgagaggctggttatgcaccaccagctaaacaaacaacggttgttcttactaggcactctgtggtggagtagccgaggcgtaggaccattaacataattggagcatacaggcgagaggcccatgttgcgaggtctgtccataggggacctcaagacatcggataccaactctcgggctaagttcagcaataatgcacctctgccggcagtgttctaggcaagtgtcacactccaattccctgttattgtaagacaactaaccttccacatattgacgcccgagcccgaagggactaacgtcgaactgtgagtgcacacagtaaatctagggatctttgggtgagctcccgttatcagctcaatccttttctcatttcgtcacc

SEQ ID NO: 2977 - DNA, 1000 bp, unidentified
  source 1..1000: mol_type = unassigned DNA; note = unclassified ssRNA viruses sequence
tttaaaaatttgatgtttttactgcttctgttaatcttcttgcaagttcttttcttcttttactatctattgcatgtggacactggagaactgggacagctctatcctgatctcgactagcctgttactactatcatttatcttttcacctagatcaacaacagtggtagtactgtcttacacagtgctactttatcgcctatggcagacttggaaaatctttgcaagcaactaaaagacttgacaaccaaggttaaccaaattgcccaaagccaaaaacaaacagacccaaaacaacaaagacgcggaagatctaggagccgtagccgctccagagaacgcaaaaacatccgctactttgacgaggacaaggtaaaacctggggatattgtacacgttcgtacttgtccaggtactattactggtaaacactccgattgtcagtggaactacatcgaaatcaaattcccaaagaaacctaaaacagagggttcaaactaagtggtcagaatttgtagccaaacataatttgactgctaccaaaaacacaaacggcaaaacttgtgtcttcctctgtgacgcaacctattgtgacaacgacaacacagagttccaaaattggcgcataacaccaaaccttgaactcttagtttattcgtcaacccaaatttcaggtgggcgtagaacaaccctacagctagcctgtaaaaactactcttgtccttggcgagaagaggttcaacaattacgcaataaaacaatagttagacaccaaccgtgtctacccaaaaatttaactcaaaaaatcttaaacggctcgctttgtaccggtctagaagacggtagtaatctgatctgcgtcaaaaaaccaccaagaccaagaccaacctctctcgcgctagttttcgctagtacgatccaaatacaaacaacaactgtagtgacaaccggttctactactcaaataaccacctcacaacagacaaccaaactaacaaca

SEQ ID NO: 2978 - DNA, 1000 bp, unidentified
  source 1..1000: mol_type = unassigned DNA; note = unclassified RNA viruses ShiM-2016 sequence
gttgtctcttttgagacagattggcaaccaaacatatatttattatattactactcaagcgtagcccgctagagttaatagctgtcattaacagcgacccctcggcaagaggttaactgtccaaaatcgaatctgatcgaggaagaaatccaaaaacagacgtcgctaacccgctacgaaaacgcggaattattatcgtaggataagaatcgactctatgtcgtgtgcgagtccaacggttcagattacatatgtttgtgacatgtgcaaattcggttgcacaacagccattctttgtaattcatcttattaagaagatggaagaactccctcctatggcgccctgtaatggggattggaggtactctagatttggaaacctggagtgaacgagaacggtttggagcagtggccttttataggtatagactccatctgtaattagttgaattcttagaatcagcctgtatttgatcttacttgttttccacgcaagtattgcagtataggtgctgtccttgtttgacataacgaaggcttgagttattataacacttcgaggaaagtataaagactttattaggtcagtggaaagatctggcgctgtgtttggggttaatagccccctcagcatcaatatagcaatgaagttacgaacagccaaaattttaattccggactttttgtcacacccaattccggttgtggtgatgataaatcatttgcaagagttaaatttcagaagtctaaggcttctaagcttcgtcagaagggaaaggatgctggcaagtttggcgctcccaaggggaggcgaactcagatcgctcagcaattggataaggccaatagggaatataaggcaggtagatataacctgcaggctaatagtggcatcgtcgaggaccttgagaaggtgcgacggagcctcgccggttttaaggcttcaataccgaagaagctcggcaatatttttaacgttattgaggacgtaatattacat

SEQ ID NO: 2979 - DNA, 1000 bp, unidentified
  source 1..1000: mol_type = unassigned DNA; note = unclassified RNA viruses ShiM-2016 sequence
gaatgtgcaagcacgaattcacctcctgcttgtatgttttccacgaaactagatttttggcaaattagcctccatcatgtttcgtcagcccttgagtaacgggtgcaaatggtataaccctggcatgttgctcaccccaaacccgaccgaaattgtcattaaactaatgtcgaccgaaatgtcattaaactaatctaactatcttttgttctttataagattttagatgtgcatctcaccttgtagatgcttttagccggttttaagaactggcaacccagccccctattccgactctttaagagattaattttagatttggaatgtttttgcagcagtttagctcatgctgactgtttgccccatacttttattagcgtggagtaatttatttaaatcacttgtgaacgattttgaggaatcactgtctagaagatgtcacaaagcgacttagtcgtagttttgctctttacttatgatatattaccgataaatttgaagcatttaaaagtcccacatcagatgggatggtttcgatattgacctctatcacttttacgagtatgaagtgatcgaatttcatgtcatacactgataaaacgcatatctggcgaattgcgggtgttagtgaagtttgtatatggggcctcgtacccccaggcgacgagccgaatacgagtatataggttggttaatttattagcccatatctgcgtgacctgagtaacaacccatgcgggaaaagttacaaattgccacatcgacgtagatctccgcctattggtcaataagcggagaaagtatttatttgactactaacaattatcaacaactttttgtaggatgtgagaatttatcagctcccatctgtgaaatttttgatagtacttttcttgataacactcaagaaacactttttggaccccgcctttgtggtcctcgtttatgtagcgatgcgtatgatcctaaggaatatgcgcgtagcaagtaccggcgtcgt

SEQ ID NO: 2980 - DNA, 1000 bp, unidentified
  source 1..1000: mol_type = unassigned DNA; note = unclassified RNA viruses ShiM-2016 sequence
ttttctaacttaaacaagaaaatgccgctcaacttgatgggcgtcattttgttgtcagtgaacagagttcagccaactctatgtatcgcatcatttaatgctctgactttcgggtcatcagatgccttttcttggttatttgataagtatgctatagatttgcgatgtattgtatcacaagagcgctatagatttgcgctgtattgttgacgtcacatgtggcggtaccatggttgaaccctgccgctcatgtgtattcagcacgtcacgtacgtctcgcctgactgcttattttaatgatatagtttgcaaattgtcttttcagaaggtaattatcagttccttgtccaaaattctgattaaccttaggagattatatatctccgcacactagctttactaggtcgagctatttctccccttcataggaggaaaggacatctagactttaagctctttggtcctgagctatttcccgatgggcatacacagatgtccacagtaacaactcgtaaaagaaataaaaatattttgaaaacggaccattacccttacccttgtaacaaaggaactccccttctcaaatttagaaatcccataaaaatctttaaaacagaaatgtaaacaagatccacctttgttgcagagaaccatatgcttgtgaggaaatacactgaatataaatccctaaacgctgggtttcactgtatgagtttcctaacctacacagtcgagagattgtgggctcaattgagtttggttctagacctaagcgcccctcttactagatatagtttgcacttgaggaaatgcgatatgggaaagcgtgcacttacccctgcgaaggaagggtgcatgtgttggaaacagatgtgtagaggttcataaccactcacatgccatacgtactgatcacggtaagagtccgagagctagggtttccccctgaaagtgggatatcccgacaccaggagaaataataggtgataatgtgaaagcg

SEQ ID NO: 2981 - DNA, 1000 bp, unidentified
  source 1..1000: mol_type = unassigned DNA; note = unclassified RNA viruses ShiM-2016 sequence
ccatcgagctgtaaggagttagggaaacccctggcagtttatcggtcctgccataaccaaataccgacaccccctcccttcatagtttgtagatattttcaacacgaagcgttgagaacaatagtataacaccatcgcgagcgcactttgtctgtgctactggtcttatatgaggtgtttatacgccactgttatagttttagagaattgttggaattagtggacacatgtccacatgcacgaaatactacgtgagtgcatgctggcttgaccccaaaaacaaaatcaaaattataaatgttcttgccctttgtcggtttagaacatacaaaaatcgcagataggtgcctcttggtgacttaatcagtcccatatcgtactgttgccatcacatatcaatcgtaagtgagacagcgttgctggtggctactctagagaccagcacacagcgtaagctgttcaggtgtccactttacccgagagggtatgtagcagcgattgttgttgtgacacgggcgggtacacctgacttagtaaggttccgattaactggaactctgaaacgttagccccctggaccattagggtcgtgagggttccatgcggagtgcttatcactcctgaatggatatggagcattcacagaagccgcggagtaaaggcccggaggaatgccagtacgtctagctcagccggatgaggagtccggcgttgtcgagacaatgtgtattgcgatgcactaggtaagacagagcgccactgagcctgctcgtggtatgaagggacgtgcacggatctggcaatgtccgatgatggtgataccgtcagctggatgtgaatgtttccagagtcaggcactggatgtagtgccgaagtttccttggtgacgttcctccctttgatgaggtaatgttacaacaaaaacactccgtgcaacccaggaacaatcgcaaaacccctccacccccaaaactaaacacacgacacagatacaacaatc

SEQ ID NO: 2982 - DNA, 1000 bp, unidentified
  source 1..1000: mol_type = unassigned DNA; note = unclassified RNA viruses ShiM-2016 sequence
ctttgcctacaacctttatagtttttatgccggcccactttgatttatcaatgtggccccttgatttgtatctcgcgggatacgcccatacatttccggcatcctatttgatatttcattcgaattattttattaacatataatatttatttattcgttagtcactataattagtgcaaccggtcttcgggccattattagtccttttattagttctatcacgtgtcttcgggcacacaaatagtaaagtatttttattagatctctggagcatttaagatgctatagccttaacgaactggcgtttatcggctttttaaattgaacggtatggttaccacattgcccgggagcctattttaagctttttcctttagcggggaattatcacttattttagaataaactcctttatccaggtgactaggtattcctatcaagccaagtttcaactattaagtgtcaggataagtctttagagttaagttgcacatcgctgcgcgttgagtgcgtagttacccatggtgtgcattttgctatgataaccatcttgcatgtttcatgtcttttattaatgaggtagttgttctataacagcatttcggctgagaagctgaggtgttggaacactaatgtttacccacctatcgaatattctatacactgggttaactgcccgtatagtcttaaactagttccttctattttatctagacatggaaaagcaattcctacccctcgagtcggggaaactaattctcttcaacacatactagtctcttcggagagtgttgaagcccttaatcattcttgtaatgaacatgtgcagttacatggtttatttcattttactgccaagtgtagttgtttcaatgttgacttgattgtctcaaaggatgacacacacgaatcaaaagtggatctatcttcggatgattccaatgtcaaagaagtactatttactgagagcgattatttttcgatttcgcaacagacaggg

SEQ ID NO: 2983 - DNA, 1000 bp, unidentified
  source 1..1000: mol_type = unassigned DNA; note = unclassified RNA viruses ShiM-2016 sequence
cctaaaaatatatgtgtgaattgctctccgtgaaaggagatactgatcatgtaataggtgctttaagcactgaagctgcaagaactacagcgtaatcaacgcgaaccccgcttgctcagcgggaaataaatagagcatttttggtaatcttcttacctctgaatatagaaaaagaagacgtcgttcgaagccggaacgtaatccggattttacattacagtaccttcgcgtaggtgcagtaacaaatagttggtggagccaaccgtctagatatagtgatctaggacacactaccactttttaattttacattataaagaacacacgaactcacctcttggcgggctacgtaacgtagttttgaggttctcttataggtatacttatcctgttagagagtgcgatgtacggcatggagcagtaatatacttttatagtattcagactgtgttcgttacttatatttgtaataaatattgattagtggtcagctctttcatcttatcccaaggctttattcgaccttgggtgtttgttagagtgtgtggcttgttagactgaagcaaaggcttgagcttcgacttttcgagcaaagaattagaatagatctggcgccgttgggcttaactagcccctcggcatcaaatagcatgaaattactaacgccttttcaaaagtactagaccctctttcctttgaaggaggaacttacgatttgtactctccccaatcttttaatttgtggtcaagatggcaatttattagcaaatacttggcacgggaactttctaaagaagttctttccaaaattgaaggattggtggctttgtttttggcactcagtgaggttcagacggagaaaggtttcttgtctgtgttaatactttatgtaaaaacacattgtgacgagtctcttattaaattcgtgactgaacaggttgcagtcctgtttaagggctatacggcacagagttctggccgtccaaagtggttggatgat

SEQ ID NO: 2984 - DNA, 549 bp, unidentified
  source 1..549: mol_type = unassigned DNA; note = CK1.4; Caprine Kobuvirus variant sequence
gtggccacgcccgggccaccgatacttcccttcactccttcgggactgttggggaggaacacaacagggctcccctgttttcccattccttcccccttttcccaaccccaaccgccgtatctggtggcggcaagacacacgggtctttccctctaaagcacaattgtgtgtgtgtcccaggtcctcctgcgtacggtgcgggagtgctcccacccaactgttgtaagcctgtccaacgcgtcgtcctggcaagactatgacgtcgcatgttccgctgcggatgccgaccgggtaaccggttccccagtgtgtgtagtgcgatcttccaggtcctcctggttggcgttgtccagaaactgcttcaggtaagtggggtgtgcccaatccctacaaaggttgattctttcaccaccttaggaatgctccggaggtaccccagcaacagctgggatctgaccggaggctaattgtctacgggtggtgtttcctttttcttttcacacaactctactgcgtacaactcactgactatccacttgctctgtcacg

SEQ ID NO: 2985 - DNA, 625 bp, unidentified
  source 1..625: mol_type = unassigned DNA; note = unclassified Picornavirales sequence
attctcgggctacggccctggagccactccggctcctaaagatttagaagtttgagcacacccgcccactagggccccccatccaggggggcaacgggcaagcacttctgtttccccggtatgatctgataggctgtaaccacggctgaaacagagattatcgttatccgcttcactacttcgagaagcctagtaatgatgggtgaaattgaatccgttgatccggtgtctcccccacaccagaaactcatgatgagggttgccatcccggctacggcgacgtagcgggcatccctgcgctggcatgaggcctcttaggaggacggatgatatggatcttgtcgtgaagagcctattgagctagtgtcgactcctccgcccccgtgaatgcggctaatcctaaccccggagcaggtgggtccaatccagggcctggcctgtcgtaatgcgtaagtctgggacggaaccgactactttcgggaaggcgtgtttccatttgttcattatttgtgtgtttatggtgacaactctgggtaaacgttctattgcgtttattgagagattcccaacaattgaacaaacgagaactacctgttttattaaatttacacagagaagaattaca

SEQ ID NO: 2986 - DNA, 630 bp, unidentified
  source 1..630: mol_type = unassigned DNA; note = unclassified Picornavirales sequence
aacaaaaggctacaccacttgggctacggcccgcgccaccttgtggcgcaaagacattagaagaatagcataccgcccactagggccctgcagccagcagggtaacgggcaagcacttctgtctccccggtagaacggtataggctgtacccacggccgaaaactgaactatcgttacccgactccgtacttcgcaaagcttagtaggaaactggaaagttcgagttattgacccggagtgttccccccactccagaaacgcgtgatgagggttgccaccccgaccatggcgacatggtgggcatccctgcgctggcacgcggcctctaagaggataactcgctcctactggtaaccgaagagccccgtgagctacggtttattcctccgcctccctgaatgcggctaatcctaacccatgagcagttgccatagatccatatggtggactgtcgtaacgcgtaagttgtgggcggaaccgactactttgggatggcgtgtttccttgttttctccatttgttgttgtatggtgacaagttatagatctcgatctatagcgtttcttgagagatttccaaacatttattcaagtcgtacaattcttgtgtttaagcagtacagtgtaacc

SEQ ID NO: 2987 - DNA, 653 bp, Salivirus A
  source 1..653: mol_type = genomic DNA
tctgtcctcaccccatcttcccttctttcctgcaccgttacgcttactcgcatgtgcattgagtggtgcacgtgcttgaacaaacagctacactcacatgggggcgggttttcccgccctgcggcctctcgcgaggcccacccctccccttcctcccataactacagtgctttggtaggtaagcatcctgatcccccgcggaagctgctcacgtggcaactgtggggacccagacaggttatcaaaggcacccggtctttccgccttcaggagtatccctgctagtgaattctagtagggctctgcttggtgccaacctcccccaaatgcgcgctgcgggagtgctcttccccaactcaccctagtatcctctcatgtgtgtgcttggtcagcatatctgagacgatgttccgctgtcccagaccagtccagtaatggacgggccagtgtgcgtagtcgtcttccggcttgtccggcgcatgtttggtgaaccggtggggtaaggttggtgtgcccaacgcccgtactttggtgatacctcaagaccacccaggaatgccagggaggtaccccgcttcacagcgggatctgaccctgggctaattgtctacggtggttcttcttgcttccacttctttctactgttcgccacc

SEQ ID NO: 2988 - DNA, 675 bp, Aichivirus A
  source 1..675: mol_type = genomic DNA
cctacccaagggttacatgggaccatattcctcctcccctgtaactttaagttttgtgcccgtattcttgactccaggcggatgttgtgtcgcccgtcctgtgaacaaacagctagacactttcctcccctccctctgggctgctccggcagtccactccctccccccagcgtaacatgccccgctggagtgatgcacctggaagtcgtggacgtgggttagtaacttcggtgaaaacccactataatgacaactggttgacccccacactcaaaggactcgagtctttctcccttaaggctagcccggccacatgaatttgcagctggcaactagtgagtccaccatgtcccgcaacctcggctgcggagtgctgttccccaagcgtatgccttccttctgtaagagtgcgcctggcaagcacatctgagaagtcgttccgctgcgtcgtgccaacctggcgacaggtgacccagtgtgcgtagacttcttccggattcgtccggctcttctctaggaaacatgcgtgtaaggttcatgtgccaaagccctgcgcgcggtgttcttctactgccctaggaatgtgccgcaggtacccctacttcggtagggatctgagcggtagctaattgtctacgggtagtttcatttccatcttctcttcaggtcgacatc

SEQ ID NO: 2989 - DNA, 675 bp, unidentified
  source 1..675: mol_type = unassigned DNA; note = unclassified Picornavirales sequence
accgttacgcaccactcagttggtgtttggtggcaccaatgatggaacaaaaggctacaccacttgggctacggcccgcgccaccttgtggcgcaaagacattagaagaatagcataccgcccactagggccctgcagccagcagggtaacgggcaagcacttctgtctccccggtagaacggtataggctgtacccacggccgaaaactgaactatcgttacccgactccgtacttcgcaaagcttagtaggaaactggaaagttcgagttattgacccggagtgttccccccactccagaaacgcgtgatgagggttgccaccccgaccatggcgacatggtgggcatccctgcgctggcacgcggcctctaagaggataactcgctcctactggtaaccgaagagccccgtgagctacggtttattcctccgcctccctgaatgcggctaatcctaacccatgagcagttgccatagatccatatggtggactgtcgtaacgcgtaagttgtgggcggaaccgactactttgggatggcgtgtttccttgttttctccatttgttgttgtatggtgacaagttatagatctcgatctatagcgtttcttgagagatttccaaacatttattcaagtcgtacaattcttgtgtttaagcagtacagtgtaagg

SEQ ID NO: 2990 - DNA, 294 bp, Anabaena sp.
  source 1..294: mol_type = genomic DNA
gaatggtagacgctacggacttaaataattgagccttagagaagaaattctttaagtggatgctctcaaactcagggaaacctaaatctagctatagacaaggcaatcctgagccaagccgaagtagtaattagtaagttaacaacagataacttacagctaatcggaaggtgcagagactcgacgggagctaccctaacgtcaagacgagggtaaagagagagtccaattctcaaagccaataggcagtagcgaaagctgcgggagaatgaaaatccgttgaccttaaacggt

SEQ ID NO: 2991 - DNA, 361 bp, Hypocrea pallida
  source 1..361: mol_type = genomic DNA
gagggcaagtctggtaaacgttcgctggtgccagaaatagccagccctgtaaaatggctagtcgagtgctcgatctgtagcgggtgagcaccggcgagacaacctggatcggggaagcctaagggacctgtcacagggtcctatggtgatcccgagcagagccgcaaggcctgtgtagagcacgctaaggtgtcggtcccgtcctctgcggcggggcttaaggtacgtgccaatcccctgcgaaagctgggccctagggagtagcacccgctgtgcgaagctctaggggacctgtgcccgccgtggcgcaggccgtccgacagtcgtcagactgctcactataatggccagcagccgcggt

SEQ ID NO: 2992 - DNA, 324 bp, Bulbithecium hyalosporum
  source 1..324: mol_type = genomic DNA
gagggcaagtctggtgaactgttggtgccagagatagctgcggcccgcaacggcagctagtgggtgctcgatctgtgacgggtgagcacctgcgagacaacctggatcgggggaccctaagggcgccacgtgcgcctatggaaatcccgagcagagccgcaaggcctgtgtagagcgcgccaaggtgtcggtctgacttctgtcaggcttgaggtacgtgccgatccccagcgaaagctgggcccagtggactagcacccgtcgtgcgaagccgctggggagtccgtgatggactttagcgacaaatcggccagcagccgcggt

SEQ ID NO: 2993 - DNA, 320 bp, Mycoarachis inversa
  source 1..320: mol_type = genomic DNA
gagggcaagtctggtgaactgttggtgccagatagagccgcggccctgaacggcggctagtcgagtgcccgtcagtgacgggtgggcaccggcgagacaacctggatcgggggaccctaagggccgagaggcctatggaaatcccgagcagagcctgtagaggcctgtgtagagcgcgccaaggtgtcggtccgtccccgcggggacgggcttaaggtacgtgccgaccccccgcgaaagcggggcctaggggatgagcacccgtcgtgcgacgcccctggggagcatacgggctatgtataacggccagcagccgcggt

SEQ ID NO: 2994 - DNA, 320 bp, unidentified
  source 1..320: mol_type = unassigned DNA; note = Mitochondrion Allomyces macrogynus
tagttgaatttgtttaacaagttccggagaatagtaatattctcatgaaaatcgggtgaattgtcaaggagacctcctacaatggagatgacttgcagcgaagcttatatcagtgcttaatagatataagaacgttcaacgactaatcggtgagtagcactaacaataaaccggacactaggtggtgagtacaaccaacaataatccacccacgagcgcccgacaaccataattatggttgatgacatagtctgaacaggcaggtgactgtctgaagagaaatttaaacgatttctcgataacataattgttgtttgggg

SEQ ID NO: 2995 - DNA, 411 bp, Geosmithia argillacea
  source 1..411: mol_type = genomic DNA
ggcaccacaaggcgtaaaccattgctacagccgcagcaactctgcgccgaacagcagcccgaaagggtgatgtggtgccctctaagcggtaaatgctagtctgcccccgggcaggcgacacgctcaaattgcgggaaacccctaaagctcccagctaccaagccgccggtcgaaagacggcggtggccaggttaattgcctcgggtacggtcacaacgctgggagatgcatgggcgatccgcagccaagcccctacgtccccccggggatacggggaaggttcagagactagatgggcgtgggttgaccgggaggggggcgtgtccccccccgggcggcttaagatatagtccggcaccgggagagatcccggtggtcaggtccacctgtaacacgggagcctgcggctta

SEQ ID NO: 2996 - DNA, 440 bp, Stephanoascus ciferrii
  source 1..440: mol_type = genomic DNA
aggctgaaacttaaaggaattgacggaagggcaccaccaggagtaaacttttacagctagccgcagtaactctgctccaaaaagcagcctgaaagggttagtggtgtcttcttttaattgctagtcgatatttttgtatcggcaacacgctcaaattgcgggaaattcctaaaggctttattaccaagctaacattgaaaggtgttggtggccgagcgaaatgccctgggtatggtaaaaacataaagcatgttacaatggatgatccgcagccaagctcctaagttcttgaaaaaaggatatggagaaggttcagagactaaatgggtgtgggtgtttgtaacgcttaagatatagtccgtccatgactgaaaagtcaatggtggtaaccttaaaacgggagcctgcggcttaatttgactcaacacggggaaactcac

SEQ ID NO: 2997 - DNA, 391 bp, Coxiella burnetii
  source 1..391: mol_type = genomic DNA; note = RSA 493
tggggttagccctcgggcgaagctcttgatcgaagccccggtaaacggcggccgtaactataaattaaccgttgtagttacgtaaataaacttggctatatgctggaaactccgagtatcctccagtactcatctcaactaaaattgaggtagtaaaaatctgcgaggtgcggacaatcagcaggaaagactaatctttttgattagaatcctcagagactaatacgccgagcgtacttagaaaaaatccattctaagtgtgatgatagagtccgatctctatagcgatatagagggttttcaaaagaaacctgttaatcattatcccatgattaacataacgtcaataaacggtcctaaggtagcgaaattccttgtcgggtaaaaaatt

SEQ ID NO: 2998 - DNA, 267 bp, Agrobacterium tumefaciens
  source 1..267: mol_type = genomic DNA
gagcacaggattcctaaggtaaattgggggttgcgcccggaaacgacgcaatcgatctgctcaaagtcggggaaagcttcgctggtcttccagtatgccaatcccgagccaagctccggagaaatccggtgaaggtgtagagactggatgggcagcacctaaaggccgcaaggtccacggtgaagggacagtccagaccacgaacgcccttatccgattgagatgggcggcggcgaaagccgaagcggtatgaatcctggggtcgga

SEQ ID NO: 2999 - DNA, 408 bp, Ankistrodesmus stipitatus
  source 1..408: mol_type = genomic DNA
atgggtgaaagcactattgcccatcatagcagctgtccacaaagcagtctgctagtcgtcgttgcaccgctttgcaaggcgcaacgcacggcgagaccgtcgaattgcggggacatccttacagctcaagctaccaacttgtcgcagaaatgctggcaagggccggggtaatgacccagggtatggtaaaaacgcttgagattggataatccgcagccaagcaccttacccggattcaacgtccggaaaggtgaaggttcagagactaggtggcggtcggtcacgagacgtggcttaagatagagtccgttcgcgctgaaaagcgttcgtcgggaagaaagccttagcaaggccggagccagacgaagggtagccattattggctgcctcgaggtacacgggtggtgc

SEQ ID NO: 3000 - DNA, 445 bp, Monacrosporium leptosporum
  source 1..445: mol_type = genomic DNA
tttagaggaagtaaaagtcgtaacaaggtttgaagtatgacccttctgtggtgacacttacgagaagcctttgcggccccgcaaggggtaccggccgcgactataaatgaaaggcaagccggcattaaatcgcaagtcagctcagctggctacactttcgaattgcgggaaacccctaaagccgacctctaccaactgttcagggaaacctggatggggcctgtgctaacatcacagggtacggtaacaatgaggaggatatatgggcaatccgcagccaagtccctaaggctctcgagctatgggaaaggttcacagactaagtggaagtgggttggggcggttgtaatccgccccggcttaagatatagtcgggctgtccgcgagagcagacaggatgtcacaaatcaaccgttccgtaggtgaacctgcggaaggatcatta

SEQ ID NO: 3001 - DNA, 277 bp, Nostoc sp. F
  source 1..277: mol_type = genomic DNA
agataactgagccttgaaggagaaatccctcaagtggaagctctcaaactcagggaaacctaaatctggtgacagacatggcaatcctgagccaagcccaaaaattttagatttgcgattagtcttaaattcaaaatctaaaatccaaaattacgggaaggtgcagagacccgacgggagctaccctaacgtgaagtcgagggtaaagggagagtccaattctcaaaacctgatttggcgattgccagcaagtagcagtgaaaactgcgggagaatg

SEQ ID NO: 3002 - DNA, 272 bp, Nostoc sp. C
  source 1..272: mol_type = genomic DNA
agataactgagccttgaaggagaaatccctcaagtggaagctctcaaactcagggaaacctaaatctggtgacagacatggcaatcctgagccaagccgaaaaaagtcgtgagtgcagagtaaattaaaactcttaactcctaactattcggaaggtgcagagacccgacgggagctaccctaacgttaagtcgagggtaaagggagagtccaattctcaaaacctgatttggctattgctatcaggtagcagtgaaaactgcgggaggatg

SEQ ID NO: 3003 - DNA, 439 bp, Monoraphidium terrestre
  source 1..439: mol_type = genomic DNA
ggagaagtcgtaacaaggtttccgttgaattcactagcggataacagctgccctgaaaggggtggctagtcattgatagctcatgatggtgagggctttcaattggcaacactgtcgaattgcgggaaattccttacagttctcactaccaagccttcgtggaaacacagtcggtggcctagggtaatcacctagggtatggtcaaaacgtgagggattggaaaatccgcagccaagctcctaaaggcgacatgacctatggagaaggttcagagactaggtggcagtgggctagttgctgcgtgcaattagtttaagatagagtccggccctaccgtgaggtagcctcaagacgaaaggactaaccagcccagagcttgaggagctgatgtgttacgtatcagtgggatcaaccgaggtgaacctgcggaaggatcat

SEQ ID NO: 3004 - DNA, 450 bp, Arxula adeninivorans
  source 1..450: mol_type = genomic DNA
cagaaaagttaccacagggatgtgctaagtctattaagacaaatttacaacataacgtcccaggcatcgactcccattgatgcctagtccggctatagcttacttgtgcttgctatagttagctctctagaagagtgtaagggcaacacgtctggatgcggggaactctcgctaggtctttggtaccaaacattggcggtaacaccccaatgtagagtctgttggggcagacgggtaaaaatccaaagaatagagacaatccgcagctgacctggccaaaagtatatttacaaagtagctaggcagttcaacgctcgctaagatgtgggttgaccattaatggtcggcttaaggtacgggctacgccacccgagagggtgcaactacctaccgggcgcacaacctgagaagtagttggtcatggtagtacggaactggcttgtggcagtc

SEQ ID NO: 3005 - DNA, 411 bp, Penicillium oblatum
  source 1..411: mol_type = genomic DNA
gaaagttaggggatcgaagacgatttaaggaagcctcccggcctggtttccgtggaaatcaggccggagatggtatttggtcgtccaaagtaagcctgaaaggacttgctagtctcggccgtggccgaggcgacaccgtcaaattgcggggacctcctaaagcctggactaccaagccgacgccgaaaggcgccggtggccggggtaatgacctagggtatggtaacaacgtccgggatgtgacaatggacaatccgcagccaagcgctaccgcccctccggggaccacgcgtgcagttcacagactagatgtcggtgggggatccgtctcctaagatatagtcgaggcccagcgcgaaagcctgggagtatccgcagataccgtcgtagtcttaaccataaactatgccg

SEQ ID NO: 3006 - DNA, 282 bp, unidentified
  source 1..282: mol_type = unassigned DNA; note = Twort
aactactgaaagcataaataattgtgcctttatacagtaatgtatatcgaaaaatcctctaattcagggaacacctaaacaaactaagatgtaggcaatcctgagctaagctcttagtaataagagaaagtgcaacgactattccgataggaagtagggtcaagtgactcgaaatggggattacccttctagggtagtgatatagtctgaacatatatggaaacatatagaaggataggagtaacgaacctattcgtaacataattgaacttttagttattt

SEQ ID NO: 3007 - DNA, 431 bp, Cryptodiaporthe corni
  source 1..431: mol_type = genomic DNA
gagcatgggggcgaaagactaatcgaactgttgacgcacgagagtgtgggcacaccgtatgaaaattcgttttcgcgggctgctaggcagttaagagtccggccgtaaggcagggctagtaggcttcagagaggcctgcgacaccgtcaaattgcggggacaccccattagaaagctgcgctaccgcctacggctcgaaagagctgtcaggcaccaggtgtaacggcctgggtatggtaataacgcgtgtacgcaaggggcaatccgcagccaatccctaacccacctctataggtggtatggaggcagttcacagactagacggcggtgggcaccgttacagaaggtgcttaagatatagtcgagtcccgcctagcaataggtgggtagtttaacgctagtagctggttaccgccgaagtttccctcagg

SEQ ID NO: 3008 - DNA, 267 bp, Pleurocapsa sp.
  source 1..267: mol_type = genomic DNA
acggacttaaaaaaattgagccttggcagagaaatctgtcatgcgaacgctctcaaattcagggaaacctaagtctggcaacagatatggcaatcctgagccaagccttaatcaaggaaaaaaacatttttaccttttaccttgaaaggaaggtgcagagactcaacgggagctaccctaacaggtcaagctgagggtaaagagagagtccaattctcaaagccagcagatggcagtagcgaaagctgcgggagaatgaaaatccgt

SEQ ID NO: 3009 - DNA, 447 bp, Spizellomyces punctatus
  source 1..447: mol_type = genomic DNA
cgttgattacgtccctgcccttttccttgatggtacaaggggctaaatgtgctcccgaaaggaatgcgcaagtcttcagtggcaccgaaggcaacactgtcaaattgcggggaagccctaaagctttgtctaccaagcagggatggaaacatttctgtggccagggtaatgacctcgggtatggtaaaaacggcaaagatagaacaatgggtaatccgcagccaagtcctaaacttgcacccagctggggcaagcatggatgcagttcacagactaaatggcagtgggctctgcgatagagattattgcggggcttaagatatagtcggacccaccgcgagagcggttctctagatgaagctcagtgatttccaggtgcctgaagaactgatcctgagcccgagctagagtgtaaagggagcatcgttgtacacaccgcccgtcgct

SEQ ID NO: 3010 - DNA, 359 bp, Chlamydomonas moewusii
  source 1..359: mol_type = genomic DNA; note = Z17234
caggcttagttgtaggcctcctattaggcaactaatgggctaacattgggtgaattgcatgaaagctaaggcgtaacgctatgctaacctgcagcgaattacatcgactgatattaatataaaaatagatgtacacgttcaacgactagcgagtgatgtaaatcagtcaaataatctcgccacgagcgcccgacatcttgatatttacttagacccccgcttaagtaaatatggccaagatgatgacatagtctgagcaacgtggaaacacgttggagccaaagataaaaaactttggcacatttctgaaacatgaaatgttcacgttaaaaaaaataaaaacgtgaaaaacataactg

SEQ ID NO: 3011 - DNA, 439 bp, Kirchneriella aperta
  source 1..439: mol_type = genomic DNA
ggaattgacggaagggcaccaccaggcgttaaaatagctctagcgccttagagtctcctcgagaggggaggctagtctgtagtggctcacatcggtgagagcttctatcaggctacactgtcgaattgcggggaaatccttatagctcaagctaccaagccaggatggaaacattctggtggcctggttaatgacccagggtatggtaacaacgcttgagattggacaatccgcagccaagcttcccaccaggtaatgctgaggaagacggttcagagactaagtggcagtgggcgggtgcaaacctgcttaagatagagtccgtccctaccgaaaggtagctctgagaggaaaggcccaaccagcctaaagctcagagagcttgcttgagcaagtgggagtaaacgggagcctgcggcttaatttgactcaacacggg

SEQ ID NO: 3012 - DNA, 384 bp, Pneumocystis carinii
  source 1..384: mol_type = genomic DNA
taaacggcgggagtaactatgactcaccttctgagggtcatgaaagcggcgtgaaaacgttagctagtgatctggaataaattcagattgcgacactgtcaaattgcggggaagccctaaagattcaactactaagcagtttgtggaaacacagctgtggccgagttaatagccctgggtatagtaacaatgttgaatatgaatcttttgcgagatgaaatgggtgatccgcagccaagtcctaagggcatttttgtctatggatgcagttcaacgactagatggcagtgggtattgtaaggaattgcagttttcttgcagtgcttaaggtatagtctatcctctttcgaaagaaagagtatattgtgctcttaaggtagccaa

SEQ ID NO: 3013 - DNA, 400 bp, Panellus stipticus
  source 1..400: mol_type = genomic DNA
ccaccaggtgtaaacttgttagccacagttaactctgcactaaaaagcagccctaacgggtgaggtggttcagccctagagtgcgcaatgactcttaaatctaaatgctagtctgtgcatccttgtgttgcacgggcgagaccttcaaactgcgggaaactccttagagctttcactaccgctgctatcactgaaaagtgtagtctgcaccagggtaatgacctcgggtatggtaataacgtgaaagattggacaatccgcagccaagtccctaaaggtagttattgacctacgggaaaggttcagagactagatggaggttggtcaactaagttggcttaaggtatagtccgtctctgcatgaaagtgcaagaggtttgaaatgggagcctgcggctta

SEQ ID NO: 3014 - DNA, 396 bp, Dunaliella parva
  source 1..396: mol_type = genomic DNA
accaggcgttaaaaagcagactcagcgcctaagagtcagtgggaaaccattggctagtgcttgggtttcattactcaagtgcaacactgatcaaattgcgggaaagccctaaagctttgctaaccaagctaagtgtgaaagcactcagtggccgggttaaagacctcgggtatggtaaaatcagcaaagatgcaacaatgggcaatccgcagccaagctcctgaagccttataggcaatggagaaggttcagagactaaatggcagtgggccaacttgttggcttaagatatagtccgtcccagctgaaaggctgtctgctagaggaagacctttctaggtctgagagctagtagagggtaggagaagtctctcctacctggaggaaacgggagcc

SEQ ID NO: 3015 - DNA, 217 bp, Azoarcus sp.
  source 1..217: mol_type = genomic DNA
ctcatatttcgatgtgccttgcgccgggaaaccacgcaagggatggtgtcaaattcggcgaaacctaagcgcccgcccgggcgtatggcaacgccgagccaagcttcggcgcctgcgccgatgaaggtgtagagactagacggcacccacctaaggcaaacgctatggtgaaggcatagtccagggagtggcgaaagtcacacaaaccggaatccgt

SEQ ID NO: 3016 - DNA, 424 bp, Ditopella ditopa
  source 1..424: mol_type = genomic DNA
gagcatgggggcgaaagactaatcgaactgttagctactaggcagttaagagtctcccagtaatgggaggctagtaggctctttttcagagtttgcgacaccatcaaattgcggggacaccctgttataacgctatgataccgcgcctcgtggaaacacagagagtagcactaggtgtaacggcctaggtatggtaaaaagtcattagctaggggcaatccgcagccaagccctacgtcttcggatatgggtgcagttcacagactaaacgttggtgggcttagaatctgtattctaggcttaagatatagtcgaatccgcctagtaataggtgggtatcaaatgaataggtgcaaaaacttgtttatttgactacagcagaaatgctagtagctggttaccgccgaagtttccctcaggatag

SEQ ID NO: 3017 - DNA, 264 bp, Anabaena sp.
  source 1..264: mol_type = genomic DNA
cggacttaaataattgagccttagagaagaaattctttaagtggatgctctcaaactcagggaaacctaaatctagctatagacaaggcaatcctgagccaagccgaagtagtaattagtaagttaacaacagataacttacagctagtcggaaggtgcagagactcgacgggagctaccctaacgtcaagacgagggtaaagagagagtccaattctcaaagccaataggcagtagcgaaagctgcgggagaatgaaaatccg

SEQ ID NO: 3018 - DNA, 442 bp, unidentified
  source 1..442: mol_type = unassigned DNA; note = chlamydomonad_sp._NDem2_24P_3d
gttatagtttatttgatggtactcttactcggataaccaagcaaaaggttagtccgtgtcagtttaaacgactggcaagtcgattctattggatcggcaacaccatcgaattgcgggaaagtccttagagccagtgctaccaagctggagtggaaacacaccggtggccagggtaatgacctcgggtatggtaaaaacgcactggattggataatccgcagccaagctcctaagggtagcattgcctatctatggagaaggtccaacgactaagtgttggtgggctggtagcaaaccggcttaagatatagtctggccctgctgagaggcagccttgggattaaaggcttaaacagcccggagcccaaggggttggagcacatgctctgaccggaacaaccgaaccgtagtaattctagagctaatacgtgcgtaaatcccg

SEQ ID NO: 3019 - DNA, 217 bp, Azoarcus sp.; identical to SEQ ID NO: 3015
  source 1..217: mol_type = genomic DNA

SEQ ID NO: 3020 - DNA, 400 bp, Penicillium sabulosum
  source 1..400: mol_type = genomic DNA
gaaagttaggggatcgaagacgatttagggccctcccggcgtccgccgacgccgggggatggtatttggtcgtcaaaagtaagctgaaaaggtcttgctagtcccggccgcggccggggcgacaccgtcaaattgcggggactccctaaagcctgaactaccaagccgacgccgaaaggcgccggtggccggggtaatgacctagggtacggtaacaacgttcaggatgtgccaatgggtaatccgcagccaagcgctaccgcccgtcccgggccacgcgtgcagttcacagactagatgtcggtgggggatccgtcccctaagatatagtcgagccccggagcgaaagcccggggaggatccgcagataccgtcgtagtcttaaccataaactatgccg

SEQ ID NO: 3021 - DNA, 429 bp, Ustilago maydis
  source 1..429: mol_type = genomic DNA
accaggagtaaactttcacagctagccgcagtgtctctgctccaaaaagccgcctgaaagggtcggtgcgtgttcctatttgaaataatggctagtctgatgcgaatcaggcgacacatccaaattgcgggaaactccttagagctctagctaccgcggccccatcgtgagattagggtgcagcaccaggttaatggcctcgggtatggtaaaaacgctagagattggacaatccgcagccaagcctcttcgcaagaagtggaaggttcagagactaaatggttgtgggtggcagacggtttcgcgaatgtatgaatcaatcataaacacgtgaaggaagtctgctgcttaagatatagtccgagccacagggaaaccttgggaattttggcaacaaaccgaaacagataaataacatcgggagcctgc

SEQ ID NO: 3022 - DNA, 442 bp, Pleurastrum paucicellulare
  source 1..442: mol_type = genomic DNA
ccaggcgtaaaaccaagccgtttggctctgcgccagtcgggtgtgaggagggcctcaaacaagctcctcacacgagaaacccggctagtcctggtgcggcttgcatcgcgccgccgcacctgggcaacatcatcgaattgctggaaacccctaaagctcttggtaccaacctgcatgggaaaccgtgcgggggcccactccggggaggttataatccaagagatgcaacaatgggcaatcagcagcgaagaccctgtcggttgggacttgcgtcccggcccatgggtaacgttcagagactaagtggtgatgggccccgatgccacccggcctcggggcttaagatatagtccggccccggcgaaagccgatgtcgagatgagggggtgcgaccccagagctcggcagtagggatcagagttcctgctctaatgtnggagcg

SEQ ID NO: 3023 - DNA, 420 bp, Macropharyngomonas halophila
  source 1..420: mol_type = genomic DNA
agtacaaggaagcggaaggctataacaggtttaaaggcttgagtggcgcgaaagcgaccgctttgtggctacaaagtcgcgacaccgtcaaattgcgggaacaccctaaagcttcaactaccaagcgtatgtggaaacacttgcgtggccagggtaatgacctcgggtatggtaaaaacgttgaagatgaaacaatgggcaatccgcagccaagccctaaagggatttttcctaagggtgcagttcacagactagatgtcggtgggtagagtcgtactctgcttaagatatagtcgaggccaccgtgaaaacggtgcacagtggaggaaattcggggtaactcctggatggagagccgctgtgggtagacaaaagtctactggtaacctgctgtaatgcccttagatgttctgggctgca

SEQ ID NO: 3024 - DNA, 298 bp, Nostoc sp. A
  source 1..298: mol_type = genomic DNA
agataactgagccttggaggagaaatccctcaagtggaagctctcaaactcagggaaacctaaatctgacaacagacatggcaatcctgagccaagcccaaaaattttagatttgtgattttagatttacgattagtcttcaatccaaaattcaaaatctaaaatccaaaattgcgggaaggtgcagagacccgacgggagctaccctaacgttaagtcgagggtaaagggagagtccaattcttaaaacctgagctggctattgccattaggtagcagtgaaaactgcggaagaatg

SEQ ID NO: 3025 - DNA, 322 bp, unidentified
  source 1..322: mol_type = unassigned DNA; note = Nostoc sp._Nephroma resupinatum
agataactgagccttgaaggagaaatccctcaagtggaagctctcaaactcagggaaacctaaatctggttacagacatggcaatcctgagccaagcccaaaagttttagatttgcgattttagatttgcgattaatcttcaatccaaaattcaaaatcgttcgactgagcgaagccgaagtctaaaatccaaaattgagggaaggtgcagagacccgacgggagctaccctaacgttaagtcgagggtaaagggagagtccaattctcaaaatctgatctggctattgtcatcaggtagcagtgaaaactgcgggagaatg

SEQ ID NO: 3026 - DNA, 331 bp, Nostoc sp. J
  source 1..331: mol_type = genomic DNA
agacgctncggacttaaataattgagccttgaaggagaaatccctcaagtggaagctctcaaactcagggaaacctaaatctggtgacagacatggcaatcctgagccaagccgaagaaagtcctgagtcatgagtgctgagtgctgagtaaatttaaaactcttaactcctaactcctaactcataactgttcggaaggtgcagagacccgacgggagctaccctaacgttaagtcgagggtaaagggagagtccaattctcaaaatctgatctggctattgtcatcaggtagcaatgaaaattgcaggagaatgaaaatccgttgaccg

SEQ ID NO: 3027 - DNA, 350 bp, Cordyceps capitata
  source 1..350: mol_type = genomic DNA
aattggagggcaagtctggtgaacgtcgctggcgccagagatagccgccctcggtaaacaaccggctagtcgagcgctcgttgcgtgacgggtgagcgccggcgagacaacctggatcggggaaggctaagggccccgcgggcctacgctgatcccgagcagagccacgcccggtggcctgtgtagagcgcgccaaggtgtcggtcccgaggtctcctcggggcttaaggtacgtgccaatcccctgcgaaagcagggccctgcggaacagcacccgtcgtgcgaagccgcagggagcccccctccccgggggggcgtgtgctacaggccagcagccgcggtaattccag

SEQ ID NO: 3028 - DNA, 270 bp, Nodularia sp.
  source 1..270: mol_type = genomic DNA
acggacttagaaaactgagccttgatcgagaaatctttcaagtggaagctctcaaattcagggaaacctaaatctgtttacagatatggcaatcctgagccaagccgaaacaagtcctgagtgttaaagctcataactcatcggaaggtgcagagactcgacgggagctaccctaacgttaagccgagggtaaagggagagtccaattctcaaagccgaaggttattaaaacctggcagcagtgaaagctgcgggagaatgaaaatccgt

SEQ ID NO: 3029 - DNA, 436 bp, Dactylella copepodii
  source 1..436: mol_type = genomic DNA
gtcgtaacaaggttgaagtaagatccttctacagtgacacttacgagaagcctttgtggccccgcaaggggtacctgccgcgactataaacaatgcaagtgggtattaaatcgcaagtcagctttagctggccacactttcgaattgcggggaaaccctaaagctcaccataccaaccagcctgggaaatcaggttggggcccgtgctaactccacgggatatggtaataatgggatgagatgtaacaatgggcaatccgcagccaagtccctaaggtcttgtccagactacgggaaaggttcacagactaagtggaagtgggccggagtttgtaccctccggcttaagatatagtcgggctgcctgtgagagcaagtgggaagtcacagttgcacttcaaaccgttccgtaggtgaacctgcggaaggatcatta

SEQ ID NO: 3030 - DNA, 299 bp, Prochlorothrix hollandica
  source 1..299: mol_type = genomic DNA
agacgctgcggacttagataaactgggccttggtggagaaatccgcgaagtgtaagctctcaaattcagggaaacctaaggccaagggctagggcaatcctgagccaagctgagggatcaaccacccctaggggcgttgaccttcggaaggtgcagagactcgacgggagctaccctaacaggccgtctgccaaggcaggcgatcgctgagggtaaagggagagtccaattctcaaaacctctggcaccacgtcaggggcaacagtgaaagctgtgggagaatgaaaatccgttgaccg

SEQ ID NO: 3031 - DNA, 392 bp, Protomyces pachydermus
  source 1..392: mol_type = genomic DNA
ttgacggaagggcaccaccaggagtaaacgtttatgtcgcagttaactctgctccgaaaagccactcgaaagagtgtggtgtccttagaggctagtcagtccgctggcaacacaatcaaattgcgggaaactccttagagctcaagctaccgctgctgcccagagatgggctgtggcaccaggttaacgacctcgggtatggtaacaacgcctgagattggacaatccgcagccaagctccctcatgggaagaaggttcagagactagatggttgtgggttgaacacgtttatctgaagtatttgaacggttcggcttaagatatagtccaatccaatgtggaaacgcactggtctgaaagatagaaaatgggagcctgcgcttaatttgac

SEQ ID NO: 3032 - DNA, 430 bp, Monacrosporium bembicodes
  source 1..430: mol_type = genomic DNA
gtcgtaacaaggtttggaatataagatccttccgtgacgcttatgagaagcctttgtggccccgcaaggggtacccgccgcgactgtaaaaaaggatgcaggtattaaatcgcaagtcagcctttggctggccacactttcgaattgcggggatgccctaaagccctcctctaccaaccaagctgggaaacctgcttggggcccgtgttaacggcacggggtacggtaacaacgaggttggataggtgggtaatccgcagccgagtccctaaggcaagccgctatgggaaaggttcacagactaagtggaagtgggctggatgctccagcttaagatatagtcgggctgttggcgagagcgaacagatctgtcacttcatcatgattagtgcaaaaccgttccgtaggtgaacctgcggaaggatcatta

SEQ ID NO: 3033 - DNA, 338 bp, Tilletiopsis oryzicola
  source 1..338: mol_type = genomic DNA
gaggcaataacaggttaacctatcacaggcctgtaacagctgcgaggcagctagtccagcgtcgacgtctgcatttggggcagatggggtctgtttagaccttggcgcgggcgacacaacctggtacaggaaacgccccggcagcaatgccaggccgatcctgtggcgagctctgcgaggagccgtcgcaacgtgcggaaaggtgtgggtctttctaggaaaggcttaaggtacgtactaatccccggggaaacccggcctctgcgagaagagcccaaactctatgcgcagggggaggcaacggtgttgccttggtatacatgctgtgatgcccttag

SEQ ID NO: 3034 - DNA, 382 bp, Protomyces inouyei
  source 1..382: mol_type = genomic DNA
acggaagggcaccaccaggagtaacgtttatgtcgcagttaactctgctccgaaaagccactcgaaagagtgtggtgtccttagaggctagtcagtacgctggcaacacaatcaaattgcgggaaactccttagagctcaagctaccgctgctgcccagagatgggttgtggcaccaggttaacgacctcgggtatggtaacaacgcttgagattggacaatccgcagccaagctccctcatgggaagaaggttcagagactagatggttgtgggttgaacacacgtttaattgaaacagttcagcttaagatatagtccaatccagtgtggaaacgcactggtctaaaagatagaaaatgggagcctgcggcttaatttga

SEQ ID NO: 3035 - DNA, 442 bp, Artomyces pyxidatus
  source 1..442: mol_type = genomic DNA
ttgacggaagggcaccaccaggagtaaacgcaacagcttagccgcagtggctctgctccgaacagcagcccgaaagggtgaggtggtttaaaagccttgaggttcgatccgaggacctctaaagcgaaatgctagtctccctcgtggggggcgacaccttcaaattgacggggaactcctaaagctcagagcaccaagcttcgttccgaaagggcggggtggccaggttaatagcctcgggtacggtaaaagactctcgagatgttacaatggacgatccgcagccaaggccctacggcttcccttcgcggggtgagctacgggacaggttcagagactagatggaggtgggtcgtcgcgcgtcgacggcttaaggtatagtccgttcgcgagcgaaagctcgatgaggtttaggtaaacccgcctttgacaaaacacggga

SEQ ID NO: 3036 - DNA, 270 bp, Nostoc sp. B
  source 1..270: mol_type = genomic DNA
agataactgagccttgaaggagaaatccctcaagtggaagctctcaaactcagggaaacctaaatctggtgacagacatggcaatcctgagccaagcccaaaaattttagatttgcgattagtcttaaatctaaaatccaaaattgcgggaaggtgcagagacccgacgggagctaccctaacgttaagccgagggtaaagggagagtccaattctcaaaacctgagctggctattgccatcaggtagcagtgaaaactgcgggagaatg

SEQ ID NO: 3037 - DNA, 447 bp, Fusarium solani
  source 1..447: mol_type = genomic DNA; note = f. sp. phaseoli
ggcaccaccaggggtaaactacaacggtttctcgaaagccgcagttaactctgctcctaaaagccgctctaacgagttgatggtgttccctggctcaggcctaaactaatggctagtctcctcggaggcgacatcctcaaactgcgggaaactcctaaagctcacactaccaagcaggcctcgaaagagagctctgtggccggggtaacgacctagggtacggtaaaaacgtgtgagatgctacagtggacgatccgcagccaagcccctacgtgcgccagcatacggggaaggttcagagacttgacgggggtgggtgggctacaggcctgcctaagataaagtccggccccgcgtgaaagcgctgggggttacaactgcttctgcactattcgaaatactgcatcgaggccccagtaaaacgggagcctgcggcttaatttgact

SEQ ID NO: 3038 - DNA, 298 bp, Nostoc sp. I
  source 1..298: mol_type = genomic DNA
agataactgagccttgaaggagaaatccctcaagtggaagctctcaaactcagggaaacctaaatctggtgacagacatggcaatcctgagccaagcccaaaaattttagatttgtgattttagatttatgattagtcttcaatccaaaattcaaaatctaaaatccaaaattgcgggaaggtgcagagacccgacgggagctaccctaacgttaagtcgagggtaaagggagagtccaattctcaaaacctggccttgctaaagccatcaggtagcagtgaaaactgcgggagaatg

SEQ ID NO: 3039 - DNA, 375 bp, Pneumocystis carinii
  source 1..375: mol_type = genomic DNA
aactatgactcaccttttgagggtcatgaaagcggcgcgaaagtgttagctagtgatccgaaaaataaattcgggttgcgacactgtcaaattgcggggagtccctaaagattcaactactaagcagcttgtggaaacacagttgtggccgagttaatagccctgggtatagtaacaatgttgaatatgactcttaattgaggaaatgggtgatccgcagccaaatcctaaggacattttattgtctatggatgcagttcagcgactagacggcagtgggtattgtagagatatggggttatttatggccttatctacaatgcttaaggtatagtctaatctctttcgaaagaaagagtagtgtgctcttaaggt

SEQ ID NO: 3040 - DNA, 442 bp, Trebouxia gelatinosa
  source 1..442: mol_type = genomic DNA
aggtttccgtaggtttnantatgcggataaaagcaggcttgaaaagagtttcctgctagtacctaactttttaagtaaggtgcgacattgtcaaattgcctggaaatcctgtcaagcccctggtaccgctcatcttgaggaaactctggtgtgcacctcggtgaaagtcgagggtatggtaataatccagcgggataaggacaataggcagccaactgctaaagancccgaaggccctcangcaggcagtccacagactaaatggcaatgggtcaaggagcattaactgctcattggcttaagatatagtcggtcctcgctgaaaagcggccaatgagaggaattctctttgagaaggagagctcattggagtttgggtaatactctgcaatgcaaattgtatgagggcaataagcctccaaactgggtgaaacgaggtgaa

SEQ ID NO: 3041 - DNA, 420 bp, Bionectria aureofulva
  source 1..420: mol_type = genomic DNA
aattgacggaagggcaccaccaggggttaacagaccgcagtcgctctgcccctaaaagcagccgggaaactggttaaggtgggagtccttggccggaaggccgaaaactgctagtcatcgaacgatggcaacaccctcaaactgacgggaacgtcctaaagctgatcaacaccaagcaagtgtccgaaaggtgcttgtggccgagctaatagccctgggtatggtaaaagcttgatcanatgctacaatggataactcgcagccaagcccctaagtagagcgatctatacggggaaggttcagagacttaacgggggtgggtgtggtgtanaccatgcctaagataaagtccgtccgcctgcgaaagcttgcgtagaaaaccgtaaaaacgggagcctgcggcttaatttgactcaacac

SEQ ID NO: 3042 - DNA, 448 bp, Pleurastrum paucicellulare
  source 1..448: mol_type = genomic DNA; note = SAG 463 1
gattctgtgggtgaacggtgtccgtgacactactgccccagcgggtgaaagcctacgctagtcgtccttgctcgacccaaattgctatagcaagggaacggcgagaccatcgaattgcgggaaccccctaaagcttgcaccaccaaggcatgcgggaaaccgacatgctggccagggtaatgacctcgggtacggtaaaagcgtgcaagatgcaacaatgggcaatccgcagccaagcgccctaacaggtaatgctgagggtgaaggttcagagactaagtggtggtcggtgccggagcctgtgtgccccggtgcttaagatatagtccggcactacggaaacgtagccacgagaggaaaggccagcagcgcccggagctcgtggaggctgtcggtgctccgctcaccgggantgtgactaatcgatgtgattttgtgggtggtgcat

SEQ ID NO: 3043 - DNA, 443 bp, Dunaliella salina
  source 1..443: mol_type = genomic DNA
gacggaagggcaccaccaggcgttaacttagcagcaagctcagcgcctcaaagtcgaagggaaacctttggctagtatctgggtgtagatttcacctaagtgcaacactgttcaaattgcgggaaagccctaaagctttgctaaccaagctgtcctagaaatgggatggtggccaggtgaaagaccttgggtacggtaaaatcagcaaagatgcaacaatgggcaatccgcagccaagctcctacgggctgtcaaagcctatggagaaggttcagagactaaatggcagtgggcaagcatggcaatgcttgcttaagatatagtccgtcccagctgagaagctgcctatgagaggaatgccgtaaggcaggagagctaataggaagtaagtgtctttaatcaacttacttggattccacgggagcctgcggcttaatttgact

SEQ ID NO: 3044 - DNA, 380 bp, Protomyces macrosporus
  source 1..380: mol_type = genomic DNA
cggaagggcaccaccaggagtaaacgtttatgtcgcagttaactctgctccgaaaagccgctcgaaagagtcatggtgtccttgaaggctagtcagttcgctggcgacatttccaaattgcgggaaactccttagagctcaagctaccgcctctgtttagtgatagacagctggcaccgggttaacgacctcgggtatggtaaaaacgtttgagattggacaatccgcagccagcttccttgagaggaagaaggttcagagactagatggatgtgggtgaagtctttggatatgaagattttgcttaagatatagtccaatccaaagcggagacgcattggttacaacaagtagaaaatgggagcctgcgcttaatttga

SEQ ID NO: 3045 - DNA, 276 bp, Planktothrix sp.
  source 1..276: mol_type = genomic DNA
acggacttaaagataaattgagccttgaggcgagaaatctctcaagtgtaagctgtcaaattcagggaaacctaaatctgtaaattcagacaaggcaatcctgagccaagcctaggggtattagaaatgagggagtttccccaatctaagatcaatacctaggaaggtgcagagactcgacgggagctaccctaacgttaagccgagggtaaagagagagtccaattctcaaagccaattggtagtagcgaaagctacgggagaatgaaaatccgt

SEQ ID NO: 3046 - DNA, 417 bp, Bionectria ochroleuca
  source 1..417: mol_type = genomic DNA
aattgacggaagggcaccaccaggggttaacagaccgcagtcgctctgcccctaaaagcagccgggaaactggttaggtgggaaagtccttggccggaaggccgaatactgctagtcatcgaacgatggcaacaccctcaaactgacgggaacgtcctaaagccgatcaacaccaagcaggcgtccgaaaggtgcctgtggccgagctaatagccctggagatggtaaaagcttgatcggatgctacaatggataactcgcagccaagcccctacgtgttccgacatacggggaaggttcagagacttaacgggggtgggtgtggtgtagaccatgcctaagataaagtccgtccgcctgcgaaagcttgcgaatacaaccgtaaaaacgggagcctgcggcttaatttgactcaac

SEQ ID NO: 3047 - DNA, 369 bp, Prochlorothrix hollandica
  source 1..369: mol_type = genomic DNA
gtcaacccgtagaccatcaggggggcgtggcggaatggtagacgctgcggacttagataaactgggccttggtggagaaatccgcgaagtgtaagctctcaaattcagggaaacctaaggccaagggctagggcaatcctgagccaagctgagggatcaaccacccctaggggcgttgaccttcggaaggtgcagagactcgacgggagctaccctaacaggccgtctgccaaggcaggcgatcgctgagggtaaagggagagtccaattctcaaaacctctggcaccacgtcaggggcaacagtgaaagctgtgggagaatgaaaatccgttgaccgtgaggttcgtgagggttcaagtccctccgcc

SEQ ID NO: 3048 - DNA, 439 bp, Dactylella huisuniana
  source 1..439: mol_type = genomic DNA
gtcgtaacaaggtttgaagtaagtatccttccgagggtgacgctcacgagaagcctttgtggccccgcaaggggtacccgccgcgactgtaaagaatgaaagcaggtattaaatcgcaagtcagctctgctggccacactttcgaattgcggggacaccctaaagcctgcctctaccaaccgatcggggaaacctgaacggggcctgtgctaacgacacagggtacggtaacaacgaggaggatgcgaagaaatgggcgatccgcagccaacccctaaggcctgaaaaaggctacgggagaggttcacagactaagtggaagtgggctggaggtgttgaaaacctccggcttaagatatagtcgggccctgcgcgagagcgcgggggagtcacaactggactgaaccgttccgtaggtgaacctgcggaaggatcatta

SEQ ID NO: 3049 - DNA, 434 bp, Graphium putredinis
  source 1..434: mol_type = genomic DNA
aaattgacggaagggcaccaccaggggttaacgtctaactgttaagccacagaagaaatctgctcctgaaagccgcccgaaagggtgaggtggtgtccggagcgtgcgagctcgaatttaaaggctagtcctccaatgcggagggcgacatcctcaaattgcggggaactcctaaagctttaactccaaagccggttcgcgaaagccgccggtggccaggttaacagcctcgggtactggaaaaacgtggaagatgcgacaatggacaatccgcagccaagcccctaaaggctccccgtcgagggacgcccacggggaaggttcagagacttaacggggatgggtattcgccgagaggcgcctgcttaagataaagtccggccctgcgcgagagcgcgggggtagcagggaactgcggcttaatttgactcaac

SEQ ID NO: 3050 - DNA, 437 bp, Capronia pilosella
  source 1..437: mol_type = genomic DNA
ggcgaaagactaatcgaaccattaagaagccactcggtggttgagtgtaggcccgaaagggtccgcaagtgccggatcctggcgcgacactgtcaaattgcgggaacaccctaaaactccagggaccgcctggcccccgaaagtgggccgaggcaccaggttaacgacctcgggcacggtaatactcctggagatgtaacaatgggcaatctgcagccaagtcctacggggtcctccggggcctacggatgcagttcacagactagatggcagtgggctcggagagcttaagatatagtcggccccctggggagacccaggcgtgtcgctaaactcgaggtgaaggattccgcccccggcggccacctcgagcctgaacgacgcgggcctgtgttaaacaggtcggataagcgctggtagctggttcctgccgaagt

SEQ ID NO: 3051 - DNA, 426 bp, unidentified
  source 1..426: mol_type = unassigned DNA; note = Gaetmannomyces_graminis_var._avenae
gggagtaactatgactcaagaattggcgaacgtgagagggtcatgaaagcggcgggaaaccggcgctagtgggcagccctgcctgcgacattgtcaaattgcgggaacctcctaaagcctcgcccaccgcggcccgccgaaaggctgggtgcagcaccaggttaacgacctcggggacggtaatagcggcgaggatatgtggacaacctgcagccaagtcctaagttttggggtccgacgcgatgtcaagcgccggacctgggccaaaggcgaccgaaatagggatgcagttcaacgactagacggcaatgggtccccggggtgacggccacggcgcttcgccgtcgtcccatacaaggggcttaagatatagtcttgtggtccgcttaacggcgtgtctgccacgtaaaagctcttaaggtagcc

SEQ ID NO: 3052 - DNA, 308 bp, Aspergillus pseudoglaucus
  source 1..308: mol_type = genomic DNA
cgctagggatttataactgtgagtcctccaatattataaaatgttggtaatatattgggtaaatttcaaagacaacttttctccacgtcaggatatagtgtatttgaagcgaaacttattttagcagtgaaaaagcaaataaggacgttcaacgactaaaaggtgagtattgctaacaataatccttttttttaatgcccaacatctttattaactagttaataaagatgatgaaatagtctgaaccattttgagaaaagtggaaataaaagaaaatcttttatgataacataaattgaacaggctaa

SEQ ID NO: 3053 - DNA, 438 bp, Arthrobotrys cladodes
  source 1..438: mol_type = genomic DNA
gtcgtaacaaggtttgaagtttgttcccttccacaggtgacgctcacgagaagcctttgtgaccccgcaaggggtacccgccgcgactgtaaagaatggaatgtgggtattaaatcgcaagtcagccgccgctggcaacactttcgaattgcgggaacaccctaaagcccacctctaccaaccagcctgagaaatccagctggggcccgtgttaacagcacgggaaatggtcataatgaggtgggataggtcagcctttccggttggcatcatggacaatccgcagccaagtccctaaggtccagctggggctacgggaaaggttcacagactaggtggaagtgggttggttcagcaccaacttaagatatagtcgggctctgcgcgaaagcggaggggagtcactgttccgtaggtgaacctgcggaaggatcatta

SEQ ID NO: 3054 - DNA, 400 bp, Geosmithia viridis
  source 1..400: mol_type = genomic DNA
gaaagttaggggatcgaagacgatttaagaagggtccgcgccccccccggtgggggccggctcggtatttggtcgttaaaagtaagctcaaagtgtcttgctagtcgccgcgaccgcgggggcaacaccgtcaaactgcgggaacgtcctaaagcctgaactaccaagccgacgccgaaaggcgccggtggccggggtaatgacccagggtacggtaacaacgttcaggatgcgccaatggataacctgcaaccaagcgctaccgcctattggccatgcgtgcagttcacagactagatgtgggtggggggttgtaccccttaagatatagtcgaagcccagtgtgaaagcctgggattagttgcagataccgtcgtagtcttaaccataaactatgccg

SEQ ID NO: 3055 - DNA, 254 bp, Thiomargarita namibiensis
  source 1..254: mol_type = genomic DNA
aggattagatactacactaagtgtcccccagactggtgacagtctggtgtgcatccagctatatcggtgaaaccccattggggtaataccgagggaagctatattatatatatattaataaatagccccgtagagactatgtaggtaaggagatagaagatgataaaatcaaaatcatcattaaagttatagaattatcagagaatgatatagtccaagccttatggtaacatgagggcacttgaccctggtag

SEQ ID NO: 3056 - DNA, 331 bp, Allomyces macrogynus
  source 1..331: mol_type = genomic DNA; note = Mitochondrion
ctgcgttagttgaatttgtttaacaagttccggagaatagtaatattctcatgaaaatcgggtgaattgtcaaggagacctcctacaatggagatgacttgcagcgaagcttatatcagtgcttaatagatataagaacgttcaacgactaatcggtgagtagcactaacaataaaccggacactaggtggtgagtacaaccaacaataatccacccacgagcgcccgacaaccataattatggttgatgacatagtctgaacaggcaggtgactgtctgaagagaaatttaaacgatttctcgataacataattgttgtttggggtggat

SEQ ID NO: 3057 - DNA, 229 bp, Trimorphomyces papilionaceus
  source 1..229: mol_type = genomic DNA; note = Mitochondrion
tacctcgactacggtacttttgtgccctgctttagcagtaaccgggttaattttgagaacatctaataagacaattcaaagcctatatataactgtataagttgaacgactattaataataattaactagaaaacctggctcctacttggagatgaaatagtctaaacattagtgtgaactaatgaaaccaataaaaggtgataatatgtattgacgatcagttaatgg

SEQ ID NO: 3058 - DNA, 400 bp, Genicularia spirotaenia
  source 1..400: mol_type = genomic DNA
aagtcgtaacaaggttttgccttgagcagacgcttgcggaagccttagcagcccacaagggttcccctcgcgactatatttaaaggaaggggattgaatgctagtgcctgagctgccaacttgggtgcgacatcgccaaattgcggagaactccacatttgcctcgattaccaagcggaccgccgaaaggaccccgtggccgggctaattgctttgggtatggtcaaaacatcgaggaaaaggatgatccgcagcgaaaccctcttgttgtacaaaagtgggtggcgttcacagactaaacggcgatgggttccagaaattcgaaacctgggcttaagatgtagtcggtttgtcttcgaaagtggcagattgcagagtttcaccgttccgtaggtgaacc

SEQ ID NO: 3059 - DNA, 276 bp, Oscillatoria williamsii
  source 1..276: mol_type = genomic DNA
gtagctcgtcgggctcaatacgcaagttaactaaacgcttaatagttagcattgcgatgggctgcatactaaggaaactggtatgcgatagcctctcaaattcggggaagccggtagcgcggtaatcccgagccaagctctgaacaagagaaggtgtagagactcgatgggaggcaccctaacagttaaagctgagggtgaagggagagtccagaccacaaactggaaagataccgggcagcgaaagctgtagatggtacgcataacccgaaggtc

SEQ ID NO: 3060 - DNA, 248 bp, Anabaena sp.
  source 1..248: mol_type = genomic DNA
aaataattgagccttagagaagaaattctttaagtggatgctctcaaactcagggaaacctaaatctagctatagacaaggcaatcctgagccaagctgaagtagtaattagtaagttaacaacagataacttacagctaatcggaaggtgcagagactcgacgggagctaccctaacgtcaagacgagggtaaagagagagtccaattctcaaagccaataggcagtagcgaaacgtgcggagaatg

SEQ ID NO: 3061 - DNA, 216 bp, Oscillatoria sp.
  source 1..216: mol_type = genomic DNA
agaaaactgagccttattggagaaatccattaagtgaccgctctcaaattcagggaaacctaactctggtaacagacaaggcaatcctgagccaagccgaaatttcggaaggtgcagagactcgacgggagctaccctaacgtaaagccgagggtaaagggagagtccaattctcaaaaccagaattctggcagcagcgaaagttgcgggagaatg

SEQ ID NO: 3062 - DNA, 255 bp, Microcystis aeruginosa
  source 1..255: mol_type = genomic DNA
acgcaacggacttagaccaaacttgagtgctcgcagggaaacctgcgatgcagaactgctcaaattcggggaaacctcttaactggcaatcccgagccaagccttggcgcgaaagtgcctcggaaggtgtagagactagacgggcagcacctaaaccccgccagcggggcacggtgaagggatagtccagaccacaaacattcgggctaccgagtggcggtgaaaaccgtagcaggtaagaaaatccgtcgggct

SEQ ID NO: 3063 - DNA, 327 bp, Fischerella ambigua
  source 1..327: mol_type = genomic DNA
cggtcaacggattttcattctcccgcagttttcactactgcctagtagactagctacttgtggctttgagaattggactctccctttaccctcgacttaacgttagggtagctcccgtcgggtctctgcaccttccaaataagttgtttgttatttatcgcttgtcttttgttattcaacaattgacgaatgacaaatcacaaatgactaatttggcttggctcaggattgccttgtctgttgccagatttaggtttccctgaatttgagagcattcacttaaagagtttcttctttaaggctcaattacttaagtccgtagcgtct

SEQ ID NO: 3064 - DNA, 295 bp, Synechococcus sp.
  source 1..295: mol_type = genomic DNA
tcacgacctttacagtcagcggattttcattctctctgcaactttcgctgccatcaacaatcgcgatgttgagaattggactatccctttaccctcggctgaatccgttagggtagctcccgtctagtctctgcaccttctaaagctgttagttgtttagctttagcttggctcaggattgccatgactttaatgtttaaagttttaggtttccctgagtttgagagctgccactcgatccctttcgcgatcgaggcccagttttctaagtccgctgcgtctaccgttccgccac

SEQ ID NO: 3065 - DNA, 287 bp, Synechococcus sp.
  source 1..287: mol_type = genomic DNA; note = PCC6301
cgacctttacagtcagcggattttcattctctctgcaactttcgctgccatcaacaatcgcgatgttgagaattggactatccctttaccctcggctgaatccgttagggtagctcccgtctagtctctgcaccttctaaagctgttagttgtttagctttagcttggctcaggattgccatgactttaatgtttaaagttttaggtttccctgagtttgagagctgccactcgatccctttcgcgatcgaggcccagttttctaagtccgctgcgtctaccgttcc

SEQ ID NO: 3066 - DNA, 406 bp, Gentiana brachyphylla
  source 1..406: mol_type = genomic DNA; note = Chloroplast Gentiana brachyphylla
agacgctacggacttaattggattgagccttggtatggaaacctactaagtgataattttcaaattcagagaaaccctggaattaataaaaagggcaatcctgagccaaatcctagttttcgaaaaagcaaaaagaaaggcttagaaagaaatgaaagaaataaaggataggtgcagagactcaacggaagctgttctaacaaatggagttgattgcgttggtaaagaaacctttctaccaaaaattccaaaaggatgaggaaaaggggtatatacagactgaatcaaatgattcacccacaacctgcagatcttttcacgaacggattaatcagacgagaataaagagagagtcccattctgcatgtcaatgccgacaacaatgaaatttatagtaagaggaaaa

SEQ ID NO: 3067 - DNA, 355 bp, Mycosphaerella juvenis
  source 1..355: mol_type = genomic DNA
agggcaagtctggtggacgtccagtcccaatgctggcgccagaagcagtgaggccccaactcactagtcgatgcacccaccaacagagagggcgggtgccggcaagacgacctggtacgagggaccccttaacggccgcctataggtggggccgaaggcaatctcgtggcgacctccctcacacggaggcgtcgtaacgcgcggaaaggcgtcggtcgcgataagcggcttaaggaacgtgctagacccgagggaaacctcgctccttctgatcagccccctctcggcgaagcagtggaggcgcccggcgaacgggtgtggacgagtcaatgaaaatcggccagcagccgcggta

SEQ ID NO: 3068 - DNA, 403 bp, Barrmaelia oxyacanthae
  source 1..403: mol_type = genomic DNA
agggcaagtctggtgaactgaactcagcttccagctggcgccagagatagtggttaaaatcactagtcgagcatcctctcccacggtgaggacgccggcaaggcaacctggattcggggaaggctaaggggcttacgggccctatgccaatcccgagcagaaattacttctgtgtagagcgcggaaaggtgccggtcgtgagacctaccctggaacagcctaccctgtagcaagttaccctgtaacgagttaccctgtaggccttctcggttggggctcgcggctcgagggacgtgccaaccacctacgaaagtaggttctagtatcccgagcgtagagctaggggtatggagccctgtattttagggtcgtcagtcactgatagtggccagcagccgcggta

SEQ ID NO: 3069 - DNA, 281 bp, Leotiomycetes sp.
  source 1..281: mol_type = genomic DNA
ggagcctgcggcttaatttgactcaacacggggaaactcaccaggttaactacagttacgtctgggcctggaatagttatttgacaactagtacacgcctttacttgtgtgggagaagtctcccaattttggacacaaggcctttcaggagggtttggcggtgcgacactacctggtacaggggacgcctcgctggagtgatccggcaggccgactctgtggcgagctcgagtaacgtcgagccgtcgcaacggcgggaaaggagtgggttcggtggatct

SEQ ID NO: 3070 - DNA, 365 bp, Tilletiopsis flava
  source 1..365: mol_type = genomic DNA
gaggcaataacaggttaacctatcacaggcctgtaacagctgcaaggcagctagtccagcgtcgacgtctgcgtttgaggcagatggggtcttttggaccttggcgcgggcgacacaacctggtacaggaaacgccccggcagcaatgccaggccgatctgttggcgagctctgcgaggagccgtcgcaacgtgcggaaaggtgtgggtctttctctatgaaaggcttaaggtacgtactaatccccggggaaacccgggcctctgcgagaagagcccaaactctatgcgcagggggaagcttgcggaatgcaaagctttggcgatgatcctttgtgacatcgataaatgctgtgatgcccttag

SEQ ID NO: 3071 - DNA, 328 bp, Papulosa amerospora
  source 1..328: mol_type = genomic DNA
cgatggaagttcgaggcaataacaggtcaacgcatcgcaggcctgtaatagtttaaataacgctagtccgctggatttacagcgggcgacactaccttgtacaggggacgcagtgctcgtcttgggagtctgccaatcctgtggcgagccctttgggccgtcgcaacgcgcgcagggagtgggctggggcttattggctccggcttaagatacgtgctaagctactgggtgaaaaccaggcttcgcgcttaaaaacgcggaggatttcgtgacgaacttagaaatagactgctgtgatgcccttagatgttctgggccgcacgcgcgt

SEQ ID NO: 3072 - DNA, 415 bp, Chlamydomonas moewusii
  source 1..415: mol_type = genomic DNA; note = Chloroplast Chlamydomonas moewusii
cagcagccgcggtctggcgtaactaatagaagttgcaatgccgccatagcgagtgatcgttatgtaaaaaaaccctgctcataacggtgaagccttagtaatttatctttttagggtattttacggtaataccgtgggaagtttatcaacaaaaggctgcccgcggcaaagccgcgggcacaaaaaaagcttttttaaaacgtgttgatataaccccgtaacgacttttcttgaaagagaaagaggtgctttattagcgcctaacacgcaggcacttacgagtcctaaatgcagcccgcggaaaccgcgggcggctatggtaataatctagcccgcggctttgccgcgggcgatgcctaaagtctaaagtaagttgaaggtatagtctgagcctctggaaacaggggaataatcg

SEQ ID NO: 3073 - DNA, 383 bp, Chlamydomonas callosa
  source 1..383: mol_type = genomic DNA
gcccattaaagtggtacgtgagctgggttcaaaacgtaaataacactgcgtgtagttgtaaaaatacaactaaaagatttggcttatatcggcgaaaccttactatctttttaactgtacgatagatggcaatgccgagggaagttcttattctaaattaatagattaagacacctgtagagactttataagtttataaaacttataagatacttcctacaaaggaaagtataatacgccaacccctactttttacctgagcttataaacaagcgaaaggctaaagcggggaggagatatagtccatgctcttatgaaaataggagggaaggtttaacaatatttgttaaactgcatgcgtgagacagttcggtccatatccg

SEQ ID NO: 3074 - DNA, 372 bp, Amoebidium parasiticum
  source 1..372: mol_type = genomic DNA
ggaaagtagacgcgttccggtgaagagtgttctacccttacgacaaaccgctcgaatgggccttgtgagagacaactctcacattgcagttggctatatgctagaaactaccgttgtattcataaatacaaaatgttatctactcttattgtatatgggagtgacaatgatggacacgaggtacaattagcaggaaaccaaaggttacaagggtaacttagtaggatcttcagagactacacgccaaccatcttgaattagcaagatgaagacatagtccatagtggattagtaaagatactagtattaatattaatctactagcgtcaagctgagaaagggttagttcgatgaagacaatcagtgttaagg

SEQ ID NO: 3075 - DNA, 312 bp, Chara vulgaris
  source 1..312: mol_type = genomic DNA
agcgaaattcctcgacaaaggggtattttctgaacagcatcaaagacaaaatctggctatatgctggaacctccgagtgacgcaagcaaaatgcgtccggacaatcagcagggaaggaagtcatacatgtgttgatacatgcgctgcgcccctcaacgactacacgccagacatccctgcttgggatgatgatatagtctgaacttcgtggcgacacgaaggaggaaggcctcggttgaaatgatgttcgaagtttatttcaattaacacaattgtgtcgcataagtagcgacctgcacgaatggtgtaacg

SEQ ID NO: 3076 - DNA, 227 bp, Chlamydomonas moewusii
  source 1..227: mol_type = genomic DNA; note = Mitochondrion Chlamydomonas moewusii
cgacgcgcgtgttcggcaccttgaggcgctacgcaagcgtagcgccgattcatcggggtatttttatagtgatataaaaaaaagaaaaaggctaaaagctggaaaatctataatatgataatcagctggaacaaaagtatgtaataagtaatagttattatatataaaagattcttcaacgattaaaagcctagctcttttaataaagagtatgatgtagtctgatc

SEQ ID NO: 3077 - DNA, 267 bp, Pyricularia higginsii
  source 1..267: mol_type = genomic DNA
atttagccgaggctaaaaaaatattctgatttggtctggttatatgtcgcaaattcctggaaaatctttataaggtaatcagcaggaaaacttaattaatttagtgattaaactcttcatcgactaaacgtgacaatttaatttttttattaaataagagatagtcaaaatttcgatgtgaatcgaataatatttattataagagcaccaggttcccagagcgctaggcgattattataatttatattagccctcccttggaatcag

SEQ ID NO: 3078 - DNA, 414 bp, Stigeoclonium helveticum
  source 1..414: mol_type = genomic DNA
agtgaacggcggccgtaactatgacggtcaactttagggccgtctttaaagataactttttgctggaacctccataaaaagagcaatcagcaagagattatattatttgttctaataatttcaacatctgtataaatttccgtctacattaaatggcttactttacgaatgtcttcctttatgggatgccatgagaatacaaaaaggccaaaaaaatcaaagttttgaaactcttgaagacgcgcaaaattatgtacgagattttgttgcgaacaaataaaaatagtttcttcagagactactggttatccgattttaaatattttagtatttaagattgaagatatagtccgatattatatgaatgtgtaataaataccttgcctaaggtagcgaaattctttgtcgagtaag

SEQ ID NO: 3079 - DNA, 240 bp, Neochloris aquatica
  source 1..240: mol_type = genomic DNA
ggcagctgtaactatgacagttctaaggttaagaaatgctagctttagtaaaatcaaactatttgctgggaacccgtaataaaggaaatcagcaggtaactctataataatttatttatagagcacctcagagactatacgtttgacgttttgatgaaaacatcaactttaagatagagtccagcgttttttgaaagaataacgattatctgagcgaaattcattgtcgagtaagtttcg

SEQ ID NO: 3080 - DNA, 406 bp, Pedinomonas tuberculata
  source 1..406: mol_type = genomic DNA
caggctgatcttccccaagagttcacatcgacgggaaggtttggcacctcaactggggtctatcaatgtgaattgataatgcacaagttagctatatgctggaaaatccggaggatccaaaaacccaccctaattttgttaggtcggaaaagttttttggttcggacaatcagcagggaagaccatgtgcccctcaacgactacacgctgacctacttaaaaaaaaagtagatgatatagtctgaacttcaaggcgacttgaaggtattcatttttctgtgaacgaactgcaactagcagcacgcgaaaaggaacacgttttcgattgcattcgaaaattaacgtctttgcgatgtcggctcatcgcaacctggggcggtagtacgtcccaagggttgggctgttc

SEQ ID NO: 3081 - DNA, 428 bp, Chlamydomonas starrii
  source 1..428: mol_type = genomic DNA
caggctgatcttccccaagagttcacatcgacgggaaggtttggcacctcgacatagggggtcgctttcacgcaagtgaaggctgtaaattagctgtatgctggaacttacctattaggtaaaatcagcaggaagtgaagcacacgtgtttagctcctcaacgactacatgctaacactcttgtccttgcgtcctgtgccgcgccgcgccttcttgtccttcgccgaaggcgcggacgcgaaggcgaaggcaaggacgcgaaggggaaaggacgcaagagcagagtgatgatatagtctgaactacgctttaacggcatagaccaacttagttggtttctttctagataacctaggagggataacatatttgcgatgtcggctcatcacatcctcggtctgtagtaggtccgaagggttgggctgttc

SEQ ID NO: 3082 - DNA, 414 bp, Chara sp. CL-2002-1
  source 1..414: mol_type = genomic DNA
gatcttccccaagagttcacatcgacgggaaggtttggcacctcaaatcggggcaatagtccagtaatgggaaaataaagtagagaatttggctatatgctgggacatccgtagtttctaatctaaaaaaataagtgacaatagcgtaggaaatgaattgaatgaattcggattatcagcagggaagtttcttcaagatacccctcaacgactacacgccatgtatcctttgcttttcaaggataatgatagagtctgagcttttaggtaactaaaaggccactattgagtgttagtggcgttaaaccatacatgtcgaaattccccggaaaattgataatgtttaattaacacattgcgatgtcggctcttcgccacctggagcggtagtacgttccaagggttgggctgttc

SEQ ID NO: 3083 - DNA, 434 bp, Chara corallina
  source 1..434: mol_type = genomic DNA
gatcttccccaagagttcacatcgacgggaaggtttggcacctcaaatcggggcaatcgtccagtaatgggaaaataaagtagagaatttggctatatgctgggacatccgtagtttctaatcaaaaaaatcagtaacaatagcgtaggaaatgaattgaatgaattcggattatcagcagggaagtttcttcaagatacccctcaacgactacacgccatgtatcctttgcttttcaaggataatgatagagtctgagcttttaggtaactaaaaggccactattgagtgtgagtggcgttaaaccatacatgtataaattacccggactaaaaatccataaaaaaatcaaattgagaatgtttaattaacacattgcgatgtcggctcttcgccacctggagcggtagtacgttccaagggttgggctgttc

SEQ ID NO: 3084 - DNA, 428 bp, Selenastrum capricornutum
  source 1..428: mol_type = genomic DNA
cctcttacacggataaccgtataatacatgcggaagaagtactcgcgttcctagtagccttaaaaggctgcgacattgcaattgcctgaaccctgttaatctcaccagtaccgctgctgtcccgaaagggaccacgcagcaccttggcaacgcccgagggtgtggtaaaaacctgaagagtaggggcgatgggcagccaagtcctgttggtagccaatacctacggatgcagttcacagactaaatggtaatgggttcttgagtttgactacacaagagcttaagatatagtcggtgggtgccaaaaggcagaccgcaggaggacaacaaccacacgttgtctgagagcctgtggtggacagtaatagttgggtgcaaccaaccggtctgaccgtctgctcccggaacaaacgagtaattctagagct

SEQ ID NO: 3085 - DNA, 415 bp, Chlorella trebouxioides
  source 1..415: mol_type = genomic DNA
tactcggataaccgtaaggattnttgcgggagggaancgaaagcctgccctagtggctcgaaaagcgagctgcgacactgtcgaattgcccggacgtcctgctacgctggagggaccgtctgggtcgggagaccggcctggacactcgtggcgaaagcctcgaggtacggtaacactcctcccgctaggggctatgggcagccaagctctaagtcgctctcgcagcgatacgagtgcagtccacagactagatggcagtgggtatcgctcatcgaagcgatgcttaagacatagtcggtccccaccgagaggtggttcgacggaggatcgaggcgaccgcctcgtgagagccgccgaggtcgggcgaggtctagctagacgacccgccgacggagcacacgagtaattctagagc

SEQ ID NO: 3086 - DNA, 406 bp, Delitschia didyma
  source 1..406: mol_type = genomic DNA
gaacgaaatttaggggatcgaaaacaattttacagttaaacgtgacagtttctggtcgtcgaaagtgcgtaagcactaatctgccccccccgggggcgggcgacatcatcaaattgcggggacccctgggaaccccagctaccacacacggttgaaaggcactgtgccaacttcggagagagaccgaantgaagtaaaaacgctgggtcaggatctattcctacaggaaatccgcagccgacgccctaaaccccctcccgggggcatgggtgcacttcacagactaaattgtgatgggtarggggcaytscctcctgcttaagatttattcgggcccggtgcgaaarcgstngnaacaatcttaanaatycgncagataccgtcgtagtcttaaccgtaaactatg

SEQ ID NO: 3087 - DNA, 445 bp, unidentified
  source 1..445: mol_type = unassigned DNA; note = Coelastrella multistriata
gaattgacggaagggcaccaccaggcgttaataagagctgctcagctttagcgccagtggcttggaaacaagctgctagtcacactcctatttgtgagtcagagacttgctatagcagtgtggcaacatcctcaaattgctgggaagccctaaagctgctacataccaaagttggttggaaacaactgactggccaggttaacaacctcgggtatggtgacaactgtagcagatgaagcatgctcacatgctgaagtgggttatcagcagccaagtcctaaacgtgctcggtgtgttcaactctaccgcaaggtagcttattccaagacacaccaagcatgcatggatgcagttcacagactaaatgggggtgggccctcgaagcttaagatataggagcctgcggcttaatttgactcaacacgggaaaacttaccaggtccag

SEQ ID NO: 3088 - DNA, 399 bp, Naohidea sebacea
  source 1..399: mol_type = genomic DNA
gtctaggttcgggggggagtatggtcaagcgttgcggccatgaagagtgacaaggtaacttgttgctagtctatttaataggcaacaccgtgcaaattgcggcaacacccttaagcttgttaacaccaagcacggtaccgaaaggtacgtgtggccagatgtagtgatctgggtatggttatagtttatcangtttgggcaagcacgcagccaagttcttactcgttagcgagagaatgcagttcacagactaaatgccggtgggtaggaaaaagcaatttcattgcaaaagtgttcttatcaaatcctacttaagatatagtcgggccacgtcgaaagatagtggattagcctgcgcaaggctgaaacttaaaggaattgacggaagggcaccaccag

SEQ ID NO: 3089 - DNA, 396 bp, Sclerotinia trifoliorum
  source 1..396: mol_type = genomic DNA
gaaacttaaagaaattgacggaaaggcaccaccaggcgttaactgcagtaactctgcgcctaaaagcagctcgtaagagttggtggtagccttcaaatatgctagttggaaatcagctataccttcaaactgcggggaactccttaaaaactcaactactaaacctcaattgaaagattgtggtggccagctgattctgggtagagtaataatgttgagaatttggacaatccgcatccaaccctctaaggttttaaactacgaggaaggttcagagactaaatgtaggtaggtagcgtcgctacttaagatatagtccgcctcgagattaacgtctcaagaataacaatgggagcctgcggcttaatttgactcaacacggggaaactcaccagg

SEQ ID NO: 3090 - DNA, 420 bp, Pseudallescheria boydii
  source 1..420: mol_type = genomic DNA
ggaagggcaccaccaggggttaacgtctaactgttaagccacagaagaaatctgctcctgaaagccgcccgaaagggtgaggtggtgtccggagcgtgcgagctcgaatttaaaggctagtcctccaatgcggagggcgacatcctcaaattgnggggaactcctaaagctttcactccaaagccggttcgcgaaagccgccggtggccaggttaacagcctcgggtactggaaaaacgtggaagatgcgacaatggacaatccgnagccaagcccctaaaggntccccgtcgagggacgcccacggggaaggttcagagacttaacggggatgggtatgcgccgagaggcgcctgnttaagataaagtccggccctgcncgagagcgcgggggtagcagggaacctncggcttaatttg

SEQ ID NO: 3091 - DNA, 350 bp, Sporobolomyces sasicola
  source 1..350: mol_type = genomic DNA
acttaaaggaattgacggaagggcaccaccaggagttaacgcaagacaaagctctgctcttcaaggcgaaccagaaatggtttgtggtgtcccttgtaacattcgccagtactctacgcgagggcgacactttcaaattgcggggaactcctgagagccctcagctaccaagtcgaagcgctgaaaagcctttgatggccagattaaaaatcttgggtacggtaacaacgttgagggattggatgatccgcagccgcctccccttcaatggggcgcggttcagagactaaacggaagtgggtccactctaaggatctaagatatagtccatggcttgaggaaactcaaag

SEQ ID NO: 3092 - DNA, 448 bp, Nigrosabulum globosum
  source 1..448: mol_type = genomic DNA
ggctgaaacttaaagaaattgacggaagggcaccaccaggggtaaaatccgcagaagctctgcccctaagagcagccgggagaccggtcggtgggagaaaacagcccgggcgccgcagagcgcgaaccaactgctagtcggcccccccgggggtccggcgacatcctcaaattgcggggaatccctaaagccgcgtgctaccaagtgggccgccgaaaggccgcccgtggccgggtctaacaaccccgggtacgttacaacgcaccggatgacaacaatgggtgacctcgcagccaagctcctacacggcttgccgcgcaggaggaaggtccagagacttgacggggatgggtcccgccgccagccggcgtggcctaagataaagtccgtctgcgcgcgaaagcgctgcagagccctaaacgggacgtgcggcttaatttgactcaac

SEQ ID NO: 3093 - DNA, 440 bp, Beauveria bassiana
  source 1..440: mol_type = genomic DNA
attgacggaagggcaccaccaggggtaaaccgcttcatgcagcccgcagtagctctgctcccaaaagcagcccgaaagggtcaagtggtgttcctgtccgcgctccggcgcggcgaaccaaagtgctagtctctccggaggcgacaccctcaaattgcgggaaacttctaaaaccagtgtcaccaagccggcgtcgaaaaggcgtcggtggccggggcaatgacctagggtacggtaaaagcacactggatatatggacaatccgcagccaagcctcgtcacggggaaggttcagagactaaatgggggtgggtagtgtgctggaggattcgtcctccgagcgctcgctcacacactgcttaagatatagtccgcccgcgctggaaacagcgcggattggcaagctcaaataaacgggagcctgcggcttaatttgactc

SEQ ID NO: 3094 - DNA, 447 bp, Mycoarachis inversa
  source 1..447: mol_type = genomic DNA
ggctgaaacttaaagaaattgacggaagggcaccaccaggggtaaaacgccgcaagctctgctccggaaagcagccaggagactggtcggtggtgccttcagaacacaagtgctagtcaccctccgcggtggcgacaccctcaaattgcgggaaatccctaaagccgcgtgctaccaaccggaccgccgaaaggcggccggggctgggctaactgccacaggtatggtcacaacgcaccggatgagcggccgagaggccgcgaagtgggtgatccgcagccaagctcctacgtagaggtcccctctatacggagaaggtccagagacttgacgggggtgggtgcggcagcggccgcgccgaagataaagtccgtccggcgtgcgaaagcgccccggatccctaaacgggagcctgcggcttaatttgactcaacacggggaatctca

SEQ ID NO: 3095 - DNA, 360 bp, unidentified
  source 1..360: mol_type = unassigned DNA; note = uncultured soil fungus
ggaagggcaccaccaggagttcgccgaactgcgatttattagcagactctgctcctgaaagccgcccgtagaagggtcggtggtcgtccaggcttcgagccgaacaagtgctagtcacgcgagtggcaacatcgcccaactgcgggaacgtcctaaagctctacctaccaacccgccgtcgaaaggcgtcgggggcccggttaatgcccggggtacggtcacaacgggagagatatacaatggataatccgcaaccaagcccctacagcaatctgccacggggaaggtccagagactaaacggcggtgggctcacggggagcttaagatatantccgtccggggatcagcgtcccacgga

SEQ ID NO: 3096 - DNA, 424 bp, Kirschsteiniothelia aethiops
  source 1..424: mol_type = genomic DNA
gaaattgacggaagggcaccaccaggcgttgtggcagactctgcgccgagatgcggccccccaggcggggggtgggtggtgccgtccttaaatgccagtctccgacgagcctcatcgtcgggggcgacatgccgaaattgcggggacatcccaaggctccgaccaccaggtcgccccccgaaaggcgggcgacgaccgggttctccccgggtagggtgggcacggtagagctggggatcactcgcagccgagcgccttccgttccatcggggccccgagggcccgggtgggaccacggcgccgggtccagagactagacaggcatgggtgggccccgttgcggaggggcccgcttaagatatagtccacgagcatccgaggatgcctccatcagggagcctgcggcttaatttgactcaacacg

SEQ ID NO: 3097 - DNA, 439 bp, unidentified
  source 1..439: mol_type = unassigned DNA; note = Protomyces lactucae
tatggtcgcaaggctgaaacttaaagaaattgacggaagggcaccaccaggagtaaacgtttatgtcgcagttaactctgctccgaaaagccactcgaaggagtgtggtgtccttagaggctagtcagtacgctggcaacacaatcaaattgcgggaaactccttagagctcaagctaccgctgctgcccagagatgggttgtggcaccaggttaacgacctcgggtatggtaacaacgcttgagattggacaatccgcagccaagctccctcacgggaagaaggttcagagactagatggttgtgggttgaacacacgtttattgaaacatgttcggcttaagatatagtccaatccagtgtggaaacgcactggtctaaaagatagaaaatgggagcctgcggcttaatttgactaacacggggaaactcaccaggt

SEQ ID NO: 3098 - DNA, 360 bp, Bensingtonia ciliata
  source 1..360: mol_type = genomic DNA
accaggagttaacaaacaggctctgctccaaacagtagctcgaatagagtacggtggtcgctgtcgtttaaatactagtctgtttataacaggcaagatcttcaaattgcggggaagtactggggctctaatctaccaagtcattgtctgaaaaggcatgatggcctgaggtaataactcaggatatggttacaacgattagagatgttacaatgtatgattcgcagcccaatccctcaatatgggatcaggttcagagactaaacggagatcgatctaggcattgaactaggtttaagatatagtccattattctgcttaacagcaattgaatgtattaattgggagcctgcggcttaa

SEQ ID NO: 3099 - DNA, 424 bp, Pyxidiophora arvernensis
  source 1..424: mol_type = genomic DNA
acaccaggggtaaacttcgaactgtagccgcagtcgctctgctcctaaaagcagccgggaaaccgtcaggtggtaagctccttgcccaggtgggcgaagtattgctagtcgtcgtaagggcaacaccctcaaattgacgggaagtccctaaagccagctgagaccaagcgagtatccgaaaggtgctcgtggccgagctaatagccctgggtatggtaaaacagcagctggatattacaatgggtaatccgcagccaagctcctaaacagatttatactgcacggagaaggttcagagacttgacgggggtgggtgcgtaattggtttttattgaactgcttacacgtgcttaagataaagtccgttgctgctgtaagcaggacaggtcttggtaacctttgaccattaaagggagtgcggctt

SEQ ID NO: 3100 - DNA, 448 bp, Geomyces pannorum
  source 1..448: mol_type = genomic DNA; note = var. pannorum
cttaaagaaattgacggaagggcaccaccaggagtaaacttagtttcgtcgcagcaaactctgctccagaaagcagcccgaaagggttagtggtgtcccaggcctcgggccgaattaaatgctagtctgccacggcaggcgacaccctcaaactgcggggaactcctaaagcttctaggtaccaagccggcgtgcgaaagctgccggcggccagggtaattgcctcgggtaccgccaaaaccctagaagatgctacaatggacaatccgcattcaagcccctaagggaccacggtcctacggggaaggttcagagacttgatgggggtgggtttgagaatactcaggcttaaggtaaagtccggccgctggagaaatccatgcggattggtaaataaaacgggagctgcggcttaatttgactcaacacgggaaactcaccaggtcca

SEQ ID NO: 3101 - DNA, 448 bp, Penicilliopsis clavariiformis
  source 1..448: mol_type = genomic DNA
tcgcaaggctgaaacttaaagaaattgacggaagggcaccacaaggcgtaaacttttaccgctagccgcagtaactctgcgccgaacagcagcccgaaagggtgatgtggtgaccctctaaacagtaaatgctagtccagcacggctgggcgacacgctcaaattgcgggaaaccccttagagcctctagctaccaagccgccggtcgaaagacggcggtggccaggttaattccctcgggtacggtgataacgctagaggattgggcaatccgcagccaagcccctacgttccgcagggaatacggggaaggttcagagactaaatgggtgtgggttgggtcctccgggggaggacaccagcttaagatatagtccggcgccaggggaaaccatggcggttcaggtatacctgtcttaacgggagcctgcggcttaatttgactcaa

SEQ ID NO: 3102 - DNA, 448 bp, Dactylella cylindrospora
  source 1..448: mol_type = genomic DNA
cttaaaggaattgacggaagggcaccaccagatgtaaaccgtagttaactctgcatctgaaagccgtctcgggagtagcatcctgaaggttgaatctggccctgttcgcaatggctagtccaagctttttcagctgggcaacaccctcaaattgcgggaaactcctaaagctgctgaacaccaaacctgaccggtaacggttgggtggccgccctgaaagggtgcgggtatggtaacagagtcagcagattgctcgccagcgggccagcaaatggacgatccgcagccaagcgaccggttcaaacccaaccggttgaaggttcagagactagatgggggtgggttttcaaaaacttgaaggcttaaggtatagtccagccgttccagcgaaagcaaacgggtcaggcaatgggagcctgcggcttaatttgactcaacacggggaaac

SEQ ID NO: 3103 - DNA, 417 bp, Graphium basitruncatum
  source 1..417: mol_type = genomic DNA
ggaagggcaccaccaggggtaaactgaagccgtatcgctctgccccgaaaagcgagcccgtaacgggttcggtggttgccggcattcgctaggtccccgtccaggcgggggcgacaccctcaacgtgcggggaaccctcgaagggcaccactcctaagtaacggtcgaaagacgcgctatggcggcgccgtaatggccgccggtacagggaaaacgtggtgcttaggaggcgattcgcagccaagctcctaccccgcctccggggcgcagggagaaggtccagagacttgacgggggtggggtgngcgcgcagcccgcgccnnngngcctaagataaagtccgtgcctgcgcgagagcgcgggaatgctctacagcagagccccgaacaggggatgcggcttaatttgactcaacac

SEQ ID NO: 3104 - DNA, 409 bp, Graphium penicillioides
  source 1..409: mol_type = genomic DNA
ggaagggcaccaccaggggtaaactgcaaagccgtatcgctctgccccggaaagcgagcccgtaacgggtccagtggtcgccggcattcgctaagtctgcacgcgcagcggcgacaccctcaaattgcggggaaccctcgaagggcgtcactcctaaggacggtcgaaaggcgcgctatggngcagcgtaacggctgcnntacagggacaacgtgancctaggaggcgattcgaagccaagctcctaccngcgccccggcgccgtagggagaaggtccagagacttgacgggggtgggtaggtcctcgcgggcccgcctaagataaagtccgtgcctncgcgagagcgcgggaatgctccaagcagagccccggaaaggggctgcggcttaatttgactcaacacgggg

SEQ ID NO: 3105 - DNA, 280 bp, Scotiellopsis oocystiformis
  source 1..280: mol_type = genomic DNA
ntcaacacgggaaaacttaccaggtccagacatagtgtaacgatagctgctcagctttagcgccagtggcttggaaacaagctgctagtcacactcccatctctaggcaagacagcctgcagtatggatgtggcaacaccctcaaattgctgggaagccctaaagctgctacataccaaagcttgttggaaacaactagctggccaggttaactacctcgggtatggtgacaattgtcccagacatagggaggattgacaagattgagagntntttctng

SEQ ID NO: 3106 - DNA, 387 bp, Bensingtonia thailandica
  source 1..387: mol_type = genomic DNA
gcgttgattacgtccctgcccttttttcattttaaacgcttgatgtacaaggggttcaaagtgtcttggtaaaagatgctagtagtgaacacggtattactatttgtcaacttgccagaccgtcaaattgctggaaagcctaaagctttaactaccaagtcaagacagaaatgtactgatggctgggtcacgacccagggtaaggtgaaaacgttaaagatgtttaacaatgggtaatcagcagccaagccctaaggtgtcttgtacactagggtgagttnacagactagatgtcggtcggcttttcgattaatcgaaaaagcttaagatatagtcggcccaagtctgaaaggactttggataaagtgttgtacacaccgcccgtcg

SEQ ID NO: 3107 - DNA, 437 bp, Gonatozygon aculeatum
  source 1..437: mol_type = genomic DNA
accttatcatttagaggaaggagaagtcgtaacaaggttttgcctcgagcaaacgcttgcggaagccttagcagcccgaaaaggttcccctcgcgaccaaatccgaaggaaggggattgaatgctagtgcccaagttgccaacttgggcgcgacatcgccaaattgcggagaactccactatttcgcctcgattaccaagcggtacgccgaaaggactccgtggccgggctagttgcctcgggtaaggtcataatatcgaggatgagggaagatccgcagccaagccctcgcgccaaacgctcgtgggtgctgttcacagactaaacggcggtgggttccggactctagaagcctggagcctaagatatagtcgttcgcctcgaaagagcaatctgcagagattcaccgttccgtaggtgaacctgcagaaggatca

SEQ ID NO: 3108 - DNA, 439 bp, Mesotaenium caldariorum
  source 1..439: mol_type = genomic DNA
aacaaggtttggctcgatcgtggatcctttcgcggttgaaactaccgaagccttagctgcccgaaagggtgacctccgcgactcgcaaaacaaggagaggtctcaaaagctagtggctcctagctgctgctcgtgcagtgagtgcgacatcaccaaattgcgggaaatccctaaagctttgactaccaagtgcggcgccgaaaggctcgcatggccagggtaatgacctcgggtatggtaacaacgtcaaagatgcaacaatgggctatccgcagccaagtcctcgccgcttcgcagcggttggatgctgttcacagactagatggtggtgggttctcggatgcgtcccggggcttaagatatagtcgggcctgcttggaaacagcgggaaatcgcagatgcattcaccgttccgtaggtgaacctgcagaaggatcaa

SEQ ID NO: 3109 - DNA, 414 bp, unidentified
  source 1..414: mol_type = unassigned DNA; note = Statrastrum sp. M752
aacaaggttccgtttatgatccttctcgccccgttatgggttcgagtcgcacggaagccttagcactatgtgcattgtattttaatacgctgcacccgtgctagtgccaatgatgatgtcattggtgcgacgtcatcaaactgcgggaaagctcctatatggcatgggataccaagcacggcatcacacattgtgtgtgatgagtgtggctgagttaatgcactcgggtaaggtaacaacccccatgtcaagaggaccgacctgcagccaagcctttggttataccaagggtgctgttcacagactaaatgatgacgggttgctaatcacaaagcgtgattgcagctcaagatatagtcggactcactctagagtgagacaacacgtaataccttcccgcacgtgaattcaccg

SEQ ID NO: 3110 - DNA, 417 bp, Cylindrocystis brebissonii
  source 1..417: mol_type = genomic DNA
tttagaggaaggagaagtcgtaacaaggtttcattgcgtccttctgcaagtttgctactgaagccttagctgcctgaaaaggtgaccttgacgacttgataaagaaacaaaggtcttaaatgctagtgttcaccctgagtggacgcgacatcaccaaattgcgggaaaaccctaaagctttgactaccaagtacacgtccgaaaggagtgcatggccagggtaatgacctcgggtatggtaataacgtcaaagatgaaacaatgggtaatccgcagccaagtccttgcttgtcatggatgccgttcacagactaaatggtggtgggtttgcgaagcaagcttaagatatattcgggcctctcggaaaccaaaagggggcagtttcnccgttccgtaggtgaacctgcagaaggatca

SEQ ID NO: 3111 - DNA, 435 bp, Closterium spinosporum
  source 1..435: mol_type = genomic DNA; note = var. spinosporum
gaggaaggagaagtcgtaacaaggttgcccctgggcacgatccttccgaggaccccagacggaagcctgagctatctctgtccgcggcgtggagagagagagagctaggtgtggctcatgccataccgacaccgtccaactgcgcgagagttccagaccctggccggtaccaagcgctctcaagagcgtggccggagaagctgtcatccatcgcggctctcttcgggtatggtcataacccggcaccgggctcaaggataatccgcagccaacccgtctcaggcgggaccgttcacagactgaacgacggtgggtccatgcgtgcgtgggcttaagatacagtcggcatctccccatttaagggagattcgagcaagcacagtcggcctgcagcgatttcaccgttccgtaggtgaacctgcggaaggatcattg

SEQ ID NO: 3112 - DNA, 445 bp, Closterium spinosporum
  source 1..445: mol_type = genomic DNA; note = var. malaysiense
gaggaaggagaagtcgtaacaaggttgcccctgggcacttccttccgacaagggacccagacggaagcctgagcaccgcccgctggcgcacagcgggctcggtgctaggcggtgcgcgcgtgcgcgcactgtcgacaccgtccaactgcgagagagttcccgaccgcggatggtaccaagcgcctcagagcgtggccggaggcggagcgccgctcccccctcygggtatggtcacaacccatccctggcagacggatgatccgcagccaacccgtcgcgtcgtgacgggccagttcacagactgaacgacggtgggtccgggtgtcgcaagccgcgaaacccgggcttaagatacagtcggcggctccgggagaaccggagtcccaccccctcccctcgcagaggacttcaccgttccgtaggtgaacctgcggaaggatcattg

SEQ ID NO: 3113 - DNA, 359 bp, Phialophora gregata
  source 1..359: mol_type = genomic DNA; note = f. sp. adzukicola
ggtcatttagaggaagtaaaagtcgtaacaaggtttcaccacggagaccatgcatcccctgagggaggcagcgcgactgtaaataacgctgccgtatgcaagtcaggctaccgctctggcaacacgatcgaattgcggggacctcctaaagcttcactcactacctacccccgaaaggaggcagcacagttataacagtgaagatgttacaatggacgatccgcagcggagaccctacagcgcaagccacgggtagcgttcacagactaagtgattgtgggtagtacggtatactacttaagatatagtcgaacccttactgaaagtgaggggtaaaggtccgtaggtgaacctgcgga

SEQ ID NO: 3114 - DNA, 443 bp, Dactylella gampsospora
  source 1..443: mol_type = genomic DNA
gtcgtaacaaggtttgaagtaagtttccttccataggtgacgctcacgagaagcctttgtggccccgcaaggggtacctgccacgactgtaaagaatggatgcaggtattaaatcgcaagtcagctagcagctggcaacacttttgaattgacggggacaccctaaagcccacctctaccaaccagctggagaaatccggttggggcctgtgttaacagcacagggtacggtaacaacgaggtcggataagccagccctctggcacaatgggtaatcctcagcccaagtccctaatcttttcgttcagaaaaagacatgggaaaggttcacagactaagtggaagtgggttggttcctgaacccaacttaagatatagtcgggctctgtgcgaaagcagagaggagtcactgttccgtaggtgaacctgcggaaggatcatta

SEQ ID NO: 3115 - DNA, 349 bp, unidentified
  source 1..349: mol_type = unassigned DNA; note = anamorphic fungus JCM 8069
gaggaagtaaaagtcgtaacaaggttttgctaagcaacagtccttctgtagcagagcttaacggagaccttgcgccaaaaggcgactataaataatcggcagcaagtcagtatcactggcgacacaatcgaattgcggggacgctttaaagctcgacggtaccaaccgctggaaatcccagcggggctagcatgctagaggtcagaactcgtcgagatgtacaataagcaatccgcagcggtccccttcgaggggccgtccacagactaagtggttgtgggtaggacgtctgttctatctaagatatagtcgggccttgcgagagatcgcaggggtttctgcgtccgta

SEQ ID NO: 3116 - DNA, 410 bp, Encoelia fascicularis
  source 1..410: mol_type = genomic DNA
gcgtataggggcgaaagactaatcgaaccattggaagctactaggtggttaagaagagacttgaacaagtctcctagtcctattgtagggcaacactatcaaattgatcgggaactacctgttaaattctatgctaccgcagcctggtcgaaagacgggttgcgcaccaggttaacgaccttggggatggtaataatgcttagatagggtatatccgcagcgaaatcctaaggctcaggctatggatagcgttcacagactagacgatagtgggcttggcagctctatcttgccacagcttaagatatagtcgaacccttcagagatgcggggcgtgagtgatggatgcaagtctgttgctcagcgcatcagatgctagtagctggttcctgccgaagtttccctcagga

SEQ ID NO: 3117 - DNA, 830 bp, Grovesinia pyramidalis
  source 1..830: mol_type = genomic DNA
gcgtataggggcgaaagactaatcgaatcatccacatggcatatatttatatagttgctaggtgattaagaagaggcttgaacaaggtctcctagtcctaccttagggcaacactatcaaattgttcgggaactacctgttagaattctaagctaccgcagctttgtcgaaagacggttgcgcaccaggttaatgacctcggggatggtaataatgcttagatagggtatatccgcagcgaaatcctaaggcttctataagctatggatagcgttcacagactagacgatagtggggcttttatgatattgaatcattagggcttaagatatagtcgaaaccttcagagatgaagggcatgagcaataggatatgaatacaatccgaatgctcatgcattacatgctagtagctggttcctgccgaagtttccctcaggaatagttgctaggtgattaagaagaggcttgaacaaggtctcctagtcctaccttagggcaacactatcaaattgttcgggaactacctgttagaattctaagctaccgcagctttgtcgaaagacggttgcgcaccaggttaatgacctcggggatggtaataatgcttagatagggtatatccgcagcgaaatcctaaggcttctataagctatggatagcgttcacagactagacgatagtggggcttttatgatattgaatcattagggcttaagatatagtcgaaaccttcagagatgaagggcatgagcaataggatatgaatacaatccgaatgctcatgcattacatgctagtagctggttcctgccgaagtttccctcagga

SEQ ID NO: 3118 - DNA, 389 bp, Myriosclerotinia curreyana
  source 1..389: mol_type = genomic DNA
gcgtaaaggggcgaaagactaatcgaatcattaacactactaggtgattaagaagaaacttgaacaagtttcctagtcctatttcagggcaacactatcaaattgatcgggaactacctgctgaattctaagctaccgcagccttgtctaaagacgggtgcgcaccaggttaataacctcggggatggtaataatgcttagatagggtacatccgcagcgaaatcctaaggcctttgctatggatagcgttcacagactagacgatagtgggcttctcagtgagagcttaagatatagtcgaaaccttcagagatggagggcgtgagtatcttcgaatgctcatgcatcaaatgctagtagctggttcctgccgaagtttccctcagga

SEQ ID NO: 3119 - DNA, 422 bp, Myriosclerotinia ciborium
  source 1..422: mol_type = genomic DNA
gcgtaaaggggcgaaagactaatcgaaccattaaggaatagaccaagctctaggtggttgagaaacccctttggtattagtcctggagacagggcgacattgtcaaattgttcggggaccacccgttaaattacatactaccgcaacaggcctgaaaggcctgcgagcactaggggtagcgcctctagggatggtaataacgtatgtatagggtatatccgcagcgaagttctaaggcctcacggctacgaatcgcgttcacagactagacggcaatgggctcttcacagggcttaagatatagtcgaacccctcagagatgaggatggaatcaatgctagtagctggttcctgccgaagtttccctcaggagcgtataggggcgaaagactaatcgaaccattaaggaatagaccaagctc

SEQ ID NO: 3120 - DNA, 372 bp, Myriosclerotinia luzulae
  source 1..372: mol_type = genomic DNA
gcgtataggggcgaaagactaatcgaaccattaaggaatagaccaagctctaggtggttgagaaacccctttggtattagtcctggagacagggcgacattgtcaaattgttcggggaccacctgttaaattacatactaccgcaacagcgttgaaaggcctgtgagcactagaggtaacgcctttagggatggtaataacgtatgtatagggtatatccgcagcgaagttctaaggtcttacggctacgaatcgcgttcacagactagacggcaatgggctcttcacagggcttaagatatagtcgaacccctcagagatgaggatgggatcaatgctagtagctggttcctgccgaagtttccctcagga

SEQ ID NO: 3121 - DNA, 370 bp, Myriosclerotinia caricis-ampullaceae
  source 1..370: mol_type = genomic DNA
gcgtataggggcgaaagactaatcgaaccattaaggaatagaccaagctctaggtggttgagaaacccccatggtattagtcctggagacagggcgacattgtcaaattgttcggggaccacctgtcaagttacacactaccgcaacagtgctgaaaagctgtgagcactagagatagcgcctctagggatggtaataacgtgtgtatagggtatatccgcagcgaagttctaaggcctcgcggctacgaatcgcgttcacagactagacggcaatgggtcctcgcagggcttaagatatagtcgaacccctcagagatgaggatggaatcaatgctagtagctggttcctgccgaagtttccctcagga

SEQ ID NO: 3122 - DNA, 372 bp, Botrytis tulipae
  source 1..372: mol_type = genomic DNA
gcgtataggggcgaaagactaatcgaaccattaaggaatagaccaagctctaggtggttgagaaacccccttggtattagtcctggagacagggcgacattgtcaaattgttcggggaccacctgttaaattacatactaccgcagcagtgctgaaaggcctgtgagcactagaggtaacgcctctagggatggtaataacgtatgtatagggtatatccgcagcgaagttctaaggcctcacggctacgaatcgcgttcacagactagacggcaatgggctcctaacggggcttaagatatagtcgaacccctcagagatgaggatggaatcaaagctagtagctggttcctgccgaagtttccctcagga

SEQ ID NO: 3123 - DNA, 373 bp, Botrytis porri
  source 1..373: mol_type = genomic DNA
gcgtataggggcgaaagactaatcgaaccattaaggaatagaccaagctctaggtggttgagaaacccctttggtattagtcctggagacagggcgacattgtcaaattgttcggggaccacctgttaaattacacgctaccgcaacagtgctgaaaggcctgtgagcactagaggtaacgcctctagggatggtaataacgcgtgtatagggtatatccgcagcgaagttctaaggccttcacggctacgaatcgcgttcacagactagacggcaatgggctcctcgcggggcttaagatatagtcgaacccctcagagatgaggatggaatcaaagctagtagctggttcctgccgaagtttccctcagga

SEQ ID NO: 3124 - DNA, 371 bp, Sclerotinia sclerotiorum
  source 1..371: mol_type = genomic DNA
gcgtataggggcgaaagactaatcgaatcattaaggaatagaccaagctctaggtgattgagaaacccctttggtattagtcctggagacagggcgacattgtcaaattgttcggggaccacctgttaaattatatgctactgcagcagtgctgaaaggcctgtgagcactgagggtaacgccctcagggatggtaataacgcatatatagggtatatccgcagcgaagttctaaggcttcgagctatgaatcgcgttcacagactagacggcaatgggctcctcgcggggcttaagatatagtcgaacccctcagagatgaggatggaatcaatgctagtagctggttcctgccgaagtttccctcagga

SEQ ID NO: 3125 - DNA, 370 bp, Sclerotinia tetraspora
  source 1..370: mol_type = genomic DNA
gcgtataggggcgaaagactaatcgaaccattaaggaatagaccaagctctaggtggttgagaaacccctttgtattagtcctggaaacagggcgacattgtcaaattgttcggggaccacccgctaaattacatgctaccgcagcagtgctgaaaggcctgtgagcactagaggtaacgcctctagggatggtaataacgcgtgtatagggtatatccgcagcgaagttctaaggccttctgctacgaatcgcgttcacagactagacggcaatgggctccttgcggggcttaagatatagtcgaacccctcagagatgaggatggaatcaatgctagtagctggttcctgccgaagtttccctcagga

SEQ ID NO: 3126 - DNA, 248 bp, Anabaena sp.; identical to SEQ ID NO: 3060
  source 1..248: mol_type = genomic DNA

SEQ ID NO: 3127 - DNA, 291 bp, Nostoc sp.
  source 1..291: mol_type = genomic DNA; note = PCC73102
agataactgagccttgaaggagaaatccctcaagtggaagctctcaaactcagggaaacctaaatctggtgacagacatggcaatcctgagccaagcccgaaaattttagatttgcgattttagatttgggattagttttcaatctaaaatccaaaacccaaaattgagggaaggtgcagagacccgacgggagctaccctaacgtaaagtcgagggtaaagggagagtccaattctcaaaatctgatttggctattgccatcaggtagcagtgaaaactgcgggaggatg

SEQ ID NO: 3128 - DNA, 363 bp, Gentiana ligustica
  source 1..363: mol_type = genomic DNA; note = Chloroplast Gentiana ligustica
aattggattgagccttggtatggaaacctactaagtgataattttcaaattcagagaaaccctggaattaataaaaagggcaatcctgagccaaatcctatttttcgaaaaagcaaaaagaaaggcttagaaagaaataaaggataggtgcagagactcaacggaagctgttctaacaaatggagttggttgcgttggtaaagaaatctttctaccaaaaattccaaaaggatgaagaagaggggtgactgtatcaaatgattcgcccacagcctgtagatcaacggattaatcggacgagaataaagagagagtcccattctgcatgtcaatgccgacaacaatgaaattgatagtaagagg

SEQ ID NO: 3129 - DNA, 407 bp, Draba tomentosa
  source 1..407: mol_type = genomic DNA; note = Chloroplast Draba tomentosa
atcggtagacgctacggacttaattggattgagccttggtatggaaacctactaagtgataactttcaaattcagagaaacccgggaattaacaatgggcaatcctgagccaaatcctggtttacgcgaacaaaccaaagtgtagaaagcgagaaagaagggataggtgcagagactcaatggaagctgttctaacaaatggagttcactaccttgtattgatcaaatgattcacttcatagtctgatagatccttggtggaactgattaatcggacgagaataaagatagagtcccattctacatgtcaatactgacaacaatgaaatttatagtaagatgaaaatccgttgacttttaaaatcgtgagggttcaagtccctctatccccccaaacagtctgtttg

SEQ ID NO: 3130 - DNA, 407 bp, Draba dubia
  source 1..407: mol_type = genomic DNA; note = Chloroplast Draba dubia
atcggtagacgctacggacttaattggattgagccttggtatggaaacctactaagtgataactttcaaattcagagaaacccgggaattaacaatgggcaatcctgagccaaatcctggtttacgcgaacaaaccaaagtgtagaaagcgagaaagaagggataggtgcagagactcaatggaagctgttctaacaaatggagttcactaccttgtattgatcaaatgattcacttcatagtctgatagatccttggtggaactgattaatcggacgagaataaagatagagtcccattctacatgtcaatactgacaacaatgaaatttatagtaagatgaaaatccgttgacttttaaaatcgtgagggttcaagtccctctatccccatccccaactatactc

SEQ ID NO: 3131 - DNA, 846 bp, Paraburkholderia xenovorans
  source 1..846: mol_type = genomic DNA
tacgcctatggtgcgacacgaagcatgaggctcgttgttgaagagcgcagtgcatgtccgcttcatcattgtccagtcgcgaacatgttcgtacgatagaggacccgctgtgcgaccagaggtggcctaggaaagcatctttcgttggcgacgacgctggatgaagcctttccgacaacgtagtccaactgtatgcgccgccgcgaggtgacgtgtagaagctctgagcagcgacggggccgagacgcaaggctggccggtatgggtaacacatgtgaatcgctgataaacgtcgtcagaagaagaatgccaaagctgctgtcaggcatttaccaaacaggtgcacgggcggatgctccgttcataggtcggagcacgtcgtcgagatgcccgccggcgaaaaggcggaccctaacccggtcgtgtgatgaagcgggaacgtggtaagcccatacagttgcccacgaggcagacgagtcgcaaggcgagttgttgactgtgcgggtaagagaagacggaaaaagcgaatgctgggctgaaacggtccagataagggtttcaacattaccctacgcgaaagcgtgcagacttccgtccggtgtccagcgcaaagctgtcgaaagacttcgtagatggaagcatgaaagagcatcgttcgcggtgtctgcgcccttcgctgcggcggaagaacctcggcaagacaatgcgcaggcgtcagatggtggacgccggtcacaccggcgtgtgactttggaatgcttgagccgtatgcagggaaacttgcacgtacggttcttaggggaggccgcagcggcgacgctgtggccttacccgattttaagcccg

SEQ ID NO: 3132 - DNA, 642 bp, Methanosarcina acetivorans
  source 1..642: mol_type = genomic DNA
gagggtcatggtgtgccacgaggctgcagaaaagatgagggtagacccctcggactcgctttacaggaagttattccaaaccacccataagctgctttggtcaaaagccacggtagtgagcattatgggaaaaggcgaggctatgacttcgtcaggtgtgggttaaggagccgaatgaaaatgaaccactgaagacgtatcgaaaacgcgatgatgtcgtcaaaaccaggtggcgtgactaacctgggataagtctggaagatactctgtttactgaccagatggtgaccggtatataggtggcgggaacttaactcgtgcttttctgtggaacgtgggaacctgctcatcgatgtaaagagaaacctccaagcggtggacccgcaaggacaaaagtatcgatgcgatgaacaggggcggaacaattcgtagtagtgatgaagtgcctgtaatgggcatggagcgaagggattgtattatccagttttgaactgcggtcaaccttgtcttcaagggaggaaccaatggacaaaacaaggctttatggctggataatgggagccgtatgaatcgagagattcaagtacggatctgagagggcctgggggtgaaattcccctgggctacttaccaatgcccaga

SEQ ID NO: 3133 - DNA, 859 bp, Thermosynechococcus elongatus
  source 1..859: mol_type = genomic DNA
agacaaggcagtgcgacgcgaaagctagccagatgattgtcccactagcccaacaagctagaacgggaccggttgttcccccaaccgtagcctaaggaggcatgcgtgactggtaacggtcaggtatgaagccctcccgacaatgaagcccgaaccggaaggttggagccgaatccgtgaggaggaagcaacttcaccagcgtcaggtgatagggagctaggcttgagggtatggtgaacgcaagtgaagtgacgctagaagcctcgttactccaagcaggccaaagatgctgataggcctgagccaaaatggcaaagcggattggattcactgcttgcttttcagtgaacggggacagcaactccgccggggtatagtcaccacctaacccctcgtgtcatctggttggaacgcggtaagcccgtatcttcgccttgaacattcaaggcaggcaaaccgtaaggaatgctgatgggggtgcgggtagaggaggtgggaaaaagcgaatgctagcctgtaatgggctagatagggattgagaatgctggcaggacattcaacatcatcccactcgaaagagggcagacttcccgccggtccccccttacgagaaagtctatagaaccttcctaatggtgacaatgcaaatggcggtgatcttgagtcactggtgcggtcaccaacctgctcaaaaggtagagaggctgtagatgagtatcgtaaaggttgcatgcacaaccggttcctcttaaatgaggggtcctggggggctcgagccggatgcggggaaacttgcacgtccggttcctagggggctagggggcagcgatgcccccctgctacccgacaatgacggtg

SEQ ID NO: 3134 - DNA, 2487 bp, Bryopsis maxima
  source 1..2487: mol_type = genomic DNA
aatgcatgacgtgcgacacgaaagtcgctgtatttagtagatatttacaaatcttatcctagcattcggatattcccatactttgggtgcaatcctataataataaaagattgtgctaagccttagtaaaagccaaaacttatgatgttctcgtaatataaggcaagggaaaatagaatagagttggtttaacggcctcgtaaagatgagaacagcccaaaagggttaactacttcgctaacagactgaatggatcgtcgtggtcattcaggaatgcttctaagaagtcggggtgattgtctccaaaactattctatgtatctaaatatagtggaacgtgggaaatccaaaaatctccctatgggtaggtgtttagcaataaacactaaaagattttggattgcggattgtcctgttatgtaagaattccatgcaaaggaataatgaacccatagcaaaaaggaaaatatgggatgcgaattactcagtaaaaagtaagttctaatacagaaaacagcccatatataactggaattcaggaaagttatttccaacaaatgaggacaaggtcttatttcataaaatttatattaaaataacaaagaacaaaggagattgacttatgatagtactttgggagactcaccagagtggataccatccaattggaacaccacaatggcacaagttcggaatttaaaatatagaatctttatggcgaaactagaaggtaatcggagaacattacgaagattacaaaaattgatgttagatagtcgccacaagatactcctgtccgtgagaagggtaacggtgattaatgatggaaaaatagattcctgggatagataaagttctaataaaagataaaaatgacagaatggtattggtagaaaaactctataaaatgaatattttacaatacgagcctaagcccgtgaagagaatacaaataccaaaatcaaacgggaaaactagacctctgggaatccctaccatactagacagaatgtatacaagccatagtgctaaatgcattgcaaccagaatgggaagcctgttttgaagcaaatagttacgctttcgcccaggaagaagtgcacacgacgcgattggtcgggtgttcaacgtactaagtgttaagtcaaatggaaacaataataaaccatggatattagatgcacatatcgaagggtttttcgataacatatgtcatcaagacatattagaaaaactcgacaacttcccagccaaaaagcttataaaccgttggttaaaagcaggctacatggaagaagatatcttttcaaaaactgagaaaggtacaccgaaaggatccattatcagcccactactcgcaaacatcgcattgtatgagttagaggaatttcttaaagcatcaccagactcaacaggtcgagtgagggggaatagagtatacgttcgatatgcagacgacttcatagtcatatgcgcatcaaaaacggaagctcaacaaaccaagaaacaaatctcaggttggttaaaaaccaaaggtctcagatttgcgccaaataaaataaaaatcagtgatattgataaaggctttgaatttttaggtgtagatattcgccatgtaagtacgaatgcctcgcataaaaccaaaggtaaaatgcttctgatacgcccctctacaaaggctatcgacaaaataacacaaaaactgaaaaaagaatggtttctcccgagaagtaaactcatagaaacggtactcacacgtctaaacccaatgatcacgggctgggcaaattaccatcaaaaattttcatccacggatatctttaataaattagacaactggacattccagaaaagttggaattatgcatccagaatgcacgccaacaaatcgaaacattggatttatgataagtattatgggaacttcaatttaaaccgaaaggaccgttggatattcggagataaggaaacaggaagataccttaaaaagtttgcttggttcaatataaagagacacgtggtggtaaaaggctacaattccccttgtgacccaaggttacaagaatactgggaagaacgccggaaaactctctataaagtcagtagaacctaatcggaacaaataatcgcgaaaaatcaagattatagatgtccagtttgtgaacacccgatgagaatctacagaaacatcacctaatttcccaacgaaatataaaaattgaaaattattggaacctagtatatatcatagacaatgccatcaattctgacattccaacccgaaaattgaacgagaattacatggaaaattttattcgaggaaaatcgtgttcgtaagcgtctaacaaagaatccgcgaacacacatagaaagattaaaactcgaacttttagaacataaggcttgagccgtatgcggggagactcgcacgtacggttcttaggggggaattggtggaaacgcctgacctacccgactatttaactg

SEQ ID NO: 3135 - DNA, 1858 bp, Methanosarcinales archaeon
  source 1..1858: mol_type = genomic DNA
cgttactcacgtgcgccacgaagctgcacaagagatgagggttcggcccctcgaagcctgcttgcaggagccggcttcaaaccgccttaagctgctgtggtcaaaagccatggtggtgagcgttaaggaaaaggtcccacaagatgggatcaggtgtagatcatggagacgaacgtaagtgaaccgctgaggaagtgtcgaaagcgtagggacgacgtcaaaaccaggggctggtcgttgacctgggataagtctgggagagcgcctgcttactgcccagatggcgtccggcatgaaggcggcgtgaacatggtcctggctcttgtgtggaacgtgggaacctatcccctaatgttaagggagaaacacaagtgggaggaccccacaagtgtgagagtaccgatgcaggggaataggggcggaccagcccgtattagtgatgaagtttctgtaatggagatagagcgaaggggttgggtcatcctgcttgatttaaagatcaaccaggagatgggaggaatctttgatgaaagcaaagccatttaagatttccaagaaagttgtattggaagcgtggaaagaggtgaaagcaaaccgtggagcagcaggtgtagataagaagtcgattgcggattttgagaaggatcttaataataacctttacaagatcaggaatcggatgtcatcggggagctactttcctccaccggtgaggacggtagggataccgaagaagagtgggggagagaggttgttaggcatacccactgtggctgacagagtggcccagacagtggcaaagatgtaccttgagcctttggtagagccatactttcacaaggactcatacgggtacagacctggtaaatcagcgattcaagcagttggagtgacgcgtaagcgttgctggaggtatgattggatgcttgaattcgacatcaaggggttatttgacaatattaatcataacctcttgataagggcggtaaggaaacacacaaactgtaaatggatgcttttgtacatagacagatggttgaaggctccatttcagagacaagatggtacgttagtgcagagagaaaaaggaactccccaaggtggcgtgataagccccttgcttgccaatctcgttctgcactatgtgtttgataaatggatggagcggaactatccgcaagttccattctgccgctatgctgatgatggtgttgtgcactgccggtctgaagccgaggcattaaagctaaggaaaactctgggggctaggtttgggaagtacaatcttgagcttcatccggagaagacgaagatcgtctattgtaaagatgatgatcgtcgagatgactatcccaacacgagttttgattttcttggctttacattccggccaaggaggtcaaagaatcggtggggtaagcttttcatcaactttactcctgccgtgagtaataatgcggcagaggcgatgaggcaaaaggctcgaagatggaagatgcacctgcgaagtgacaagtccttggacgatctgtcaaggatgttcagtcctattatcagaggctggatcaattactatgggcgcttttataaatccgcgctgtacccaactttgcaacatctgaacagaacgttagtcagatgggcaatgaggaaatttaagaggtttagacaccatcgtaggcgtgcggaatactggttaggggaaattgctcaaaggcagcccgggctgtttccgcattggcagatgggtgtgagacctacggctggatgatgggagcccggtgagctgagaggttcacgccgggttctgagaggacgtaggggtgagattcccctgcgttactcacctgcgccacga

SEQ ID NO: 3136 - DNA, 1529 bp, Marchantia polymorpha
  source 1..1529: mol_type = genomic DNA
aagagttatcatgacaaaatgcaattacgagcaactactagaccccgagatatttaggctagcttacgagctaaagaaatcgaaatcaggcaatatgaaacctggtgcggataaagaaactctcgacggtttctcccaagcctatgttgagaaggtcgtccgtcaactaaaagacgaatcatttcaattccgtccgtcacgaagagaattcattcctaaagcagacggcaagcttcgttccctgggcataccatcacctagagacaagatagtacaagaggtcatgaggaggatccttgaacctgtatttgaaccgcgattcctggattcgtctcacggatttagacctcatcgatcaccgcacacggctctacgacaaatccgtcgatggacaggcacctcctggatgatcgaaggagacatcaaaggatacttcgacaacatcgatcatcacctactcgcgggattcatagcagagttggtaaaggaccaacggcttctcgcgctttattggaaattggtacgcgctggctatgtaaatcaaggcaaagcagagccacacttgctaacaggagtacctcaaggaaggatactatcgcctctgctttccaacatctacctacaccagttcgatctattcatggaggaaatcaaagtcaaatatacaacgaccggtgcgctttccaaaaacaacccgatttacttgaaggcgcggaataaatactacaaacttgtgaaatcattaaaggcttcttccgccgaaatcatccgagcgagacgcgatatgttgaaaatgacttacgggattcaaacaggttctagggtgcgttatgttagatacgcggacgattgggtgatcggggtcacgggtccaaaagccctggccgtacaaatcaaagaagaggtctctaccttcctccaagaaaaactaaaactttcgcttcaggccgaaaaaacacgtattaccaatctatcaagaagcgaagctttattcctaggaaccttaataagcataacaactcgtaaatacgtgcaaagccagaaggtgggcggggggcacaggcgagcctccctcggtagaatacgcctgtgcatccccatcgatatccttatcgggaagctctcacaaatgggggcgtgcgacgaaaagggaacgcccaaagcggtgaccaaatggatctttctaaacgtgggagaaataatcaacaaatatatggctgtgttccggggatactacaactactactcattcgcagacgatatccatcaccttctccaaataatatacatactaagatactcggctatcaacacggtcgcccgtaaactggggcttaacacagccaaagtaataaaacgcttcggcgtggacctaatcttccgggaccacacgaatgagatcaagcataagctcaatttcccgcgatccctacctaataagcgcatgaacttcgccttgagtccgccttcggaccctagagttctatttgatacaagctgcgctcgcattcagtgttgaacgacctgtg

SEQ ID NO: 3137 - DNA, 1910 bp, Vibrio harveyi
  source 1..1910: mol_type = genomic DNA
ttttcttttggtgcgccgagcatggcgttgatctaggaggtgaaagtcctctacgggctcagtcgagcgagaaccgttagcctatgcaagggtgttcactgtgaggtgaaatctgaaggaagcaaatggcaaaacttggttttgacgaacagaaatctgatagtaggtcactacaacttgggcaacctagccatagatagaatagcccaatgcctcgacgggaagtgtgtagtgataaatcaggcacggccaagggaaagagcaacgtcttacctcgggagatcttattgtttgtctcgatagagactaatgcagcagtgatgttgtgtgacgggcaataagaagtcagcagagggcatagtaccttgagacagtacaacttaagggaaggcctgaactgaatatatcaagaagtaagtcactagacactcaatcatgtggagtcatagcaagatggacatcatctctacgtcccaatgggcgataccgcaagtaaagctcacggtgacgaagaatggcaagcatggtcggcgtagacaggaggacgagtcttggtgacctcaacttcgttgatggaacaaatctgctcctcaaccaacctgaatcaagctttacgaagagtgaagaagaacaagggatgtgcaggtgtcgacaaactcgacatagatgcaactatctttaagcttcgacaagcttcaaacgggcaagcgcttcgccagagtcttctggatggaagctaccgacctcaacccgttcttggtgtgggaatccccaaaccgagtggtggcgtcagacaactaggtatcccaacagtgctcgatagaattgtccaacaggcaatcacctcagtactgtcagatatctatgaagctaagttctccaatagcagttacggatttagacccagccgcagtgcacatcatgcgctagcggcagccagtcgctacatccgagaggggcgaggttatgtagtagatatcgacctagcgaaatacttcgataccgttaatcacgatagactgatgcacagactgtcagaggatatcgcggataaacgagtattgaagctcatcaggtcatatctacaggcaggcataatgcgaaacggtttagtcgaacagagacaacgagggacaccacagggtggtccattatctccgttgctatccaatatcgtattagatgaactggataaagagctagagcgtagagggcataagttctgtcgatatgcagacgactgtcaaatctatgttggtagtgaggaagccgcttatcgagtgaaagagtcgataacggagtacttggagcaaaaactgaaactcacggtaaaccgagagaaaagtgcagcaacaagagtgacagagcgaacttacctaagccaccgcttcgggatagatgggacaatccatatatcgaagccagcgcaaactcaaatgaagacgcgagtgcggcagataacgaagcgaaaccgaggtcgagagttaaaggtgataatcgccgagttaactcaatacctaagaggttggcaagactacttcaaactcgccatacggaagagcagcatgaagcgcttggacgaatggatacggcgacggctaagatgctatcgacttaagcaacgcaaacacagatacggcatagcgacatggttacagcgacaaggtgtaacagagcgtaatgcgtggaagttagcgatgtcagataaaggttggtggcggctagcattaacgccccagacaaatcacgctatgccaacaaaatggttcgaggagttgggtctgtactcgttgcgagatgggtatgagtcactaaaagtatattcggaaccgccgtatgcgacccacgcttgtacggtggtgtgagaggacggaggccgtgaggcctcctcctactcgattattgccttt

SEQ ID NO: 3138 - DNA, 2742 bp, Crocosphaera watsonii
  source 1..2742: mol_type = genomic DNA
ttaggggatagtgcgattcgttgagctagaaagctgacatccaagtatattacaaggatacagcgtgtagctcgttcaagagccttttaaaaggtaatccaaaggttaaatgaccaatcaccctccgaagaatcaccctccgaagagaaaacaaagcctagagcgcattctttaaaaggggtaaatacgaaggtcgaatgggtaaaacaacacccaacaaagcaataactaataaagtttacataacttaattagttattaccgaactagctaagtagggataaccgaacagccaatgaacctggaaacttgaataactgttggtttgttggcagaaaggagccacactcggaatcaagggataactcatcccaagagtgacgacgtaaccctccgttttggaattagtaaacccaggatggaagcagggttaaaaggagaacccgtcatgaaacagcatttcggagtcgttctttaagtcaatcggtcatggttaaacattacgttgaatcatcgtcctgaaccctcatgaatactataagtagccaaatctgtttgataggctgcgttcaaaagaacaaggtgaaaagtggagagtttgtcccctcatccacacagattcctaaaaataacctgggggagagatgaaacctaaaaccgatatacccaaatcaacggaacgaattaagtccatgatttctcttaccatcaggtcgatgatgtaagtagtgacaaacttaagcgcaagggtcatggatgtgagaagcaataagaagcaaatgcctacttgtaatgagtacggataagctgacgtattgctggttaattagaagaaatagtctctattagaggtagttaaatgtcgaatgcgagtataaccaagactacgccagaatggaacacaatcaactgggcaaaagtccagaggaaagtgtttaagcttcaaaaaagaatatttcaagctgttaaatcaggtaataaagttaaagctaaaaagcttcagaagttactgttaaagtcacactacgcaaagctcctagccatacgcaaagtgacccaagacaaccaaggcaagaaaactgctggagttgatgggataaaggcattacgccccaaccaaagactaaagctaattaaagaacttaccttaaaaggttacaaagcaaaggcacttcgacgggtttggattcctaagcctggaagagaagaaaaacgtggactgggaataccaaccatgaaagacagagcgatgcaagccttggttaaatcagccttagaaccatattgggaagcccaattcgagggaacatcttatggtttccgtccaggcagaagcgcacatgacgctatcggtagaatatactctggaatcaatcaatgttccggtggtaaatatgtcttagatgccgatatagcaaaatgcttcgataagattaaccatgagtacctactgtccaaagtagattgtccatatctcatcaaaagaatcattaaacaatggttacaaagcggggtaatggacaatggtgtatttgaggaaaccgattcaggaacacctcaaggtggtgtaataagtcccttgttggctaacattgcactacatggaatgataaatgacacaatgaacaagtttcccaaatccttttacagaaatgggaaacaagtgagggataatcaacccaaaatcatccgatacgcagatgacttcgtaattatacataacgaatacgaagtcatcctacaatgtaaagaaataattgcacaatggttaaaaaaggctggactggaactaaaaccagaaaagacctccatcagacataccttaaaaagtattgaacacgatggacaaaccgttgaccctggtttcgattttcttggattcaacatcaggtcatattcaaagggaaagcaccgttcaggtaaaaccccacgtggcaagataataggaagcaagacactaatcaaaccaagcaagaaaaaaatactagctcaccacgaggctttaaaagaggtcattaaagacaataaaaaagccccacaagcagcattaatcgcaagattaaatcccataatactaggatggtgtaactactatcgaacggtcgcaagtaaggaaacatttgcatccgaaaacaacgtactatggaatatgctaagagcttggacagttaacaggaaaaagaaaaaaacaccattgtatgaagcccttagaaaatatttctcatacggaaagtacggaaaatggacgtttcaaacagaagaagcagtcctctactatcatgccgaaacggaaataaagagacatcaattggttaaacctgacgcatcaccttatgacggaaactggacttactggagtaaaagacggggaacatataccgggacaccagctagagtatcaagactcttaaagaaacaaaaaggtatatgccctcaatgtaagcaacacttcacacctgaagacttgatagaagttgaccacattatccctaaatcgaaaggtggtttggatacatacaacaatcttcaagctctacatcgtcactgtcatgaggccaaaagcaaaaatgactacctctatgattggcacttataatggctatgaatggaaagacgatgtattaacagtaccctagacaagggactaattgccgagagccgtgtgaggtgaaagtctcacgcacggttcggactgggagtcgtggtaggtgactaccacttcgacccctaatcaagcttatt

SEQ ID NO: 3139 - DNA, 2038 bp, Candidatus Kuenenia stuttgartiensis
  source 1..2038: mol_type = genomic DNA
cgttaattcggtacgccaagaagcgtatatatatcagttggtgcaaatccaacccgccaattgaccgttcgggcggtagtgaaagaggcagaaaacctcacgggagaacgtaaacagcgatgaatacgttcgagtcccctgtagcgagcagtcagaccgtagcgcaagcgaacacgcaggcttcgttacgctaaaaatacgatagatgagcctcccggattgggcgaaatctgtaatcgcataggtagaaagagacaaacggtagaactatgcggtgtcgtcggagttgagagtgacggtatgactgtaaaaggtatatatatgaacttgggaggtctcattgttcaggttgatgaccgtaacgcatactataagggaagccgaagggtatagcgggataatgagaagtcggagatgcccatagtagtgaagatggtgaagacaacataacttcaccgtagcgaaggggcattacttcagttaacgtttacaaagaaaggaggaaattgtattgggagacctacaagcaataccgaaatcgcaaatgagcgatgatgaaagagtccgagactttcagcgtaaactatatcgaaaagccaaacaggaagaaggatttcgcttttatgtattgtatgacaaggtgagaatgttgcactttttgagagaggcgtacaagcgctgcaaagccaatggaggaagcgccggggcagacgggattacatttgaagatgtggagtcatacggggtggagaagtttcttggagagataatagaggaacttgaaaacaaaacctacgaaccacagccggtactgagagtgtacatacctaaaaccaacggtaagacacgaccattgggaatccctgtgataaaagacagggtagtgcagatgagtgtaaagcttgtaatagagccgatattcgaagcagactttgaagatagctcctacggattccgaccgggacgttcagcgggcgatgctgtgaggaaaatcaaagaaaaactgcgagaagggaaaacagaggtatttgacgcagacctgagttcttattttgacacaataccgcacaaggaattgttactgttaatagggatgaggataagcgacaagaacgtactgcacttgataaaaatgtggttaaaagcaccggtgatagaggaaggcaaaccaggaggcgggaggaaaaataagataggaacaccgcagggaagcgtaatatcaccattattagcaaacatatatctgcacatgctcgacaaagcagtcaatagagagaatggggttttctataagtatgggataacaatcatacgttatgcggatgattgggtattgatggcaaagcgaatacctcgtgaagcattagactatctcaacaggttgttaaagaagttaaagctgagtcttaacgaggataagagtaaaatagtaaaagctgaagaagagagctttgactttctcggacataccatatccttctcagaagatttgtttggtaggaaacacaagaaatactggaacatagaaccaagcaggaaatcacagaagaaggttagggaaaagataggaaactacctaaagagcaatgggcataaagcggcggaaaaagtagctaatgaactgaatgcaataacaagaggatggataaattacttcacaataaagggagtaacgtatccaaacaaggcgaaaagagacctacgatattatcttttcaggagattaacgagatattataagaggaaaagtcagcgcaggagcaagctctataatcgaggagcgtttaaggaattagtcaatagatattgactaatagacccgacaaaatatgttcctgccagacaacctgtgaaagcttaagaagaagactgtcggaaagccgtgtgcgggaaaattgcatgcacggtttgacgaggggggcagatgataagtatatggcggagatatggtggcactggcgggaaaccagccagcaaacagagaaaacaaacttctgcctaagttctagtcgtctgtttctactctaccgttcattag

SEQ ID NO: 3140 - DNA, 2003 bp, Candidatus Accumulibacter phosphatis
  source 1..2003: mol_type = genomic DNA
agcgccgggtgtgcgcccagcatgggcgcgatgtgatggggtggaagtcccctgtgggagtaccgacgtgacttcatgatgaagccatgataaccactagccgaaggcaagggcaaggtcgtgaggacttgtctggaggaagccggagcgcaaaagtgcgaggcgacggacagaaactgcatagaaggcctggtctgcgggcgagttggcaccccatgacgaagcccaccggatacggcggacaaggtaaatgcagcgcttgtgcacggaaacatcgcgttcttacctggggagacctgatcggcaagcgattgccgacgtttcgcaaaagcagtggggatcgctgcttaacagaatgatccgggcgttgcgggaggctgccggccgcagacgagcgaacaggcagcgagcgaagcgaaggccatagcgcgacggcgagcaatcgccagcgtgactgatcaggagtcagcagaggccatagtagcgacaccgaaaggtaacgcgaagggccgaacatgaacagacaaggaggagccgtgagtcactcgaacccgacaatgaacccgaccgggggagccggggatcggcgtgatcttgcccagccagccttgcacgacgccccgaaggaaggttgtatggggaaggacttgatggaagccgtactctcaccggccaacctgaaacaggcgtggcgtcgagtgaaatccaatcgcggcgcaccgggaatcgacggactgcgcattgaggacttcccggcgtatgcttgtgagcactggccggccatccgccagaccctgagcgagggtcgctatcagccacaagcggtgcgacgggtgattatcccgaagcccaatggtggcgaacgcgcgctgggcatcccgaccgttgttgatcgggtcgtccagcaagccatcgctcaaatcatgacaccgatcttcgatccggaattctccgaatcgagctacgggtttcggccccgacgctccgcccacggcgcactcaagcaggtcagagccgacctcaaggccggctatcgcatcgccgttgatctcgacttggcgaaatttttcgacaacgtcgatcacgacatcctgatggcccgagtggccagaaaggtgagcgacaagcggttgctggccctcatcggccgctacctgcgggcgggtgtcatgattggttccacgcttcaacccagcgagttgggaacgccgcaaggcggacccctctcgccgctgctggccaacatcctgcttgacgatctggatcggactctggaagggcgaggccaccgctttgcgcggtacgccgacgacctcatggttctggtcaagagcgaacgggccggccagcgcgtcaaggccagtctcaccgcctacctcggccggcaactcaaactgccggtcaacgagaagaagagccaggtggcaaagatcgagcagtgcgtttttctgggcttcaccttcaggaagaacaaactgcgctggtcggatgccgccttcgccgacttcaagcaccgcctccgggaactgacggggcgaagctggggagtctcgatgccacatcggttcgagaaactcgggcagtacctgcgcggctggatgggctactttggcatctcggagtattaccgaccgattcccgaactggatgaatggctacgccgacgtgtgcgcatgtgctactggaaacagtggcgtttgtgtcgcacgaagatcagccaccttctggcgctgggggtcgaccggcggacggcgatcttgacgggcgtcagcagcaagagctactggcatttgtctcggtcaaaggccacgcaagtcgggatgacgaacgattggttgagagcacaaggtctggtgagtatccggaatctttggatgaaggctcacggttacgcttaacaacgtcgtgtgcgccctgttgatgaaccgcccggtgcggacccgcatgccgggtggtgtggggagggccggttagacgccggcccttacccgattagggcctga

SEQ ID NO: 3141 - DNA, 2557 bp, Bordetella petrii
  source 1..2557: mol_type = genomic DNA
ctgcggcaaggtgcgccgtatcggcgcttagaagaagcgtagcgcaagctaccagggctactggaatgccctgtactcaccggacttatccctgcctgcaagggcttgaattccgaaaggaaggggggagtgcagcatgttcggaaaaggccttttacccaacagctattagcgggggcgggccagagtaagacgtgtatggtcaaagctgaattgcctgaagtctagttccaagcggtctaccagtcccgacgctggcgaaagtagctgaaacgccagactcgcgagttgtgggaaatgttttgcctctcccacaaaccagtatcgcgagcgcaaccccgatcaggggattacggaacgaacggacgacctaaccacgtcgcatctttgtctaagcgtaaatgcgggatcgcctaaacaggtcgtaagacctgcatggcgacggagtcttcgtattacccgatgtggcctctgtaatggaggttgctggccgcagcagtaagcggcaccgacatggctataagcgagcagcaatgcgcgtgaaaggcccactgtccggggggaaggaagacagcttatctgtaaccaactcatcgaaaaggaggttgtgctgatgctaaccgacactactaatcgaaggttggatgcgctgggaatcttgtctcaacagggcaagcgcatcaacggccttagtcgtctcatggaaaacccaatcctgtggaagcaggcgtatgtcaacatctatgcgaattccggtgcaacaacggccggcgtagatggctcgtcactggatggtatgtcctacgagcggctggccggcctgatggccgccgtcaaaagcggtaattatcgcttcaagcccgtgaggcgagtcctcattccaaagagcaatgggaaaacccgtccgctcggcatccccactggggatgacaagctggtacaggaggttgtacggatgcttctcgtgaagatctacgagccggtcttttccgacgactcgcacggttttcgcaacgggcgttcgtgccacaccgctctcatgcaagtccggcagaaatggacgggcatgaagtggatcgtgaacatggatatcaaaggttacttcgacaacatcgaccatgaagttctggtggatgtgcttgccaaacgcattgacgataagcgctttcttgggctgattcattcgatgctgaaggcgggctacatggaggactggaagttccatgacaccttcagcgggacaccgcaaggcggagttgtctccccggtcttggccaacatctacttgcacgaactcgacgagtacgttgcagggttgaaggccgaattcaaccgaggaaaccgccgggcgtcgaaccgcgagtacaagcggatcagtggtgcaattgaacggttgatgaaacgcattgatgcctacaaagccgatggcgactcgccaaaggtcgaggaagcgaagcgtgaattggccgaactttatctacgccgcaaggcactgagcagctccgacccgatggacgccaattaccggcgtctggtgtatgtccggtatgccgatgattttctgatcggcatcatcggcagtcgggacgaggcggtaaccgtcatgcagcgagtcgcaggtttcatcagcgacaaactgcacttggagatcgctgaggaaaagtccggtgtggttcacgcatcggacggagttcgctttctggggtacgacgttcgcacgtactccggtgatcgcaacgtgcgcaccgtccgttcaggacggagcatcacagcacgcagcgtatccgagcggatgcaattgcacgtaccggctgaaaagctgcgtagtttctgccagcgaaagggctacggcgtctatgacgctcacacccccacgcacaggagcgaactgatctcactgagcgaagcggaaatcgttcaaacctacaacgctgaaatgcgaggccttgccaactactacggtttggcgaacagcgtcagtcgtgtcctgaacaagctccatcacctctggttgacgagtttgtggaagacattggcggcaaaacgtcgttcgaccgtcacgaaggtagcgcggagcatgaagcgccagggtggatacgtactggctgttcggggtaactcggactcccacacttttcccatctacagcctgaaagacataaggaaagaacccatcacgttccagagtattgacctaccccccaagacttgggttttcacgcatagccgctcggagttgatccagcggctcgaagcgaggaagtgcgagtactgcgggaccaccgaaggcagtttccaagtgcatcacattcggaagctgaaggacgtggacaaagggaagtacctctggccacaggtgatgtcatggcgccgtcgcaagactttggtgctgtgcgttccttgccatcagaagctacacgcaggcgttctttgaaaggactgttcctagtcaagtaagtggagagccggatacgctgaaaggtgtaagtccggttcggaggggggctgacgggtgatcctttacgggacgcccgcagcctaccctacacgaccgtcg

SEQ ID NO: 3142 - DNA, 1957 bp, Cupriavidus taiwanensis
  source 1..1957: mol_type = genomic DNA
agtacgattagtgcgccaggagactggcagagagtagtcgatgaaagttcgatacaggaaaggaatagcgaaccaccctggccccgagtcatgcggcggcacccgcgagggtgcagccgaagcgttgacaggggagagtgcaggccagccattgagccgcgaaatcattctgtctggagcgccgacgctgttgatcgaagcggaaggcaacatcgtcgagggcgctaaacgcgagttctcggcgggctccacgcggtcgaagaccctgagcatgcacagaagctctctgcacaggaactgggagatctcgccagtgcccaccgagcagctggcggtgggcgggtcggggaaggccgatggccgtacgcccgacatcgacgctggcgagaagtcagatgcttgcgtagtaccgaggaacgatccgaacaacgacgcggccgcaaagccggcgtctgcggaggatcgggagggaaggcgagcagccaagaggaacgccgaacaatctcccgcgccccggacacagagccggtcccgcgcgtcgacggggttgaacggcgtacgcgaagcagcctgtgcccaaaaggcatcgggcaagaaggtgcagttcaccgcgctgatgcaccacatcacgccgcgattgctgatcgacagcttcatgcatttgaagaagtcggcggcggccggggttgatggagtgacatggcacgactacgaggaatgcttggtcgagcggataggcaagctctgggacgcggtgcaagctggccgctaccgtgccctgccatcaaggcgagtgtacatacccaaagcggacggcaaacagcgtccgctaggcatcgctgcgctggaggacaagatcgtccagcaagcggtggtgacagtgctcacaccaatctacgagtccgacttccttgggttttcctacgggttccggcccggacgtggccagcaccaagcgcttgatgcgctgtgggtggggctgcattggaagaaagtgaactgggtgctcgacgcagatattcgctcgttcttcgacacggtcgaccacgggtggatgatgcggttccttgagcaccgaattgcggataagcgcctgctgcggctcatccgcaagtggctgacggccggcgtcatcgagaacggggcgaagacggaaatacgggtaggtaccccacagggggcggtgatctcaccgctgctcgcgaacatctacctgcactacgtctttgacttatggctccagcgatggcgtcgccgcgacgctaagggtgacgtgatcgtcgtgcgatatgctgacgatagcgttgtgggcttcgaggccgaggctgatgcctcgcgattcctggaggccttaaaggcacgatttgctcagttcgggctgtcgctcaacgaacagaagacgcgagtgttgcagtttggtcgctacgcggccagcctacgcaagcgcgctggcttgggccggccgcagacgtttgactttcttgggttcacgcacatttgcgcgaccaagcggtcgaatggcggtttcatcgtcaggcggttgacatcgagcaagcggatgcgtgccacactcaaggcactgcggcaggcgctgtaccggcgccggcacgaaccgatcgcagtggtcggcacatggctacgccgtgtgatgcagggctacttcaactatcacgccgtcccgggcaacaacctgcgattaagtagattccgttctggggtctgccgagcctggttacatgccctccggcgacgtgggcaatatgggcgaatgtcctgggcgcgattcctccgacgggtcgcgccatatgtaccgtcagttcgcgttctacacccttacccaacacagcgcttcttcgcgtcatgactcaaggcaggagccgtatgcggtagccctgcacgtacggatctgtgcggggggcggggggtaacctccgtccctaccgcgatccccgtcaca

SEQ ID NO: 3143 - DNA, 1049 bp, Clostridium tetani
  source 1..1049: mol_type = genomic DNA
gaatatactatagccatacaataaaagtgcgaaacgttatcctataagtaagaaagttttaaaattttcttacgaaaaggatagaacttaaaagttctaactgttctactaaagtaataagtgaaaatcttatttaaagcaaacaaccaagtagctttaagtctaagtcccctacacaagttttatactactatgcaaaacttgtgaagctaggtaaggtcgtaatccgtgaaagtcggatgcggggctccttaaaagattactatggtaaacataagctaatccattaagatgcgatttatatgtattttatactgttaaatatttttgtgcttgtggcttggtataaaacagttaagatgaagtacttaactggttttggaataattggttgttaaactaaaacattataaatcgttagtggatacctaaggtaatcaaaaatagggataggtagaatggaacgtttgatgctgtatatgaagaggtttagtagaacctaggacacatatacgggctcagcaggttcatagtagctatgatactcagccggaagtcaaattaattttgaaatacttctatggtaacataggagaaggataaaactgagtgagccaaggaacctagtcggtaatagaaaagtggaagttaaaacaaatataagattttagaattaatttaattaatgaacggaattaatttaatgatatttaaagttagacggttataaattaaacatttcaaaattaaaccatatccaaattcataaatatagctagatcatatcactagtttaaaaataaataaatcatttcaaattactattaagtaaggtattaataccttacttaatagtaatctcattacataagagaattactagattagcagacagattcataaaaactatatcaactaggacaatagaaaatatatttatacacttcctattatcgagcgaacgccttatgcgatgaaagtcgcacgtagggtgtagaccaagcgaaatcctatgcatttaggatagtgaggtatagcaaaggagaaaa

SEQ ID NO: 3144 - DNA, 866 bp, Thermosynechococcus elongatus
  source 1..866: mol_type = genomic DNA
aggttcttctgttgcgacgtggagctaaccagatgattgtctcgctaacccgaaaggttagaatgagaccagctgttcccccagctgtagcctagggaggcatgcgtgactggcaacggtcaggtatgaagccctcccgacaacgtagcctgaaccgtaaggttgaagccgaatccgtgaggaggaagcaacttcaccagtgtcaggtgatagggagctaggcttgagggtatggtgaacgtaagtgaagtgacgctagaagcctcgtgatcttagacaggccaaagacgctgataggcctgggccaaaatggcaaacggacaggactcactgtttgttcttcagtgaggggggacgatagctccgtcggggcagagtcaccacctaacccctcatatgtcatctaaacggaacgtggtaagcccgtactttcgccttgataggctaagaacaaggcaagtggaccgcggggaacacccatggaagtgcgggtaaaggaggtgggaaaaagcgaatgccaatctgtaatggattggatagggattgaggatggtggcaggacatccaacatcatcccactcgaaagagggcagacttcccactggtccccagttacgagaaaactcacagaacctccctaatggtgacaaagcaaatggcggtgatcttgagtcactggtgcggtcaccaacctgctcaaaaggtagagaggctgtagatgagtatcgtaaaggttgcatgcacaaccggttcctcttaaatgaggggtcctggggggctcgagccggatgcagggaaacttgcacgtccggttcctagggggctagggggcagcaatgcccccctgctacccgaccgacatttct

SEQ ID NO: 3145 - DNA, 1930 bp, Azotobacter vinelandii
  source 1..1930: mol_type = genomic DNA
tgaacgcttagtgcgccagttaaagctggcggaggatagtcgatgaaagttcgatactggtaagaaatggcgaatcaaccagcccccgagtcatgcacgttgcaccgtgaggtgcagggtgaagcgttgacaggggaaaccgatgggccagccattgagccgcgtaatcagaaatccgggacgccgatgctgttaagcgaagcagaaggcaatacggggcatggcgttatacgccagtcatgccctggtcctgcgcggtcggagaccctgcgcacgtcgggaagtccttcgcacagaaactgggagatctcagtgatgcccggtgcgcatgcactgggcggagcaggcaaggccaaaagctgtaaccctgctgtctacgtcgctgagaagtcggatacgtccgtagtacctgagaaaccgtcgaacaaaggggctagccctgcggagagggtggaggaaaggggcgtagccaaggggaacaccgacaagaaccccacgccccggacgctgagccggagcagttgcgtgtcgatgggacttgaaggtgtacgtgaagcagcccgtagggacaagggtatgcagttcacggcattgttgcaccacatcacaccgcaactgttggcgcagagcttctacgcacttcgccgcgacgcggcggtgggagtggacggtatgtcgtggcgagaatacgaagaagacctccaccagagggtgggcaagttgcacgcacggctccacagaggagcctatcgggcaacgccgtcacggcgggtatatatccccaaagctgatggcaggcagcggccactgggtattgcctctttggaggacaagatcgtacagcaggcagtcgtcaccgttctgaatgcgatctatgaggaggatttccaggggttctcgtatgggtttcggccgggacgaagccagcacgatgcgctggatgcgttgacggtcgcgctcaagagccagaaggtgaactggatactggacgcggacatcacgtcgttctttgacgagatcgaccatgaatggatgctgatgtttctggggcaccgaattgcagaccgacgcatgctcggactcatctgcaaatggcttcaggcgggagtaatggaggatggccgtaggttggctgcgaccaaggggactccccaaggcgcagtgatatcgccgttgctggcgaatatctatcttcactacgtgctggatctgtgggcaaggcagtggcgccaacggcatgcccgtggcgagatgattgttgtgcgctacgcggacgacagcgtggtgggtttcaggacgcaatggcaggcgcagcgtttcctggtgcagttgcaggaacgcatggccaggttcggtctatctcttaatgcctcgaaaacacggctgatcgagttcggtcgctttgctgtacagaatcgcaggcggcaagggctgggcaaaccggagacgtttgatttcctgggcttcactcattgctgtagtaccaacagaagcgggggatttcaaatcctgcggctgacggtcaagaagcggatgcgtgcgacactgcaagccatccggatagcactgaatcgccggcgacatgagccgatccgagtcgtaggtcaatggctcggcagtgtggttggaggatatttcaactaccacgccgtgccgggaaacctgatccgtcttgacggttttcgggtggcggtttgccgtctttggcggcaagccctcaaacggcgcagccagcgtaaccggctccagtggtcgcgctatggacgccttgcagacctctatataccaagacccagaactgcacatccttaccctgaggagcgcttcgcgtcacgtacctgaggcaggagccgtatgcggtagttccgcacgtacggatctgtgcggggggtggcaggtaactgccattcctaccgcgacctataggaac

SEQ ID NO: 3146 - DNA, 767 bp, Bacillus cereus
  source 1..767: mol_type = genomic DNA
gcaggtcgtggtgcgaatcgttcctaagtgaaaagcttaggcatcttagacaagggaaggccccattaagatagaactaatgattcgagagacagaatgatagagtaacgtcttgaaatgtttcccctaagtctccgacatgcattgaaaggtaggatgtttaaatgtgtgaagctcggtgaagacggctgacagataccgtagtgaaaaatgtgttttaaccgaaagtccttttagtaagaggatgtatcccataggccgggggtccgtaaagtatctatggtgagaatgttatatgaaataactgacgaactttcgaattaacgagtctataaccatacaatcagaaatgatagtaaaccatattttgtgttgtgtgtgaggttaagtaaattcgcggctatgaacaaccttacagtattataggtactgtctagcacgcaggctcatagaaggcacctaagggtaccatatagtggatagaatcattggaacgatgaaagctcaggacgcagagaacctacattctgtgaagcggtggtaaggaaaaggaggaatcctataacttatctttatttgagtgatagcgatgtcatagtagcgtggaatttatggaaacataaaggagcgaagggcattagtcaatattgtgaggaaaaagcaatattgatggcaagccgtatgaagggaaactttcatgtacggtttagtgtgggggaaaaagcagagattatatcaaagttttacctatcacaataaggagagaa

SEQ ID NO: 3147 - DNA, 1933 bp, unidentified
  source 1..1933: mol_type = unassigned DNA; note = unknown bacterium
gggtcgggccgaaagcgccgattaaaatcggtattggatagagaatgaaagagtcttatggtggaaggtttagcaaaccacaccagcctcgagtcatgcggcaattgcagtaatgcattggctgaagcgttgacagagggaagcacaggcgggctattgagctccgaaatcactcattctcgggtgccgaccacgtggtccgatggggaaggcaacacgttttgccgcgttattatgcgagctgtaagacgacccggcggagtcctagaaccttgcatgtgtggacatcctttacgcgagaatcgggagatccgtgagtcttcctcaaaatgaaaggaacggccagtgaaagagaaattctgtacgcctggcatgaacgacttacggaagtcggacaacaacatagtacctgagaagcttgcgaacaaggattttaaacatccgcggagcaggtggagggaagggcgttgaccaaggggaacatcataaacgctgccgcagtctgtacacagggacaggtagctgcgtcgaccggcctttgtggtgtgtgtagaaaagctcagcaggacaagagcgccagatttaacaatctttttcaccatattacgccagagctgttgacttcaagtttctacaacctgaatagaaaagcagctgctggagtagatgaaatgacatggcgcaagtacaaggaaggctcgcctggacgaatagcagatttaaatgaacgtgtgcataccggaagctatagagctaaacccgttagaagaagctacattaataaatctgacggccggaaaaggccacttggtgttactgctctggaggataagatagtccagcaggcagtctcaacgatattaaatcaaatctatgagaccgattttatgggtttcagctatggtttcagagaaaaacgtagtcaacacaatgccctcgatgctttatatattggaatatcgaggcgtaagataaattacatacttgatgcagatatctctggattttttgataaaatcaatcatgactggttattgaaattcctggagcatcgagtagcggatcgcaaaatattgcggctgattaaaaaatggctaaaagtcggtgtgattgaagatggtaaacgaacatcacttgaagttggtaccccacaagggtctgtgatttcacccgtgttggcaaatgtttacctgcactacgcacaagatctttgggcacaccaatggagaaaaaggcatgcagacggagacgtgattattgtgcgttacgccgatgatagtgttgtagggtttcaatacagaaaagatgcagacaggttcttgaaggatctgattgagagaatgggtcagttcggtctcgaactacacccagtcaaaactcgattaatagaatttggacgctttgcagtggttaatcgccggaaaagaggcgaaagaaaacctgaaacgtttgatttcttgggcttcacacactcctgctccaaaacacgcactggacgattcttcatacgccgtaaaacgattaagaaacggtttgtccagaagtataaggaagtgaagcaagaactgaaggaacgtatgcatgatgatgtgaaggaaactggaaaatggctgaattcagtcatcaggggatttcaaaattactatgcagtccctggtaatatgaatttggtaaagagtttctatgaccaaacaacgcgggcatggctacataatctaagacgcagaagccacaaagggcaaagtttcagttggttgcgctttacaaaattaatcaggtggttgataccgagagttcgaattgcacatccttttcctgaccagagatttcagcgttattacctgaggtaggagcccagtgcggtagttccgcacgctgggatctgaacggggggtgctgggtaaccggcattcctaccgtgacgtatcaagtg

SEQ ID NO: 3148 - DNA, 1961 bp, Methanosarcinales archaeon
  source 1..1961: mol_type = genomic DNA
aaaatgataggagtgccgagataaatgcataatatccagttggtgaaaatccaacctgaggaaaggttagccgccagctcagaactgaaccttgcgcccagcctggtaacaggctgtggtgaagccaggggaatgggatactgggccgcaacgcaagtgaaggaattcagccacgaaatatttattgtcccggaggccgacgttgtcttgttgacggaaggcagtactctcatcgccgatagtcttattgggacatggcaaggcgatgcgagcccggcggggtctaagaccgtggcacggtatcaaacggatattatggaaactcgggagacccagagtgttctccttacaggagtatgtcctatcaagcctataaacggtaagactgtacagacgacactctgggagtcggaccagttcatagtaccggtgatgtggggtaatgcccatagagggaagggactggcaggagcgcgatggaccggcagggacacatcccccatacccagagatgggcaaggggtgtcaacaaaactgtggtccataactcaacgagccagagaagatccaacctgtaagtttacgtctttagcgcacttacttacggcggattttctcaaggaatgtttccgggagttaaagaaagataaagctcccggcgttgatggggtaacatggagaaagtatgaagagaacttagacgagaatacagaagatttggtaacaagattgatagcgaagcaataccgaccacaaccagtaaaacgagcctatataccgaagtcgaacggggaacgaagaccgctaggaattccagctctcgaagataagatcgtccagttggcgataaagaaaattctggaggctatctttgaagaggacttctgtgacgtatcctacgggtttcgacccaaccgcagttgccatgacgcactggacatggttgacatgatcatcatgaccaagccggttagctatgtggtggatatggacattgcgaagttctttgatacggtggatcacgaatgcctgatggaatgcctgaaacagcgagtagtagacccaagtctgctgcgaataatcgcccggtgcttaaaatcgggagtgatggaggaaggaaaatatctggagacggataaaggcactccgcagggagggatattaagtccgatacttgccaacatatacctccattatgcgttggacctttggtttgagaaagaggtgaaggagcagctaaaggggtttgctcagctcatccgttacgcagatgacttcattgtctgttttcaacacgatgatgaagccagagcgtttgggaaaacattaagggaaagactggctaaattcggactgacgatttcggaagagaagagcagaatcattaagtttggtcgctatgcctgtcagcaagcaagaaagcagagtaagaaatgtgcaacttttgacttccttggttttacgctctactgcgataaaacccgaaacggtaaatttaaagtggggcgaaagacatctagcaagaagttcaggcagaagatgaaaataatgaatctgtggctaaagggcgttcgaaatcgtgtgaaattagagttatggtggctattgttagcacaaaagatgattggacactaccagtactatggtataagtggcaatatacggggattacggagtttctactatcatgcgacggaactcgcctttaagtggataaacaggcgaagccagaggaagagctataattggagtcaattcaatcgttttctttcttttaatccactgccaaaaccgaagatatatcatttctatgccctatcaaaacaaaagtagaggatgtactcctgaagagccggatgagggaaaacttcaagtccggttctgtgagggggctcatagtaaccttggagccaatactccaacagaaggtggactatgagccctactcgacatacagaccc

SEQ ID NO: 3149 - DNA, 2173 bp, Methanosarcina acetivorans
  source 1..2173: mol_type = genomic DNA
ggacggaatcgtgcgacgagaagttatgccatggattgcggtacaatccgcctttctatccattcagaatgtctctactctgatgtgcatctctggcaacggatttgtgcaaagctcagaggacaacgaggtgtaaaactgaacctgacagttccaaaccgctagggaaatggacatatggagaaccgaaaggtgaagattcacaggggtcgtgacttgcaacatgcgaaagcaggttgaattacgcatgagccaaatggcatcgaaacccggttatgacaatccgattccgtgtcataacgaatggacgaatgggtttccggcctataggatcctcctaagtgttcagcaactatctatggtatagaactcggtaaaccatttgtggccctataaggtaggaattccgtgaggaaaaccaataccacaggtggcagaggaaatggcaaaaagctaaagattccctgtaacggggaatatagaggagggaaaaaaaaactctttccttaatgcgaaagcatgcccacttgccattggtcacgaaagcaacagggattgttaattatgaatgtaagaaaaccagagataacttcggttacggaccttacagacaaagaactcacccaacaatggaaaagcattgattggaaaagagttaaagaagttgttaataaccttcagtctcgaattgcaagtgcagctaagaacggaaaatggataaccgtgaacaaactctcccgtcttctgacccggtccttatatgccaaactactttcagttcgtaaagtaaccactaacaagggaagccgaactcccggaattgatggaattatctggtcatcgtcggcagataagatgcgttccgctttacaactaacgaacaagggctaccgtgcaaaaccattaacacgaaagtacattcgaaagaagaacggtaaactacgacctcttagcataccaactatgtatgacagagcaatgcaaaccctgcactctctggtgctaggtccaatcgaatctgctataggtgacaagacttcgtttgggtttaaaccttaccgctcaactaaagatgcttacgcctaccttcacatctgtttaagcaagaaaattgctcctgaatggattgtcgaaggtgatattaaagcctgctttgatgaaatcaaccacacttggatacttgacaacatccctatggataaacgaatccttaaggagtttctaaaagccggatatgtcgagaattatcatctgtttcctacggaaaaaggcacaccacaaggaagccccatatctccaataattggaaatatggccttaaacggcttagaaaacgccttagcaatgagattttactccagatcagatggaacaattgacaaatctcatcaaaacaggcacaaagtcaattgtgcccgttttgctgatgactttgtggcaactgctgattccccggaaacagctcttgaaataatcgatgtcatccaagaatttttagatcctcgtggacttaagctcagcgaagaaaagactcttgtaactaatattagtgaaggattcaattttttaggctggaacttcaggaaatacaaaggaaaactccttccgaagccatctaaagactcccaaagggaaattatcaagaaaatcagtgatgtaattcacaaagcaaaagcatgggatcaagaccgactgatacgaatcctcaacccaatcattaggggatggacacagtatcacaaccatacagtttcctctgagattttcagcaaacttgatgatacagtctataacatgcttatctcttgggcgaaaagaagacactcaaataaaggtctcacctggataatgaccaaatactggcataaatccggtagcagaaaatatgtattctgcacagagctaaagacgttggagaggttctccaattccaaagttgttaggcaaagactagcaagccttaacaaaaatccatttatcgacaaggaatatttcgaacaatggaaattcatggaataccaccgaaagaaacgcatcaccaacccaattctgttctaaactgacacccgaaagggtagtagtggctcgagccggatgatgggaaactatcaagtccggttcctagaagacggggtagggagtaatcccaccctgttattcgacgtacgcgcca

SEQ ID NO: 3150 - DNA, 2126 bp, Methanosarcinales archaeon
  source 1..2126: mol_type = genomic DNA
tggtctctgtttgttgacaagaagttgcatcacagattgcccaactggctaccccttccattcggggtaatcctaccgcggaatgcatggatggcaacgcccacgcagtaagcctgcggaacaacgtggaaaatcagaaaatccgattcggatcaactgctaggatacgaatgctatgaagagtgtaatgcgaaccatcgaaagagtcgtaacacaggataagcgaaagcggactgttacgcttagaccaaaaggtacgaaatcagactataactgctgcagagacgttatagagggtggacaaacggtttccggcttacagatggcttctaaggcgttcataattatctgtgacgtagaacttggtaagccccctaagctcccggaatatctgggtagagaccccgtgagggcgaacgatggcatagggggtagaggaatcgataaaaagcgaatgacatcttgtaatgaggtgcatagaggttcaaaatttgccttaacccaaaagggtgctgacttatcgagtggtgtctcattgcatgaacggaggcaaacctgtgaatgtaagtaattcaattacgcccttaaaaggcgagaagcttacagacaagcgaccaaaaccccggtgggacgataccgactggaagagggtcgaagaacatgttaacaggctgcaaaccagaattgcaaaagcagttaagcaagacaagtggaatttggtcaaaaggttaagatttctgctaactaactcgttttatgcgaaattgttggcagtnaagcgtgtaacccagaatagagggaagagaacagctggaatcgatggcgtgaagtgggcaacactgaactccaaaatgaacgctgctcttatattatccgatgtgaagtataaagcaaagccgttaagaagagtttacatctcaaagcagggaacgacgaagaagaggcctttaggaatcccaaccatgtacgatagggcgatgcaagcgctgtacgcccttgcgttactaccgattgcagagacgacatctgatccacgttcgttcggcttcaggatacatagaagcacacaagatgtgcgccaatatgcatattgttgccttggtgggaaatactctgcaaaatgggttttggaaggggatatcaagggatgtttcgataatatcgaccatgactggcttctgaacaacatcccgatggataaatcgattctaaagcaattccttaaggctggatttgtgtataatcgacatttgaatcctacccccgcaggaacacctcagggaggaattatctccccgatactggcgaacatgacactggatgggatggaaaaagctatctcatctgtgtattacgtcggtaagaatgggaaaatcgataaacatcgatataatctccacaaggtgaatttcgtgagatatgcggacgatttcatcgttaccgcaaactcagaagagacggcaaaggagattgcggagttgattaaagagttcctgaaggcacgaggtctggaattgtcagaggaaaagactcatatcacccatatcgattgtggctttgactttttgggctggaacttccgcaaatacggagggaagcttctgataaagccatccaagaactcgatggggaatctcatccgtaaaatcggtgatgtgatcaagcgagcgaaggcatggaaacaggaagacctcatcaacgtattgaaccccctcattactggctggtcgaattatcatcgatcggctgtagctaaggagatattcagcaaattagatcatattgtctgggatatgctctggaggtgggctaagaggagacacccggacaaacgtaatacgtgggttgctaatagatattggcattctgtgggaactcggaacagggtgttttctaccggaaggaataggttgaaactattctcggatacgaagattgtccggtgtgctggcttgaaattggataagaacccctttattgaccaagactactttaacttacggaactgctgcccgatactgaaagggttatgagatgcttgagcggtatgaggtgaaagtctcacgtaccgttctgagatgaggaggggcgggtaaccgccctattcttaatctgcggctatcctt

SEQ ID NO: 3151 - DNA, 1895 bp, Methanosarcina acetivorans
  source 1..1895: mol_type = genomic DNA
gctgatgactgtgcgccacgaaagcgaatccgtgtgacagaatgtcgcatagtgtaactatgctgcatagaagatgagggtgggcccctcggaatcgctatacaggtagagattccaaaccaccataagctgctgtggtcaaaagccatggtagtgagcgttatggaaaaggcgagacttgacctcgtcaggtatgtgctatggagacgaacgcaatgaaccactgataaagtgtcgaaagcgtagggatgtcatcaaaaccagggggtagtcgttaacctgggataagtctggaagaaacctgtttactgaccagatggtggccggcatgaaggtggcgtgaacttagcacaggcttctgtgtggaacgtgggaacctgtacttcgatggtaagagaaaattccaagcggaggacccgtaaggaggaaagtatcgaagcgatgtacaggggcggaacaatccgtagtagtgatgaagctcctgtaatgggagtgaagcgaagggattgtgttatccagttttgaaaattggtcaacctgacaaatcaagggaggaacccatggacgaaacaaagccttatgaaatctctaaagatatagtacaagaagcttttcagagagtaaaagcaaacaaaggtgctgctggtgttgatgatgaaaacattgcagcttttgaatcagatctaacaaacaatctctataagatttggaatagaatgtcctctggctgctatttccccccatcagtgaaagcaatcgaaatccctaaaaagagcggcggaactcgcattctgggaattcccacagtactcgacagggtagcacagatggttacaaaaatctatttggaaccgcaattagaaccactctttcaccccgactcttacggctatagacccggcaagtcagctgcagacgctcttgctgcaacacgtaagcgttgttggagatataactggttactggaattcgatatcaaaggattgtttgacaatattaatcacgatctgctaatgaagcaagtcagtatgcatactgacaaaccatggatcattctctacattcagagatggctcaaagcaccctttcagatggcagatggaacagtcaatgaacggacaaaaggaactccccagggaggcgttgttagtccgcttcttgcgaatctgtttcttcattatgcttttgaccagtggatggatagtcatcatcggtataatccatttgaaagatacgccgatgatagtgtcatacactgccgaagcaagaaagatgcagatcgactgaggattaagttagaaaagcgtttgtctgaatttggacttgaactacatccaactaaaacacggatcgtctactgtaaagatgacgatcggcaagaggattatcctgaaacaaaatttgattttctcggatacacctttagaccccgtaggtccaaaaacaagtatggaaaacactttatcaacttcactcctgcagtcagtaatactgctaaaaagtctatgcagcaagaaatccataattggcgtatgcacctcaaacccgatttaacgttagaagacctatcccatatgtataatcctatagttagaggctgggtcaactactatggtctcttttacaaatctgaactgtactgtgtactcaagcatatgaatcgtgccttgactcgctgggccttgcgcaaatacaagaaactttcagggcacaagcgacgagcaagatactggcttgggaaaattgccagaagggatccaaaactttttgttcactggcaaatggggatttttcctgaggctggataatgggagccggatgagctgagaggttcaagtccggtgctgagagggcctgggggtgaaactcccccgggctactcaccttattgttac

SEQ ID NO: 3152 - DNA, 847 bp, Bacillus cereus
  source 1..847: mol_type = genomic DNA
gtgcgacacgtttctttataagtgtgcaaacacgaagtaggagggttatcaatttgatgacaacaacggattgactgcaagtaggaatgaaagccgtcaggttgagctgaaactacttatctgatactcctatatgcaaggcgtgatagtagtcacaaattgtatgaagctaggtgaagtcggctgaacaaaacctaagtgagaaatcatatggtaatggataggtcgggatgctacaaaacatctatggtgagaatgtcctaacggactggcgaatgtacaggtttaaaggattaattcattagaaatgtgtatattgtcaacgagtagttatttcgacgctatctaccgaaaagtaagagtaaataatatgaaattcggaagatctaacgatgaggatgtaaagataacaggcttacagcaagcacctaaagatatatgtatagctaagtcattcagaacgtggtaagcaagagactgtcacaaatgcctactaacagacaaggtgcatataaggttctaacgaaccaaaattgctttattcttgtgaaggtggggacacagtaccgacgaagcatgtaacaaatgtggagggatagtccctagtcttgttcgttgaaaactaaatcaactggatataactcacaggatcgagtaagatgatgtgacttttcgtaagaaaagggaatgaatacgttggtgagtacaacatggtttgtaatctagttgttttagtataaaaggataagatggggcgctgtatgcgatgaaagtcgcacgtacagtgtcaagcgggggaaaagatggagataactttaaagtcttacctatcgcaacggataaaaag

SEQ ID NO: 3153 - DNA, 969 bp, Bacillus thuringiensis
  source 1..969: mol_type = genomic DNA
cctatcactagcgcgacacgttcctaagtgaaaagcttaggcactgtcgaactcaacagttcagcagtgaactgtcattctaagaagtcaaatgaaggagtaacgtctggaagggcttcccttaatcctccgacatgcaggaaagtaggcaagtactgaactgtgtgaagctcggtgaagtcggttgaaggttaccgtaaattagtatctctaatacgaaagctatccagcggtggatggtgtaactgatagaccggaggtctataaaacactcaaggttaggatgcgcgatgaactagaggcgatcgctagtaagcgcagacgaatccctgatggtacgggtctatatcgggagggaatcgaaaggttctctgacacaaataagtgtcgctactgtgggtgagtaaaactctcctttatgaaagcccatatatcgttacaggcgttattaaggtagcaggctcataggggaaacctaaaagtgtatgtacagataagaatgacggaacgtggtaagctgccgacatggagggcttgttctctttgaagtgttgccaaggaaagtcacaatgagattagttgtcgatataacttggtttaacggcagtgaaagtggtggcacagtaccgatgaaacgtgtaatgaacgtggagggatagccactagtcgattgaagattgaaggttactattggttaacatggtttcgagtaagactaagagatgtaatgctccaaagtaataaggaggttacagcccatgttaaagaaaaccaagctaagacataacgaatattatgatacacaaaaaaagtgtatgacaatttatactcgaacagtcttaacggtaacaatttctttcaattggaaacgatggaacgccgtatgcccggaaacgggcgcgtacggtgtggagtgggggaaaagctggagataatctcaaaggcttacctatcactatcgcgacacgt

SEQ ID NO: 3154 - DNA, 755 bp, Onion yellows phytoplasma
  source 1..755: mol_type = genomic DNA
tattgcaaaagggcgagaaagatgcctaatttcttagtaaattaaccacttacaactgcaattagtaatgcagtacaacatatttttggtctattttgtgaaagcaagatagattatagcagaaaataaaagcaaaaaaacgagaaactgtttatcgtttggatttgcgagttgaaaatagtcatggaaaagctttgcaataagcctaagagaaaaaaacgggcagtagctataaggaaaaacagttgataccttatattttagggcagtttatatattttttgcgtatataaaatttactaacacttattgatttaagtggcaagcaaaattgctaaacctaaaaccaccacaaccacataatttttttatttttgtatattaattgtggttatctctcctaaaactattaaggtaagaaattagagtaacttctatcttcctaaaagttatttgctaaaagaaagttatttgataaaagtataaaagcatctaaaataaacttaagtgtttaggctcaaggaaaaagcagaatcgtagtagtcgtaagaaattcaaagcttagctggaatgcataagtggactgacttaccaaggaatttgggaaaaccaaatacaaggcgaaagaagaaatatattttatataaacgctgtatgcttggaaacttgcttgtacggtgttgtgcgaggctcaaaaaaacctaattattagctaataattaaggcgttttgtttctatcgcgataattactcaa

SEQ ID NO: 3155 - DNA, 865 bp, Thermosynechococcus elongatus
  source 1..865: mol_type = genomic DNA
agacattagggtgcgacgcgaaagctagccagatgattgtcccactagcccaacaagctagaacgggaccggttgtgcccccaaccgtagcctagggaggcatgcgtgactggtaacggtcaggtatgaagccctcccgacaacgtagcccgaaccgcaaggttgaagccgaatccgtgaggaggaagcaacttcaccagcgtcaggtgatagggagctaggcttgagggtatggtgaacgtaagtgaagtgacgccagaagcctcgttactctcagcaggccaaagacgctgacaggcctgggccaaaatggcaagtggacggctacacctctcctaattaggtgtacggggacattagctccaccggggtaaagtcaccacctaacccctcgcgtcatctggttggaacgcggtaagcccgtacttccgccttgataggccaagcacaaggcaagtggactgcgaggaacacccatggaagtgcgggtagaggagacgggaaaaagcgaatgctagcctgtaatgggttagatagggattgagaatgctggcaggacattcaacatcatcccactcgaaagagggcagacttcccgtcggttccccattacgagaaaatctatagaacctccctaatggtgacaaagcaaatggcggtgaccttgagtcactggtgcggtcaccaaccctcccaccaagggtaggcaggctgtagatgagtatcgtaaaggttgtacacacaaccggttcctcttaaatgaggggttttggggggcctgagccggatgcgaggaaacttgcacgtccggttcttagggggctagggggcagtaatgcccccctgctacccgactggccttgcg

SEQ ID NO: 3156 - DNA, 859 bp, Thermosynechococcus elongatus
  source 1..859: mol_type = genomic DNA
tgacaaagcagtgcgacgcgaaagctagccagatgattgtcccactagcccaacaagctagaacgggaccggttgttcccccaaccgtagcctaaggaggcatgcgtgactggtaacggtcaggtatgaagccctcccgacaatgaagcccgaaccggaaggttggagccgaatccgtgaggaggaagcaacttcaccagcgtcaggtgatagggagctaggcttgagggtatggtgaacgcaagtgaagtgacgctagaagcctcgttactccaagcaggccaaagatgctgataggcctgagccaaaatggcaaagcggattggattcactgcttgcttttcagtgaacggggacagcaactccgccggggtatagtcaccacctaacccctcgtgtcatctggttggaacgcggtaagcccgtatcttcgccttgaacattcaaggcaggcaaaccgtaaggaatgctgatgggggtgcgggtagaggaggtgggaaaaagcgaatgctagcctgtaatgggctagatagggattgagaatgctggcaggacattcaacatcatcccactcgaaagagggcagacttcccgccggtccccccttacgagaaagtctatagaaccttcctaatggtgacaatgcaaatggcggtgatcttgagtcactggtgcggtcaccaacctgctcaaaaggtagagaggctgtagatgagtatcgtaaaggttgcatgcacaaccggttcctcttaaatgaggggtcctggggggctcgagccggatgcggggaaacttgcacgtccggttcctagggggctagggggcagcgatgcccccctgctacccgacaatggcggtg

SEQ ID NO: 3157 - DNA, 858 bp, Thermosynechococcus elongatus
  source 1..858: mol_type = genomic DNA
gaggcgtggagtgcgacacgaagccgcttaagctgactgtcccactagcccaacaagctagaatgggaccggttattcccccagctgtagcctagggaggcatgcgtgactggcaacggtcaggtatgaagccctcccgacaacgtagcccgaaccgtaaggttggagctgaatccgtgaggaggaagcaacttcaccagcgtcaggtggtagggagctaggcttaagggtatggtgaacgcaagtgaagtgacgttagaagacccgttatcacatacaggccaaagacgctgacaggcctgagccaaaacggcaagcggacaagatacaacgcttccacgtcggtgtacggggatgttgatccgtcggggcatagtcaccacctaacccctcgtgtcaactaagcggaacgtggtaagcccgtatcttcgccttgaacattcaaggcaggcaaaccgcaaggaaagctgatgagggtgcgggtagaggaggcgggaaaaagcgaatgctagcctgtaatgggctagatagggattgagaatgttggcaggacattcaacatcatccgactcgaaagagggcagacttcccgctggtccccgattacgggaaaacctacagaacctccctaatggtgacaaagcaaatggcggtgaccttgagtcactggtgcggtcaccaaccttacacacaaggtagagaggctgtagatgagtatcgtaaaggttgtacatacaaccggttcctcctaaaagaggagtcttggggggctcgagccggatgcggggaaacttgcacgtccggttcctagggggctagggggcagtaatgcccccccgctacccgacaaaggctttc

SEQ ID NO: 3158 - DNA, 2546 bp, Nicotiana tabacum
  source 1..2546: mol_type = genomic DNA
cggcttttaagtgcggctagtctcttttacacatatggatgaagtgagggattcgtccatactctcggtaaagtttggaagaccacgactgatcctgaaagggaatgaatggtaaaaatagcatgtcgtatcaacggaaagttctgagaatatttcattgttcctagatgggtataaaaccgtgttagaattcttggaacggaacaaaataaagttgggtcgaatgaataaatggatagggctgcggcttcaattaaattatagggaaagaaagaaaaagcaacgagcttttgttcttaatttgaatgattcccgatctaattagacgttaaaaatttattagtgcctgatgcgggaagggtttcttgtcccatgagtggattctccatttttttaatgaatcctaactattaccattttctattacggagatgtgtgtgtagaagaaacagtatattgataaagaaagttttttccgaagtcaaaagagcgattaggttgaaaaaataaaggatttctaaccatcttattatcctataacactataacatagaccaattaaacgaaacgaaaaaaaaaagagatgatagagaatccgttgagaagtttacctgtatccaaggtatctattcttactaaaatactttgttttaactgtatcgcactatgtatcatttgataaccctcaaaatcttccgtctttggttcaaatcgaatttcaaatggaagaaatccaaagatatttacagccagatagatcgcaacaacacaacttcctatatccacttatctttcaggagtatatttatgcacttgctcatgatcatggtttaaatagaaataggtcgattttgttggaaaatccaggttataacaataaattaagtttcctaattgtgaaacgtttaattactcgaatgtatcaacagaatcattttcttatttctactaatgattctaacaaaaattcatttttggggtgcaacaagagtttgtattctcaaatgatatcagagggatttgcgtttattgtggaaattccgttttctctacgattaatatcttctttatcttctttcgaaggcaaaaagatttttaaatcttataatttacgatcaattcattcaacatttccttttttagaggacaatttttcacatctaaattatgtattagatatactaataccctaccctgttcatctggaaatcttggttcaaactcttcgctattgggtaaaagatgcctcttctttacatttattacgattctttctccatgaattttggaatttgaatagtcttattacttcaaagaagcccggttactccttttcaaaaaaaaatcaaagattcttcttcttcttatataattcttatgtatatgaatgcgaatccactttcgtctttctacggaaccaatcttctcatttacgatcaacatcttttggagcccttcttgaacgaatatatttctatggaaaaatagaacgtcttgtagaagtctttgctaaggattttcaggttaccctatggttattcaaggatcctttcatgcattatgttaggtatcaaggaaaatccattctggcttcaaaagggacgtttcttttgatgaataaatggaaattttaccttgtcaatttttggcaatgtcattgttctctgtgctttcacacaggaaggatccatataaaccaattatccaatcattcccgtgactttatgggctatctttcaagtgtgcgactaaatccttcaatggtacgtagtcaaatgttagaaaattcatttctaatcaataatgcaattaagaagttcgatacccttgttccaattattcctttgattggatcattagctaaagcaaacttttgtaccgtattagggcatcccattagtaaaccggtttggtccgatttatcagattctgatattattgaccgatttgggcgtatatgcagaaatctttttcattattatagcggatcttccaaaaaaaagactttatatcgaataaagtatatacttcgactttcttgtgctagaactttagctcggaaacacaaaagtactgtacgcacttttttgaaaagatcgggctcggaattattggaagaattcttaacgtcggaagaacaagttctttctttgaccttcccacgagcttcttctagtttgtggggagtatatagaagtcggatttggtatttggatattttttgtatcaatgatctggcgaattatcaatgattcattcttagattttctaaatggaaatttgtttctaaatgatgaagagataaaaaaatttcactattctgaaatgttgattgtaatagtaattaaggggtaaatcaactgagtattcaactttttaaagtctttctaatttctataagaaaggaactgatgtatacatagggaaagccgtgtgcaatgaaaaatgcaagcacggcttggggaggggtctttacttgtttatttaatttaagattaacatttattttatttaacaaggaacttatctactccatccgactagtt

SEQ ID NO: 3159 - DNA, 1545 bp, Euglena myxocylindracea
  source 1..1545: mol_type = genomic DNA
cttttaggtgttgtgttttaatcattatataagaatttacaaaaaaatttgtgactttacaaatcatattaaaacaaagttttaactgagttttttattttatcttttaataaactaatgttttggaataaatcgtttgtggtggttagtaatttgcaaaaaaaaattttcaagagtagttattccaatgattttaagcgttccaaaagctttcaggctttaattttaaaatcaaatgctgcaaaatacttagcaattcgctatgttctacaatctaatttggataaaaaaaatttaactattgatggcaaaactactttaagttatttagagcgtatctcgttattagagtttttaaaaattaattataataatcggtttcctcaaactatacaaaatgtgggttctttgaacaaaaatggtgattttaagttaacatttacttgtacgatatcagatcgtgtatggcaaacttttttaaatttttctatgcaaccggctcatgattctacttttcatccctttaattttggctttcggtttactacggaaaacttttttatcctaaaagtcttacttttaaatttaaaaaatcaatctcttcctttacaaaaacgtatatactatttttctttagaaaatagattggttgattttgattttctttatttagtgaaaaagttaagaatttttagaactattaaaattggaatctttcgtttattaaaaaaaaactactctttgcagtattgtgaagataagtatgatacattttctacattgttatttaatgttcttttggatggcttgctagattttggtaatatttttcattatggttatcattttttgttaattctcaaaccaatagagagcgagtttgttttttttaataatatttcgtgttttttttctagtataggtgtttctttttcagggaagtattcattactttctattacaggtttcgattttttatactggagctttacaaaaaaaggaaacttttatatttcagttccttccacaaaaaactactttaattttcttggacgagttaaatatatagttaacaactcgaattatggtgtaaaaatcaaagctgctaaattattcccgataatcaaaaattggtatgtttatcataaatattcttttaagaaaggttgtagctctattattttttctataaaaaagaaagtattaaaagcttttgttaaagagtctaaacaagatatttattctgctaagagattattggataaatgctttttttttgttgttattcacagtcttaaaattatcaagcaaaaaaaattttttcttgcaaaacacttagtttttcgcacaggttatttaaaatttcaatgtattcactgtggcgtgaatttaattttctcataatgtttctaaaattaataatgttttcccttaatttttctagtcaagattttatctatggcctaaaatataattttttcttaacaaaatctttcctttaattaattttgaaaatctcaacggattaatcttttctcatgtagc

SEQ ID NO: 3160 - DNA, 2154 bp, Methanospirillum hungatei
  source 1..2154: mol_type = genomic DNA
agttaatatagtgcgacaagaagcagtaaatcggattgcgaacccggtttaaaatcggtaacgccacccaatccattctgggcgtccctacctgcacgtgcgtgtttagcaataaacgggtgcgaagctgcaggaacaacgtggtgattcccatagtctctttgggataagctgccagggaaaggtatcatggacaaacaaacgttgaaccgctgcaggatcgttaattatatcaggaggaaagagatttgcccctgtccccactgagggagaatcacggtatcagtagcttgaattatgctggtacgaatggacgaagctgattccggtctatgggcgggtcctaaaataccacaattatccgatttattgaacttggaaaacccaatacgctcctaaaaaaaaaaaaaaaaaatttttttttaggtaagaaccttgtgagaggaaccacatgcgtagtgggagtaggaggctgcaaaacgcgaatgcccggctgtaatggctgtggataggggttcaaactttgccctgacctgaaagggtgccgacgtgcagctggtttttcacggcgaacaggatggtttcaatgaacgggataagttcaattacgcataaaagcgaggacatctcggacagaaaacttgcaaaacaatggaagaaatttccatttgctaaagcaagagattatgtaaagcgacttcagacacgtatcgcaaaagcagtgaagaacggccaatatcgacttgcaagacgactccagtatctgcttacacattcgttttatgcaaaaatgttggcagtacaacgagtaaccaaaaacagaggtaaaagaagtgcaggagtagatggggaaaaatggaccacccctgaacagaaaatgaaagcagcattaacgctttcggacaagggctatcgggcaaaacctctccggagaatctacatccctaaaccgcaatcgagtaaaatgcgacctctttcgattccaaccatgtatgaccgtgctatgcaagctttgtatgcaatggctcttatgccttgggctgagaccacagcagacaagacatcattcggattccgaatgaagcgaaatgcacaggatgctgcttcatacacttttcagtgcttaagcagaaagacttcaggtcaatggatattagaaggtgatatccgcgggtgcttcgataatttcgcacaccaatggatgcttgataacatccctcttgaccaaagaatccttaaccaattcctgaaagccggttatatttatgatggaatactctaccgtaacaagtcaggtacgccccaaggcggcttaatttcccccttattggctaacatggctcttgacggcatggaaagaatgttgaaagaacactttcccggaaataaggttcatctcatacggtttgcagatgattttctcgtaacggcagactcacaggaaacggcactccagtgcaaggaactcatcactgaatttcttcatgaacgagggcttgaactctctgaggaaaagaccaaaatcgttcatatcaacgaggggttcgatttcctgggctggaatttcagaaaattcaaaggcaaattcctgatacaaccttcgaagaaagctattgccgcaatcattgataaagtaagggtaatcattaagtcggcgaaggcctggaaacaggaagaccttatcaaagccctaaatcccgtaattaagggatgggcaatgtatcaccggacggtttctgcaagtatgacctttgggaaacttgactgggttgtccgaaatatgttgtggagatgggcaaagcgccgtcataataataaagggaagagatggattgccagaaaatactggcacccaacacttaccagaaaacaggtctttagaacctctactcttactctcgaaaacttctccaacaccaaaattcaataccgaaaattcataaaactggatgcaaatccgtttattgataccgagtattttgaaaacaggccaggagttttcctctcaaagcaaagatcgatacggatgttccttcactacgcccataaaagcgggtagtgaaaaacttgagcggattgcggtgaaaatcgcacggtccgttcttggaaggctgggttagggtaacctaacctggctattcgacatacaccaaa

SEQ ID NO: 3161 - DNA, 1858 bp, Methanosarcinales archaeon
  source 1..1858: mol_type = genomic DNA
gcggatgactgtgtgccacgaagctgcacgagagatgagggtttggcccctcgaagcctgcttgcaggagcaggcttcaaaccgccttaagctgctgtggttaaaagccatggtggtgagcgttaaggaaaaggtcccacaagatgggatcaggtgtggatcatggaaacgaacgtaagtgaaccgctgaggaagtgtcgaaagcgtatggacggcgtcaaaaccaggggctggtcgttgacctgggataagtctgggggaaaacctgcttactgcccagatggcgtccggcataaaggcggcgtgaacatggtcctggctctcgtgtggaacgtgggaacctatcccctaatgttaagggagaaacacaagtgggaggaccccacaagtgtgagagtaccgatgcaggggaataggggcggaccagcccgtattagtgatgaagtctctgtaatggagatagagcgaaggggttgggtcatcctgcttgatttaaagatcaaccaggagatgggaggaatctttgatgaaagcaaagccatttgagatttccaagaaagttgtattggaagcgtggaaagaggtgaaagcaaaccgtggagcagcaggtgtagataagaagtcgattgcggattttgagaaggatcataagaataatctttacaagatctggaatcggatgtcatcggggagctactttcctccaccagtgaggacggtagggataccaaagaagagtgggggagagaggttgttaggcatacccactgtggctgacagagtggcccagacagtggcaaagaggtaccttgagcctttggtagagccatactttcacaaggactcatacgggtacagacctggtaaatcagcgattcaagcagttggagtgacgcgtaagcgttgctggaggtatgattgggtgcttgaattcgacatcaaggggttatttgacaatattaatcatgacctcttgataagggcggtaaggaagcacacaaactgtaaatggatgcttttgtacatagacagatggttgaaggctccatttcagggagaggatggcacgctagtgcagagagaaaaaggaacaccccaagggggtgtgataagccccttgcttgccaatctcgttttgcattatgtgtttgataaatggatggagcgaaattattcgcaagttccattttgccgctatgctgatgacggagttgtgcactgtcggtctgaagcagaggctttaaggctaagggaaaatctggaggctcggtttgggaagtacaatctcgagcttcaccctgagaagacgaggatcgtctattgtaaagatgacactcgtcgagatgagtatcccaacacgagttttgattttcttggctttacattcaggccaaggaggtcaaagaatcggtggggtaagtatttcatcaacttcactcctgccgtgagtaataaagcggcaaaggtgatgaggcagaaggctcgaagatggaaaatacacctgcgaagtgacatgtccttagacgaactgtcaaggatgctcggtcccattatcaggggctggatcagttattacgggagcttttataaatccgcgctgtacccaattttgcgacatctgaacaggatattagttagatgggcaatgaggaaatttaagaggtttagacgccatcgtaggcgtgcggaatactggttgggggagattgcccaaaggcagccctggctatttccacactggcagatgggtgtgagacctatggctggatgatgggagcccggtgagctgagaggttcacgccgggttctgagaggacgtaggggggaagttcccctgcgttactcacctcattgtctg

SEQ ID NO: 3162 - DNA, 1961 bp, Methanosarcinales archaeon
  source 1..1961: mol_type = genomic DNA
ataaatgtgggagtgccgagctaaatgcataatatccagttggtgaaaatccaacctgaggaaaggttagcagccacctcagaactgaaccttgcatccagtctagtaacaggctgtggtgaagccagggggatgggatactgggccgcaacgcaagtgaagggattcagccacgaaatatttattgttccggaggccgacgttgtcctgttgacggaaggcaatactctcgtcaccgctagtcttaataggacatggcgaggtgatgcgagcccggcggggtccgagaccgtggcacggtatcaaatggatattatgcgaactcgggaggcccagaatgttctcctttcaagagtatgtcctatcaaacctataaacggtaagatggtacagacaacactctgggagtcggaccagttcatagtaccggtgaagcagggtaatgccttcagagggaagggactggcaggagcgcgttggaccggcagggacacaccttccatactcagagatgggcgagaggtgtcaacaaaactgtggtccataactctacgagctagagaagatccaacctgtaagtttacgtctttagcgcacttacttacggcggattttctcaaggaatgtttccgggagttaaagaaagataaagctcctggcattgatggggtaacatggagaaagtatgaagagaacttagacgagaatatagacaatttggtaacaagattgatagcgaagcaatacaggccacaaccagtcaaacgagcctatataccaaagtcaaatggggaacgaagaccgctaggaattccatctctcgaagataagatcgtccagttggcgataaagagaattctggaggctatctttgaagaggtcttctgtgacgtatcatatgggtttcgacccaaccgcagttgccatgacgcgctggacatggttgacatgatcatcatgaccaagccggttaactctgtggtggatatggacattacgaagttctttgacatggtagatcacgaatgcatgatggaatgcctgaaacaacgtgtggtagacccaagtttgctgcgaataatcgcccggttcttaaagtcgggagtgatggaggaaggaaaatatcagaagactgatagaggcactccacagggagggatattgagtccgatacttgccaacatatacctccattatgcgttggacctttggtttgagaaagaggtgaagaagcagttaaatgggtttgctcagctcacccgttacgcagatgacttcattgtctgttttcaatacgatgatgaagccagagcgtttgggaaggcattaagggaaagactggctaaattcagactgacgatttcggaagagaagagcagaatcattgcgtttggtcgttatgcctgtcagcaagcaaggaagcagggtaagaaatgtgcaacttttgacttcctcggttttacgctctactgcgataaaacccgtaacggtaaatttaaagtggggcgaaagacatctagcaagaagttcaggcagaagatgaaaataatgaatctgtggctaaagggcgttcgaaatcgcatgaaattagagttatggtggccattgttagcacaaaagatgattggacattatcagtactacggtataagtggcaatatacggggattacagagtttctactatcatacgacggaattcgcctttaagtggataaaccggcgaagtcagaggaagagctataattggagtcaattcaatcgttttctctcttttaatccattgccaaaaccgaagatatatcatttctatgccctatccaaacaaaagtagaggatgtactcctgaagagccggatgagggaaaacttcatgtccggttctgtgagggggctcatagtaaccttggagccattactccaacagaaggtggactatgagccctactcgacgcatctgtgt

SEQ ID NO: 3163 - DNA, 2126 bp, Methanosarcinales archaeon
  source 1..2126: mol_type = genomic DNA
gttctctgcctgttgacaagaagttgcatcacagattgcctaaccggctgccccctccattcggggtaatcctaccgcggaatgcgtggatggtaacgcccacgcagtaagcctgcggaacaacgtgaaaaatcagaaagtccgattcggatcaatcgccaggataaagaacgctatgaagagtgtaatgcgaaccatcgaaagagtcgtaacgcaggataagcgaaagcggactgttacgcttagaccaaaaggtacgaaatcagactataacggctgcagagacgttatagggaatggacagacggtttccggcttacaggtggcttctaaggcgttcataattatctgtgatgtagaacttggtaagcccaatatgctcccggaaaatccgggtagggatcccgtgagggcgaacgatggcatagtgggtagaggaatcgataaaaagcaaatgtcgatctgtaatggatcgaatagaggttcaaattttgccttaacccgaaagggtgctgacttatcgagtggtgtctcattgcatgaacggaggcaaacctgtgaatgtaagtaattcaattacgcccttaaaaggcgagagacttacagacaagcggccaaaacccctgtggaatgataccgactggaagagggtcgaagaacatgttaacaggctgcaaaccagaattgcaaaagcagttaagcaaggaaagtggaatttggtcaaaaggttaagacatctgctaactaactcgttttatgcgaaattgttggcagtaaagcgtgtaacccagaatagagggaagagaacagcgggaatcgatggcgtgaagtggacaacacagaactccaaaatgaacgctgctcttaaattatccgatacgaagtataaagcaaagccattaagaagagtctatatcccaaagcctggaacgacgaagaagcgacctttaggaatcccaaccatgtacgatagggcgatgcaagcgctgcacgctctcgcgttacaaccgattgcagaaacaacagcagatccacgctcgtttagcttcagggtgcatagaagcacacaagatgcgcgtcaatacgcattctgttgccttggtgggaaatacactgcaaaatgggtttgggaaggggacatcaagggctgctttgataatatcaaccatgactggcttctggacaatattccgatggataaattgattctaaagcaatttcttaaggcgggatttgtgtataatcgacatttgaaccccaccacagcgggaacaccacaaggaggaattatctccccgatactggcgaatatgacactggatgggatggaaaaagccatcgcatctgtgtaccaagttggtaagaatggcaaaatcgataagtgtcgatataatccccataaggtgaatttcgtgagatatgcggacgattttatcgtcaccgcagactcgaaagagacggcaaaggagattgctgagttgattaaagagttcctgaaggcacgaggtctggaattgtcagaggaaaagactcatatcacctatatcgattgtggctttgactttttgggctggaacttccgcaaatacggagaagagcttctgataaagccatccaagaagtcgattgggaatatcatctgtaaaatcggtgatgtgatcaagcgagcgaaggcatggaaacaggaagacctcatcaacgtattgaaccccatcattactggctggtcgaattatcatcgatcggctgtagctaaagagatattcagcaaattagatcatattgtctggaatatgctctggatgtgggctaagaggagacacccggacaaacgtaatacgtgggttgctaacagatattggcattctgtgggaactcggaactgggtgttctctaccggaaggaataggttgagactattctcggatacgaagattgtccggtgtgccggcttgaaattggataagaacccctttattgaccaagactactttaactttcggaaccgttgcccgatactgaaagggttatgagatgcttgagcggtatgaggtgaaagtctcacgtaccgttatgagatgagaaggggcgggtaaccgccctattcttaatctgcgtgctctgcg

SEQ ID NO: 3164 - DNA, 644 bp, Amoebidium parasiticum
  source 1..644: mol_type = genomic DNA
taacagacgcatgaatgtcttggaatgaaaatggaaacccacgtattggattcaaacagggtgaagtaaactttcctttttatggcatgtgtatttagaacttatatctttaacatctagtttccctggcattcgacaatcaatagtaagaggaaagtctcataattcacactcttttgatacaaaaaatctccaatgcttaaatgaactaagcaatattctgtacactaatataaatggtaaaatggtaaaatctattaaaggagaactatttgattatttaaactacagaacattagcgtacatgataatgggagatggagcgcgcaaaaataaagggtttgtaatatgtctcgagaatttcacacttcaggaagtcgttttactattaaatatgttagcaatcaaatttaatttggaggacctaactattcaaactgaagactctaaaccgtctccttttaaaaaagaaaaagaggaaattaagaagatttatagaatctactttggaatagagggaaccaaaacattattacctttcattaaaccttatttactagaccattttgattatcgcatatcgggaatgactaaagcacagtatgaacaacgtggtgtaaagcataaatcttaggtagtaggag

SEQ ID NO: 3165 - DNA, 680 bp, Mesostigma viride
  source 1..680: mol_type = genomic DNA
agaaaattggatgccgcgatttttttgcataagtgatccacatttttccctaaattcttctttatttctttccgtggtcactgcaatttctgcattatcagatcctttagatatttggatagaaaaatcgttcggaaatgaaaaatttttttattcacgttttatggatcaatgtattgtagcatgtttttcagacgctgattttttaaattcaaaatttgaaaaaatatcacaaaaatcttgttggaaattttctaaatgtttttccactgttccttttttgggtggcacgctaattcactcttcaacaaggaaacccattgaatctaatgagctaaaaagtattaataatattaacagttcttggaaatggaaaatttcatggaatgttcttataaggttttgtcaaaatgaaagatattttcatcaaaattctgcaaaacctacggctgtgccctaccttgttccacgaactcatgaagagattttggctcattataaaaaattaatttttcttttttatctttattacaatcctatgcaagatcaccaagcattcaattgtttagtagatggtttaaaggaatcatgtatattgacattggcccttaaatataaaatgaaaagtagaactaaaataattcaaaaactttttcctcaaaagctgtaggagtttttct

SEQ ID NO: 3166 - DNA, 2817 bp, Azotobacter vinelandii
  source 1..2817: mol_type = genomic DNA
gcatgatgtagtgcgacgagagtcgctataggtaggagtacctagcgggctacatcctaggcggtcaccacatggttggtggccgcttttcccgcaaaacagctctaaaaacccgagatccgggcgacaaaagcccggattcagggtgccgtcaaggcgctaaggattcggcaattcgttgcctaaatatccggtcttccaccgtggagaccataaaacgatattcgtactgagcctgtatttcgcgttttgagtacaggggaggtatgggagatcgtgtccaaaagctggctgctcctatccgtagggcgcaagccatagctgtcattgtctcacccgaaaaccgcaaggtggccggggcgcgagaccttctgttcagccagaaagtagcctagggacagtgcgtcgccggtaacggcggggtgcgaagcgtcctgacaatgtagccccatgatgtctgtggtgcgtggtcgccgcgaggcgccatgcagaccctgcgagcaacacgcgggcgaggcgctaggctgggtggtacggccaacgtaagtgaactgctgataaacaccgtcaaccgcatggagccaaagttgctgacaggcttcgaccaaaagggtgcgtgactggttgtccctcttacatctggggacacgctgacatcgagtcaccggtgaacaggcagggcctaacccactcttgtgatggttatggaactcggtaagcccgtattttcgccactggctggtagagcgggggcaggtcgaccgcaaggaaggctgttgaaagtgcgggtaaaggaggtcggaaaaagcgaatgccgccctgtaacggggctggataggggccgttgccccgacccgaaagggtgcccacttccgactggtctttgatcgcgaaaaggcttgtaaagccataaaagctggcgtcgttcggtccgaccggcggcgtctgaacagaaatcctcgcggggtagtgaactcactccccgcaagggcgacgtgcgtccgctgctcctccggggaaatcttctttggaggaaagcaagatgagtgcgtctgaaaaggaagtacctgcgtcctccctcccggccagcagttggcacacgatcgactgggcaaccagtcatcggcgggtgagagggctacaggtacggatcgcgaaggcagccaagaatcggcaatggcggcaggtgaaaaccttgcagcgcatgctggtccgctcgttcgccgccaaggcattggcggtcaaacgggtcactgaaaaccggggtcgcaggactccgggcgtcgacggggaaacctggagcacgcctgaaagcaaatggaaggctatttttcggttacagcgcacgggctaccggcccaggccgttgcggcgggtgtacatccccaaagccaacggccagcgccgaccgctgggaataccgacgatgctggatcgggccatgcaggcattatacctgctggcgctcgaaccggtgtccgagaccacggcggaccggaattcctatggctttcgtcctcaccgttccacggcggatgcaatcgagcaattgttcgtcaacctcggtcgcaagcactccgcgcagtgggtcatggaaggggatatcaaaggctgtttcgacaacatcagtcacgattggctgatcgccaacgtcccgctggacaaggcggtcttacggaaatggctgaaggcgggatacctggaatccggccaattgaaccccaccggggcgggaactccgcaaggaggcatcatctcgccggtgctggccaacctggcgcttgatggtctggaaaaggcgctcgaatcgcgattcgggcaacgcaacaccaaagccagctacaagaccaaggtcaactatgtgcggtatgcggacgatttcgtcatcaccggcatctcgaaagagctgctggtgaatgaggtgaagcccgtcgtcgccgccttcatggcggagcgcgggttgagcctcgcggcggaaaagtcgctgttcacgcatgtatcggaggggttcgatttcctcggccagaatgttcgcaagtacggtgacaagctgctgatcaagccagctcaccggaacgtcaaggcatttctggccaaggtcaaggcgttgatcgaggggaacaagacggctccggccagtctgttgatagacaagctcaacccggtcatccggggctgggccaactatcatcggccgatagtcgccaagcagaccttcaattacgtggattaccggatatggaagttgttgtggcggtggtgcaggcggcgacatggaaatcgctgcaaacgttggatcaaggagaaatacttcaagcgcatcggtacgcgcagttgggtgttctccgggcggtatcccagcggcaaactggccacattgctgtacgccgacgacacaaccatacagcggcacaagaaaatcagagcggaggccaatccgtacgacccggaagacgagatgtacttcgaggaaaggctggaatacgcctggcggagatcggacgaagggaaacggaaaacgctgaggctgtggctaggccagagcaagcgctgcccgatgtgcaagcagttgatcacgttcgagacgggatggaacatccaccacatcatcaagcggcacatgggcggaggcgacgagctggacaatctggtgctgttgcatcccaactgtcatcgacagctacacagtgcggcaccggctctttcgattgagaaagggcttacaaaggcttgagccgtatgcggggaaactcgcacgtacggttcttaggggaggggtggccagcaatggtcgctccttacccgacagccctgtcg

SEQ ID NO: 3167 - DNA, 1879 bp, Azotobacter vinelandii
  source 1..1879: mol_type = genomic DNA
ctttttgctggtgcgcccagcatgggcgcactcctgcgggtgcaagtcccgccatgagctggtcacagcgaatgaagcgaagcgcaactgcgtgagggcgaccgagcgtggggaggaagcgcggagcgtaaatcgtgagccgatgaacaagaaccgcatagaaggcgctgccgagcagggcaagcgggccagtaaccgcgaagctcttgtgaccaaggcgaggcggcgtagatgcggcggttgtgcggtgaaggagtgcgttcttacctggggagatctcgcctcatgcctgaaagggcgacggtgtcgagccggagcgagaagtcagcagaggtcgtagtagccgcagtagcggggccgcagaggccagatgcgaaccggtgaaggaccgaacgagaggaagtgttggaaacgatgtcgatgtcggaggccatgcaccagaagcccgcgtgcgcggggcggcatgccgcaggccagggtgaagccccggccaaggtatcccgtggtgaagccgaaggcccgcgacatgagatggaaggcacagggtcggcgctgctggaagcggcgctgacgcgagagaacctgcggcaagcgttcaagcgggtgcgagccaaccggggatcggcgggcgtggacggtctggacatcgaccagacggcgcgcaagctggtgaccgagtggcctgcgatccgggagcaattgctgcgggggacgtaccggcccagtccggtacggcgggtgatgattccgaagccggatgggagccaacgagaattgggtattccgacggtgacggatagactgatccagcaggcgttgttgcaagtgctgcaactgctgcttgatccgagcttcagtgagcacagctacgggttcaggcccggaagacgggcgcatgacgcggtgttggccgcgcaatcgttcgtgcagtcgggccggcggatagtggtggacgtggacctggagaaattcttcgaccgggtcaaccacgacattctgatcgaccgcctacgcaaacgcatcgacgacgcgggagtcatccggctgattcgtgcgtacctgagcgcggggatcatggatggcggggtggtcatcgagcgggaccaggggacgccgcaaggcgggccgctgtcgccgctgttggccaacgtcctgctcgacgaggtggaccgggcgctggagcggcggggccattgcttcgtgcgctacgccgatgactgcaacgtgtacgtacgcagtcggcgggcgggcgagcgggtgatgaatctgctgcgcaagctgtacggccggctcaagctgagggtcaacgaagccaagagcgcggtggccagtgcgttcggccgcaagttcctggggtatgccttctgggcagcgccgaagggacaggtcaagcgcaaagtggcggccaagccgttggcgacgttcaagcagcggatcaggcaactgacgcggcgcagcggtgggcgcagcatggcgcaagtcgtgcaggagctgcgtccgtatgtgctgggctggaaggcttacttcggactgtcgcagacaccgagagtctggcgttcgctgggcgaatggctgcggcatcggttgcgtgccgtccagctcaaacagtggaaacgcggcaagaccctgtttcgggaactgcgcgccctgggggccagccacgaggtggcgcaacggatcgcggccaacagccgccgatggtggcgcaacagcggcaagctcctgaacagcgtgctcaacctggcgtggttcgaccggcttggcctaccccgactcgcctgacctcaagctctcgaaccgcccggtgcggacccgcatgccgggtggtgtggcaggggcgctgccttgacggcagccccctatgccgatcatgccggaa

SEQ ID NO: 3168 - DNA, 1879 bp, Agrobacterium radiobacter
  source 1..1879: mol_type = genomic DNA
ttggacgagggtgtgcggcgaggcacccgcagcagtgtgggagccgagctgcacgaaagatgagggtaggtccctcgaagccgaccgtcaggggtaggtttcaaaccactgcaagctgcgacggtaaagagccgtggtggtgagcgttgcagaaaaggcggatgttagtccgtcaggtaaggttcagagagacgagcgcaagcgaaccgctgatgacgtgtcgaaaagtgcaagatgatgtcgaaaccgggaggaattcgttagcccgggacgagtctggggggcgacctgatttctgcccagacggcatccggcatgaaggcggcgtgactcttcaccaggctttcgtgtggaacgcgggaacctgtcgctccgatgttaagggagaaacccaagcaggcggtccctgcgagggtgagattaccgaagcggggcacaggggcggagcagcccgtagtagtgctgaaggtcctgtaatggggctggagcgaaggggttgcgttgttcagctctggagcgtggacaaccggcgacgggaggatcctcgtggatagagcaaagccgtatacgatcccgaaaagggaggtgtgggaagcatataagagggttagagccaaccaaggagcggctggtatagatggccagacgattgcggacttcgaggctgatcttaggaacaacctgtacaagctctggaatcggctggcgtcgggcagctactttccgccgccggtgcggcgggtcgacatacccaagagcgatgggaagacgcgcccgctgggcatacctacggtcgccgatcgcgttgcgcagatggtggtcaaacgccatctggaaccggtggtggagcctgaattccatccggattcctatgggtatcggcccggcaaatcggcacttgatgcgatcagcgtggcacggcagcgatgctggcgttacaactgggttcttgatctcgatatcaaggctttctttgatagcattgaaccggacctgctgatgcgggctgtgcgcaagcacaccgattgcccgtgggtgcttttatacattgaacgatggctgaaagcgccagtgcagatgccggacggaaatctcgtcgccagagaacgaggaacgccacagggcggggtgatcagccccctcttggcaagcctgtttcttcactacgcgtttgacatgtggatgtgtcggaatttcccggacattccgtttgaacggtatgctgacgacgcgatctgtcattgtcggagcgaggatcaggcgatggcgcttcagaacgctctggacgcgcgttttactgactgtgggctgacgcttcatcctgacaagactaaaatcgtctactgcagggatgaaagtcggcgaggtactcatccggtctacaagttcgactttctcggctacactttccggccgagacttgtgagtaagaaggccgggggcatgggtgtttcattcggtcctgcggccagtccgacggcgctcaaggcgatacggggcacgatccgtagttggtccttgcaccttcgcagtgacaaagctctcgatgatctggcacggatgttcaactcgtacatccgcggctggatcaattactatggtcggttctgtccttcagctctccaacctacgctttggagtgtcgagcgatacttggctcgatgggcatcgggaaagtacaagtccttgcgtaggcataaacggcgatcccggcattggcttttgcgcatcgcgcagcgccaacctcggctgttcgcccattggcctctgcttcatggatacggtcgaacaatgggagccggatgatgcgagagtatcacgtccggttctaagagagcgtgggggtggaactcccccgcgccactcgcctcctgatttc

SEQ ID NO: 3169 - DNA, 2512 bp, Alistipes shahii
  source 1..2512: mol_type = genomic DNA
aagtatttgtgtgcgcccgtacaagctgcttagtaaatatcccactggcaagggattaggtaagtgttctttgaaaaacctatcatcacccgacttatccgaaagggaaaccggacggggagtgtagcatgtcgggaacgtcgtaagtcagtcagttaccagactgccactgaacggcaagatgaaacgatggatatgaggatgaaaaccgaattgtttgaacgacagtccgagctgctctacttgaaggctatgacgtaaggtaactgaaatcgtcatactgcggtactgctccggtgtataggtacggacgcaagcaagaacttgccgcagagcaaccatgataaatggtaaaggacggaaatcgcatccgacaatccatcatgccaacagttactaagtaagtaaacggggattacctaaaccggaacgccgtaaggctatgaggtgcagacctctgaatatccggcacggtaacggagcctccgtagtagtccgggcagggtaacgccctgcacatggcgaagggaggcagctaattttctttaatacaatttaatggataatgtgagagacattatgagaagtccggaaagagtattaaacagtctgaacgaacacagtaaggattcgagctacaagttcgaacgcctttaccggattctgttcaacgaagagttgttctatgttgcctaccaaaagatcgcatcgaacggaggcagtacgaccaaaggctccgacggtcgcagtatcgacgagatgagccttgcccggatcgaaacgctgatagcctcgttgaaagacgaaagttatcagcctcacccgtcgcggagggtgcatatcccgaagaaaaacgggaaaacgcgccctctgggaataccggcttttgaagacaagctggtgcaggaggtagtccgcatgattctggaagccatttacgagggacattttgagaccacctcgcacggtttccgacctaaacggagctgtcacactgcattacttcatattcaaaagacgttcagcggggcgaaatggtttatcgagggcgacatcaaagggttcttcgacaacattgaccatgatgtacttgtcggaatcctgcgggagcgcatttcagatgaccgttttatccgtctgatacggaaattcctgaaagcgggatacgtcgaggattggacgtttcacaacacttacagcggaatgccgcagggaggtatcgtcagcccgattctggcgaatatatacctcgataaattagacaagtacgtgaaagagtatatccgacatttcgacatgggaaccaaacgcaggccgggcaaagagagcaacgatttggccaatgaacgaaaacggactgtgcggaaactgaaaaagataaaagacgggactgagaaggcggctttggtcgcaagactcaaagccatcgaacaggaacgtgcagcatttccaagcggagatgaaatggacggaagttaccgcaggctcaaatacatccgttacgccgacgattttattctgggtgtaatcggtagcaaagaggatgcactgcggataaaggaggatattaaatcattcctatccgaaagcctcgccctcgaactgtccgaagaaaagacgctgataacccatacgggtaaatcggcgaaatttctcggatatgagattacggtaacacggaacaatcatcaacgacgggatgtgcaaggacgtctgcgacgcacctacggcaagcgtgtccggctgaatgtcagcatggcaacgctgcgggacaaacttctggaatacggagctatggaaatcaagctccgcaacgggaaagagatttggaaacccaaatgccgttcaggattgatattcaacgacgatcttgaaatcctcgaccgatacaatcgggaaacagtgggattttgcaactattacctgatcgccaacaactgcgtcgtactgcacaacttcagatatatcatggagtacagcatgtataaaacatttgcgggcaaatataggagcacggtacgaaaaatcaacaaaaagtaccgtctcaacaaactgttcaccgtaaagtacgagcagaaaggggtaatcaagtcccgaaccttttacaagacaagtttcaaacgccggacaacggcgttcaacggaagctgcgacatcgaaccgtactctatcgcagacgcgagccgaaccaatttgacagacaggctcaaagcggaaaaatgcgaattgtgtggggcaacgggcaagctgattatgcaccatgtccgcaacctcaaagacctgaaagagaaagagagttggaaacggctcatgtcagcccgaaaacgcaagaccattgcgttgtgtccgagttgccacaggctgcggcatctgggaaaagtttagactgaaaaaaaaaattagtggagagccggatacgccgagaggtgtaagtccggttcgggggcgagttcttggaaacctgccgtagaaatacggtaaggcgccgggtgcttagcctacataaaacctg

SEQ ID NO: 3170 - DNA, 2007 bp, Wolbachia sp.
  source 1..2007: mol_type = genomic DNA
tcagtaccaagtgcgtccagagaaggcgagtattgttcagtaggaaatagacctaccaggataaaagtcggaatcctgtagcttgggtagcagcataaagggaaaccaaaatgttgaagcctaccgacaacattatcgtaggataatggcgaattaccaggccgtagcgaaagcgaatgcacagattgcctcgaaaggaatattctgaaggtcgagccatcttggtactggcgaagacagaatagaccagacgaaaaacgaatgaaacgattggtctacttcagcggggtgttagtaacagcatggcaatgaggacatacaaagcaactggagaagccctcctcatcccaaggagaaacaccttggagaggtaggttctataactggaaaacaggaagtgaactgaagatgagagggtgacggatgggtgcgtagtagtgaagaagtgaggtaacgctcatggagcaaaggcaccctactagcagggatcttttaacaaaaggaaggtaaaggtaaaaatgacaaaaatgccgataaaattacaagacctgagaagaaagatatacaccaaagcgaaggcagaaccggaatggcgattctggggaatccatgttcatgtctgtaaaatggagacactggaggaagcttacaaactaacgaagaggagtaatggggcaccagggattgatggggtgacattcgaatcgatagagacagagggctcaagaaagtatcttcaacgaataagacacgaattaataaccaagacctatagcccaaataggaaccggagaaaggaaataccaaaatctggagaaaaattcagaacgttgaacataccctgcatccgggatagaatagtgcaaacagcactgaagctaatacttgaaccgatattcgaatcagacttccaaaaaggatcatacgggtatagacctaagcgtaatgcgcatgaagcagtacaaaaagtaacggaagcagcaatcaaaggcaatacaaaagtaattgacgtagatctaaaatcctactttgacagtgtgcgacatcatattctgatggaaaagattgccaaaagaataaatgacaaagaaatcatgcgcatgattaagctaatcctcaaaataggaggaaaacgaggaatggcacaaggatcaccactttcaccactactaagcaatatatacctaaatgaggtagataaaatgttggagaaagcaaaagaggtgaccaaagaaggaaagtaccaacgtatggaatatgccagatgggcagatgatttggtgatactgatcagagaatacccgaaacgggaatggctagaaagagcagtatacagaaggttggaagaagaattagcaaaactagaagtgagagtaaatgaagaaaagacaaaagtcattaacctaaagaaaggagaaacatttagcttcctagggtttgattttcaagagaatatcacaaaacaaggaaagtggaatgtcaggaaaacaccgcagatgaaagcacgaacaaacctgctacgcaagttgaaggaaatatttcggcgccataaatcgcaaccgataaaaagagtgataaatgacatcaatccgatattgagagggtgggtaaactactttaggataggaaactctagtcgaaagttcagttacgtaaaacactgggtggaaaagaaggtaagacgcaatttaatgcgagccaggaaagcaaagaaagggtttggttggaagaaatggagtagcgaatggatatacaaaacgctgggtctatattcagactacagaataaggtattacagaccgaaagcatcaccaacacaatatgtgataaactttggtaaagaacttgctaggaaagcgtagtgcgggaaaaccgcatgctgcgtttgacgaggcgggagctggaaacgttaacatgggaatttggattgaggcccaggatgaaaataatggatcagccaccaaaccctaaagaggcgcgccagttctcgaccctacagatgcgctt

SEQ ID NO: 3171 - DNA, 2422 bp, Xylella fastidiosa
  source 1..2422: mol_type = genomic DNA
tggcaagctcgtgcgacgtgaagtcgcttgtttcattgcttcaccgcttcggcgtgatgaagcctgatgttccgtcatcagtagcctatcggtgcatgcgtggttggcaacgactgcgtgtgaagccaccgagacaatgtaggtcggcgaaagccaggtggagaccgcgaggtcgaaaccgcatctgcgagcgccaacgcggatggatcgctagactggtcggtatggttaacgtatgtgaagtgctgataaacaccgtcaagatgaaagagccaaagacgctgacaggctctacccaaaatggggcgtagctggacattcctctgagctttgggaatgcacggacacgaaagctaccggtggagaggcgcaacctaacctgacctgtgaatcaagtggaacacggtaagcccgtatctctgcccctcggggcagacagaccgtaaggaaagttcatggagatgcgggtagaggaatgtggaaaaagcgaatgccgccctgtaatggggcggataggggctgagccgcgaggcaacatcgcttcacgtgaaaacgggcagacttccacttggtctttctttacgagattgtttgaagaacctttttaggagagaaagcaaatgactacgcaagctgcttgcgcgggtgcgctctccggcgactcgggcggatggcactgcatcgactgggccaactgccaccgggaagtcaggaggctgcaaacgcgcatcgtaaaggcgacacaggaaggccgctggggcaaggtgaaagccttgcaatggctgctgacccactcgttcagcggcaaggctcttgccgtgcggcgggtgactgaaaaccagggcaagaagactccgggtgtggacaaggtggtatggggcaccccggaaaagaaggaaaacgcagtagatgagttgcggcgccatggccataaagccagaccgctgaggcgagtctatatcccgaagtccaatgggaagctacggccattgggtatcccaaccatgagagatcgcgcgatgcaggcattgcatctgctaagtctgctcccggtgtcggaaacccaagctgatggatgttcctacggcttccggcccgagcgttcagtggcagatgcagtcgataggtgcttcagggcgcttaatggacaacattccgcccaatggatactggaggccgatatcaagggatgcttcgatcacatcagccacgactggcttctgggcaacgtgcccatggacaagcggatgctggaaatgtggttgaagtgcggcttcatggaagcaggtgcatggtcggaaactgaggcagggacaccacaaggcgggatcatctcgccgacactggcaaacatggcgctggacgggctggaacaactattggaacagtccttccgctcaagaatgcgagatcggcagatcaccaacccgaaggtcaaccttgtccgttatgccgatgactttgtgatcaccggagactcagagaagcttttgatcaaggaggtcaagccactggtggagcgattcctggcggaccgtggactcaccttgtctgcggagaaaaccagggtgacgcacatcgacgaaggcttcgacttcctcggccagaatgtgcgcaagtacaaagggaagttgctgatcaagccatcagcagcgagcctcaagaattgcgcagacaaaatccgggccatcgtacggtcgaacaaggcagccaatcaggcatcgctaattcacctgctcaaccctgtgatccaggggtgggcaaacttccatcggcatattgttgccaagaagaccttcaagtctttggatgatcatgtctggagggccctgtggaaatgggctctacggcgtcatccggcaaaaggcaaaaagtggattcggcatcggtatttccatgcgtagcgtggtcgtcaatgggtatttgcagcccgatacgtggactcttcgagcaaagaggctcgatgggcaaccctccgtaaggcagtagacaccaagatcaggcgaaatacgatgatccgcatgggtgcgaatccattcgacccggagtgggaaacctactttgaacagcgcctcggcgccaagatgaaggacaacctacaaggtcgaaaacgtctattgcacttgtggttggaacaggacgggaagtgtcctgtatgcgacgaaccgctgacgaaagaaagcggctggcatgtccaccatatcgtccgtcgcgtcgatggtggttccaatcaaagcgggaacctggtgatggttcacctgaactgtcattaccagatccacaaccttggtttggatgttgtgaaaccggctccagcaatggggctttgaaaggcttgagccgtatgaggggaaaccttcacgtacggttcttaggggaggatgtggtggcgacgccatgtccttacccgaccacataggca

SEQ ID NO: 3172 - DNA, 1884 bp, Zunongwangia profunda
  source 1..1884: mol_type = genomic DNA
ggatgaaagtgtgtgccttgaagcggcctaaagtaatgccgcaggctgttagattgatggtggtagacccaccgtaggggttgacagacagaccctacaaaccaccttgtggtgctttatttcgaaagaatgaggtgctgagcgacaaggaaaaggcgagagaatactcgtcaggtgaatttcagtgagctgaacgaaagtgaatcactggttaagttaaagtaccgatatcgccagattctgtcgaaatcggagaattgtgtttcttctccgagaataaaacttagtggcagtaacctgaagttgactaagtgacaggcggtacagaggtggcaggacactgaaataggcgatctaacggaacaagggaatttgtacagggatggtaagggaaatgcacaagcggaaaccccgtgaggcagaaaaccaatgaactgtacagaggcggactaagccgtagtactgcagaagtctctgtaatggagatggagggaagggcttagccagattagttttatgtaagacacaactttgaaagaaggatgattgattattatgaaacaaaacaacatccaataaccaagaaaatggtattggatgcgtacaagaaagtaaagtccaaaaagggcagtgccggagtcgatggacagagtttacagaattttagggagaacctctctggaaatttgtataaaatctggaaccgtatgacctcaggcagttattttccgcctgttgtaaaggaagttcgtataaccaagaaaacaggaggctttcgcagtctcggaattcctacggtatcggatcgcattgcgcaacaggtgattaaaagttacttagaacccaaggtggaaagcagttttcatcagaatagttatggatacagacccaggaaaagtgcgcatcaggcactggagaaaacagtgtccagatgtggttattacagttgggtggtagaccttgatattcgtggattctttgataacattgaccataccctactgatgaaggcagtagaaaggtatacaaaagagaaatgggtgttgatgtatattggaaggtggttgaaaacaggagtatccagagaaggtgaaatcaccgatagaataaaaggtactcctcaaggcggcgtcattagtccgctacttgccaatatatttcttcactttgcattcgataaatggatgcaaatccatcactccaatatgcctttcgaacgatattgcgacgatgccatcatacattgcacatcagagaaacaagcatatttcattagagaggctgtttctaaacggatgaaagcttgtaagttggaactcaatagtgagaaaactcacattgtgtattgcaagaatcacgtgcacagcgaaagtcacaagaatacaagttttgattttctcggttacacgttccgccccctcagacgaccaaccaaaaatggttggaaactgacttactttccagtaatgagccacgcctcaaagaaagaagcaaggcgaagacttaagaaggttgtcaatagaaagtttcggggatccatccaagaactggcacagataatcaaccctatgataaggggctggtatcaatatttttgcaagtattcgaaatggacaacccgtggactatggtattggttaaacaggaaaatagttagatggattaggaggtacagaaagcgcagtagagtgcaagctcgaaaatggctaaaaaatgtgtacaagactaacccacaattgtttgagcattggaaacctgtcttagatataaaaccttactaattgtaccgttaatctggaagcgccgtatgatgggagactatcacgtacggtgctgtgagagacttggggtgaaattccccttgtctactcgacccgataaagg

SEQ ID NO: 3173 - DNA, 1906 bp, Zunongwangia profunda
  source 1..1906: mol_type = genomic DNA
acttgcgatagtgtgccgagcaaacaatgaccggcaataaatagtcattgtgaactataattaagatggtagaatcgacctaccggtgtcgtcttataggagaaggcatcaaaccaaccaaagatgctttggtaaagagccaaggtattgagcgtttaggaaacggccagtcaagaattggtcaggtatgattaagagagatgaacaaaagtgaaccccttctgaggtgtcgagaagttgctacatcctgtcaaaagccacgaagtatcgcacggggttaaagagtatagcagttacctatttattggctatacggcaggcgtcattcagggggcatgactcttattcaggcttagttatggaactcgggaacctgactatagatgctaagggaaatacacaataggctcaacctagaggtagaataccaatgctgttttcagggacggactaacccgtagtagcaatgaagttcctgtaatgggaatagagcaaaggggttaggttatacagttacgttacatttaacaactcagttttgaggatgactttatgcaatgaaacaaaatcaatacctataagcaaagctatgatatggcaagcttataaaagagtgcgcgccaacaaaggaagtgcagggatcgatacagtaagcattgagcaattcgatgagagtttatcaaagaacctgtacaaactttggaatcgtatggcatcgggaagttatttcccccctgcggtcaaagaagtggaaatcccgaaaaaggatggtaaagtccgtaaattagggattcctacgataagtgaccgtatcgggcaaatggtggtaaaaatgtacctggagccccgtttagaaaatgtattcaatccaaactcctacggatatagaccaaacaaaagtgcccatcaggcacttgaacaggtcaggaaaaactgttggaaaatggattgggttattgatctggacattaaaggtttttttgataacattgaccatcataaaatgatgcttgctatagaaaaacacgttcctgaaagatgggttaggttatatatagcacgttggctcgcaagtccagtaatgacaaagtcgggaaatttagtctctaaccagggaagaggaactccccagggaggggttataagcccattactggccaaccttttccttcactatggtttagataaatggctggaacagaacgacaatacggtgaaattcacacggtatgccgatgatgtgattgtgaactgtaaaagtcaaaagcacgcagagcaaacacttgaagctatcaaaagcaggatgcatcaaattggtctggagttacatccagagaaaaccaaaattgtatactgtagagattaccgaaggcaagaaaagtattccaatgtgaagtttgattttctaggttattcttatcaacctagaactacaaaatcgaagaaatcaaacggactctatcttggctttgattgcggcataagtataagttcgaggaaacgaattgcagataaacttgaagaattgaaagtagagcgaatgacttctgatcgtatagtaggaattgctgccattctcaatccaatgattaggggatgggtgaactactatggtaaatttagaaggtcaatgctacacaaagtcttcaagttattgaataatcgaatcgtgaaatgggcaagaaaaaggtataaacgttacaaaaccagtataaaacgtgcctatcaatggtttgaaaggattaaggaacaatatccaaaactattttatcattggcaggtgggatttgtatggtaatttgtaatttagattgtataacaagagccgtatgatgggagactatcacgtacggttctgtgagaggcttggggtgaaattccccttgtctactcgacaccgtaaccg

SEQ ID NO: 3174 - DNA, 1950 bp, Vibrio vulnificus
  source 1..1950: mol_type = genomic DNA
tcaagtaaaagtgtgccgtgggcacaggatcctgttatctaaggaaggtaaacaggagaatgagcataagctcatgaagagatggaggtaggccctccagagtctgctgtcggaagtcggctctaaaccactttcaagtggctgttattaagagtaatggtcagaagcgttgaaggaaagtcagaatagaattctggcaaggtagagtgcaaggagatgagtaatcccgaacccatgtggacgcgtcgttaattagaaccagcatcaaaactgaggtcgttttattatctcaggacgagtacaccggtaaattccgaatgctgggtgtgcggtgctcggcgtaaagtgggcatgactttgcactaggctctttgtgggaaccacgggaaccagtcatcacgatgtaaaggaagaaatataaatgactaaattcatgagtatgagagtaccgatgcgtgatactggggcggagcaattcgtagtagtgatgaagggcttgtaatgagcgtggagcgaagggattgcgtcaagtcggttggaacgatgactcaactgccgacaggcaggaggaggtcgcacggacaaccaaaaccttttgcaatatccaaatgggatgtaatgactgcgttcgagaaggtaaaagccaacaaaggcggagccggagtggatggagtaacgatagaggactttgaaaaagaccttaaaaacaacctttacaagatatggaacagaatgtcatcggggtcctactttcccacaccggtcgcagcggtaagtataccgaaaaagtctggtggagagagggtattgggtatcccaacggtcagcgaccgagtggcgcaaactgtggtaagagacaagcttgaaatcatgctcgagcatcacttcctagatgactcttacggctatcgagtgggtaaatctgctcatgatgcgatagaagtcactagaagacgatgttggcagtatgattgggtactagagtttgatatcaaaggtctctttgacaatattcgtcatgacttgttgatgaaagcggtaaagaaacatgttcagctcgctgaagagagtcagagccgggattatcaatggataacactgtacatcgaaaggtggttagttgctccgttacagaaagcagatgggacgcaaacagaaagagagttaggaacgccacaaggtggcgtggtaagcccagtgcttgccaacctatttcttcactatgtttttgataaatggctggagaagaattatccagacaacccatggtgtcgatacgcagatgatggacttgtccatgcaaggacaaagccgaaagcggagaagttgagggatgagctagcgaagcgcttcaaggagtgcggactggagatgcacccaattaagacgaagattgtttactgcaaagatgatattagacgagggtcaggtaagcatatagagcataaacaatttgattttctagggtataccttcagggccagaacaaataagtgtaaacgtacaggtcaactctataatcgattcctgcctgcggtcagtatggcagcaaagaaagtcatgcgaaggcaaatcagagagctaagagttcgccaggaaacgcagtacagcttagagcaattaagcagatggttaagtccaatgctgaatggttggataaactactacggaaagttcaggcgaagcgaattagactcggtattcagacacttcaacaagactttagtacgttgggcgagaaggaaattcaaatcgctaaaatgtcacaaaagtcgaaccgtagcgttctttgataagctatcggctcaatgccctagattgtttcctcactggaaatttggttcagcaagaagttttacttgatgggagccgtatgagctgagaggttcacgtacggttctgcgagaggctgctggggtggttccggtggcctactcacctcagttggtt

SEQ ID NO: 3175 - DNA, 2036 bp, unidentified
  source 1..2036: mol_type = unassigned DNA; note = unknown marine bacterium
tgagattatgtgtgcacagaggattgagcgagagtaaagcacatttaccccacataaattgctgaatcgaactatagataagatggtggactgtaagccatattttaaagtttatttaaatagaagattaaytgtagaggtcgagcgaacagactggctgagttagtcaataaatagctttaaattacaggtaaaaaaaaacaggattgaaccaccagcagggactgtcaagagtatctgctaaaccgccttacggtgcttttatttaacaatagaggtattgagcggctaaggaaaaggggcgatgaaagaatcgtttcaggtgtttgtacaagagctgaacgaaagtaaactgaccgatgagatgtcgaaactcatttaggcagtgttggaaaccgagggaatataatctgcttcgggacaagcacaagggtaacttgaatataccacttgagccaacactcggcgtataggcagcaggcttgtatatgggcttgtttatggaactgtggaaaccatcatatgttgtaaattgaaacaacacaagcggtaaaaccrcgaggttaaaagtagagatacatatgatggtggcggattaagtcgtagtagtgaagaagttcttgtaatgagggtggagcgaaggacttaagcaaacaggagttaacaattgcaacaacttaaaattaaggatgattgaggcgttaagaccaaaaacacaaccagtaagtaaagagcaggtatggtctgcgtggaaacgagtaaagcgaggaggaaaaggcatgggagttgaccatgttagtatggaagccatcgcatcgaatccacggaaatacctgtatccattgtggaatagactatcaagtgggagttattttcctccacctgttaagttagtgcctattcccaaaggagatggcaaagaaaggatgttgggcataccaaccataatcgacagagtagcacaagaagtcatcaaggcggaattggaagtcatagtcgaaccgaggtttcaccccagttcatttggctatagaccgcacaaaagtgctcatgaagccttggaacaatgtgcaaagaatagttgggaaaggtggtatgtggtagatttggacattaaaggattctttgacaacatagaccatgaaaagatgatggggatattacgaaagcataccaacaagaaacatatcctactttactgcgataggtggctaaaaacccctatgcaagacagggttggaggggtacaggcaagaatgaaaggaacgccacaaggaggtgtaataagccctttgttggcaaatctttatttgcacgaggcttttgaccaatggatatcgacaacacaacctcgtatagtatttgaaagatatgccgatgatattgttattcatacaagaagtatggagcaatcgcattttatattagacaaattaaaagcacggttgaaaagttattctttagagctacatcccgataagacaaagatagtatattgctatcgcactgcgcggtttcacaaagaaggtaaagagatacccgtatcttttgatttccttggttttacttttaaaccacggctttgtttaaaatcaaacggtgagaaattttggggattccgtcctgcaattagtaaaaagagtgagaaacggatattaggagagttacgaaagttaaaaatacatagatggatatatatgaatattcatcaagtatcacaacgcttaagagcaaaggtacgaggttggctaaattattatggtagatttcgtaaatcagagcttagttggattttcaggcatctaaacatccgaatttcaaaatgggcacggaataaatataagttaaagacttattccaaatcttatgggtggcttaaacgtatggtaaagtggtatccaaatacatctttacattgggagcatggctttacaggttaggtttgtttggaagagccgtatgaggggagactttcacgtacggttctgtgagaggtttagggtgaaatcccctttacctacttgactcgcttgtgt

SEQ ID NO: 3176 - DNA, 2735 bp, Crocosphaera watsonii
  source 1..2735: mol_type = genomic DNA
ttatacttctgtgcgattcgttgagctaaaaagctgacatccaagtacatcacaaggatacagcgtgtagctcattcaagagccttctaaaggcaattcaatggttaaacgaccaatctaccccaaagatgaaaaacaagagccttaaagctcaattttcaaggggcagaacacaaaggtcagaagggtaaaaacaatacccgaacggtaaaaaccaaagaaaagtttacaaacttaagtagtaattaccgaattaactaagtagggataaccgaacagtaaacgaacctagaaacttgaataactgttggtttgttggctaaaggagccatactcggaatcaagggagaaatcccgagagtaacgacataaccctccgttttggacttagtaaacccaggacggaagcagggataaaaggggatacccactgtgaaacagcacaagaaatcctcaagtcaatcggtcacggttaaacattacgttaaatcatcgacttgaaccctcaaaaaaccgaagtagccaaatctgtttgataggctgtgttcaaaagaacaaggtgaaaagtggagtttttgaagtaacatccgcacagattcctaaaagtaacctgggggagagatgaaacctaacaccgatatacccaaaccaacggaacgaattaagtccatgattgctcttaccactggtcggtaggtaagtaggaacaaacttaaccgcaagggtcatggatgtgagaagcaataagaagctaatgcctacttgtaataagtatggatatgctgacgtattgctggtctattagtaagaaatagtctttattagaggtagttaatgtcgaatgcgagtataaccaagactacgccagaatggaacacaatcaactgggcaaaagtccagaggaaagtgtttaagcttcaaaagagaatatttcaagctgttaaatcaggtaataaagttaaagctaaaaagcttcagaagttactgttaaagtcacactacgcaaagctcttagccatacgcaaagtgacccaagacaaccaaggcaagaaaactgccggagttgatgggaaaaaggcactacaccctaaccaaagaataaagttagtcaaagaattaactttaaaaggttacaaagcaaaggcactcagacgggtatggattcccaaccacagaagagatgaaaaacgtggattggggatacccaccatgaaagatagagtaatgcaagccttggttaaatcagccttagaaccatattgggaagcccaatttgagggaacatcctatggttttcgtccaggcagaagcgcacacgatgctatcaccagaatatacacagcaattaataagaaagctaggtatgtactagatgccgatatcgccaagtgctttgacaagattaaccatgattacctactgtctaaagtagattgtccacacaacatcaaaagaatcattaaacaatggttagaatgcggcgttatggacaaaggcatcttagaggaaaccgattcgggaacacctcaaggtggtgtaataagcccactattggctaacattgcactacacggaatgataaaagatacagaaaaccacttcccccgtacaaaacgtaaggaagatggaagtctacacagggagtataaacccaaaatcatccgttatgccgatgatttcgtagttctccacgaggattacgacgttattctacaatgtaaaactttaattgcacaatggctagaaaaggtcggattggaactcaaaccagaaaaaacctccatcagacataccctaaaaagtattgaacatgacgggaaaaccattgaccccggtttcgatttccttggattcaacataaggtcataccccgttggaaaacaccactccggtaaaacaggaggaaattcaaaatgggggatagaatccaaagcaataggtttcaaaaccttaatcaaaccaagcaagaaaaagatactggcgcatcatgaggcaatcaaagaggttgtaaaagccaacaagaaagccccacaagaagtgttaatcgcaagattaaaccccataatccgaggatggtgtaattattaccgaactgtaacaagtagagaaacattctcatccgaagattcaatattatggaatacacttagagcctggacagtaaacaggaaaaagaaagagacaccactgtatgatgccctcaaaaaatatttctcatacggaaaacaagggaaatggacattccaaacaagggaatatgtcctctatcaccacaccgaaacggaaattaagagacatacactggttaagcctgaatcatcaccctacgacgggaactggacttactggagcaaaagaagaggtacatatactgggacaccagccagggttgcgaaactcttaaagaaacagaaaggtatatgccctcaatgcaagcaacacttcacacctgaagacttgatagaagttgaccacatcatcccgaaatcgaaaggtggaaaggatacttacaacaacctacaagctctacatcgtcactgtcacgatgccaaaagcaaaaatgactacctctatgattggcacttataatggctatgaatggaaagacgatgtattaacagtaccctagacaagggactaattgccgagagccgtgtgaggtgaaagtctcacgcacggttcggaatgggaggagaggaaggtgacttccttttcgacccctaatcatctatccc

SEQ ID NO: 3177 - DNA, 2609 bp, Clostridium sp.
  source 1..2609: mol_type = genomic DNA; note = cf
gaaatttaccgcgcgtccagaagcgccgcttgtcatccgcaggcggtgtgcggacattttgggaatccggctttggcaagccggtaaagaaaagtatcaaagacgctgaaaaagtgtcgctttagcgtcagctggtttaccccggagggaaaccacaagggggacaatagcgtaccggaaacgtcgcaagttgggaaaaccatctacccacgactgagcggcaagacgcaacattgtgaacaaggaataaggctaaactgctttaagggcagtccgaggcgggatactcgacccggcggcgtaggatggttgtattcgccgtatgtcatagcggaatgtgacaggtatacacagaccgcaggatacttatgacagccagccgcagtaagcggaaaaggacgaaaacccactccgacatcacaatacgcttttcccaaagtgtctaactggagattgcctaaaccggaacgccggaaccatccggctatgcgtaatgccgcaaggtgaaaaatttcaaggggtaaaaacctaagaaagatgacgctgaatatccggcatggcaacggagccttcgtagtagtccgaggacgggaaagccgtctacatggcgaaggaaggcaggatgtcaaccaactcataaaaaggaaaggtgcgtgaggcattatgagaagtcctgagaatgtgttggaaagcctaaaatccaaggcgtgtaaccagagttacaagtacgagcggttataccgcaatctgtacaatccacaattctatctgctggcataccagcggatacaggcaaaaccaggcaatatgactgccggaacagacggcaagacgattgacggcatgggaatggcgagaatcaacgccctcattgaaaaaatgcggaattccagctaccagcccaaccccgcaaggagaacatacattccgaaatccaacggaaaaatgcgccccttgggaataccgtcattcgatgacaaactgatacaggaggtggtgcggctcattctggagagtatctatgagccaaccttcagcgaccactcccacggcttccgcatgaacaaaagctgccatacggcactcaagtatgtgcagaaatatttcacggggacaaaatggtttgttgagggcgacataaagggctgttttgacaatgtagaccatcacgtgctgattgccattctgcgaaagcggattgcggacgagcagttcattggtttgctctggaagttcctgaaagccggatatatggaggactggaactaccacaatacttactccggtactccgcaaggctctattatcagccccatcctcgcaaacatttatctgaacgaattggatcacttcatggcggaatacgcagagaagttcaactgcggagatcgccgtagaatcaatccggcgttcaagaagaaattggatgtctgccgggggaaagaagaacggctcaaaagaaacatctccaaaatgagcgaggaggaaaaagagggcttgctcgccgaaatcagcgaactgcggcgtagcttgcggtcaatgccgtacagcgaccagatggacgaaggctataaaagagttttctatatccggtacgccgatgattttctgattggagtaattggcagaaaagcggacgcagaacaggtcaaacaggatgtggggcactttatccgggaaaatctccatctggaaatgtccgaggaaaaaactctgattacccacgggcatgactttgccaagttcctgggatatgaggtcacaatcgccaaaggtgagtgtaacaaaaagaccagaaccggagccaccagacgagtaaacaacggaaaggtcctgctctatgtcccccacgacaagtggatcaagcggctactctcctatcatgccctcaaaatcagatacgacaaacagaatggaaacagagaggtttgggaacctgtccggcgcacccgcctgttgcacctggacgatttggaaatcctgaaccagtacaacgcagaaatccgtggattgtacaactactatcggctcgcaaacaatgtgtctgtcctcaacaacttctactatgtaatgagatacagtatgctcaagaccttttccggaaaataccggacacgaattagcagaatcattcagaagtaccgtcaagggaaagattttgttgtggagtatccgaagaaaaacggccaggttggaaaggtgctgttctacaacaacgggtttcgccgtgataccaaagtggaaagcggcaatcccgatgtgattgcaagagtgtttgagaactacggacgcaatagcctgataaagcggctgaaagcgagtcgatgtgagtggtgcggtgcagagaatgtaccgattgaaatacaccatgtacgaaaactcaaagacttaagcggcaagaaacaatgggaaattgccatgattgggcgcaagcgcaagacaatggcactctgcgttgactgtcacgataagttacacgctgggaaattagactgacatctggagagccggatacatcgagaggtgtaagtccggttcggagggaagttctcggaaacctgccatagtgatatggcaaggcgctgggttcttaccctacttgtcacgtc

SEQ ID NO: 3178 - DNA, 1874 bp, Clostridium saccharolyticum
  source 1..1874: mol_type = genomic DNA
gcttttttccgtgcgcccagcatgggcgcactcttggaggtgcaagtcctcccgtgagttgatcacagcgaacgaagcgaagcgcaactgcatgagggtgaccgagtgtgggaaggaagcgtggagcgcaactgcgagccgatggacaagaaccggatagaaggcggtgccgagcagggcgagcgggcagaaaaccgcgaagctctcgtgatcaaggcgaggtgtcgtaaatccggcggttgtgcagtgaaggagtgcgttcttacctggggagatctcgccttgtgcctgaaagggcgacgtcgagaggcggagcgagaagtcagccgaggtcgtagtagtcaggggctgggccggtgaggctgaaaccgctggcgaaggaccgaacgagagggagtgtagaccgacatgtcgatgcggcaggccatgcgtcagatgcccgcgcaagcggggcgggcgggagtagcgcgcggtgaagccgcgcgtgtacccgtcagcgacgaagcctgcggcccgcggcgtgagccggaaaacacagggtcggcgctgctgcaggcagcgctgacgagagagaacctgcaacgggcgctcaaacgggtacgtgccaataaaggcgcagcgggcgtcgacggtctggacatcgaccaaacggcacgccatctcgcgacggcctggcccggtatccgtgagcacctgttgcgggggacgtaccggccgagtccggtacgacgggtagcgatccctaagccggacggcggcgagcgcgagcttggcatcccgacggtgacggatcggctgatccagcaggcgctgctacaggtactgcaaccgatacttgatccgagcttcagcgagcacagccacggcttccggccggggcggcgtgcgcaggacgcggtgcttgccgcgcaggcgtacgtgcagtccggccggcgcgtggtggtggatgtggacctggagaagttcttcgaccgggtcaaccacgacatcctgatcgaccgcctacagaaacgcatcgatgacgccggggtgatccggctggtgcgtgcgtatctgaacagcgggatcatgagggatggcgtggtgcaggagcgcgggcaggggacgccgcaaggcggaccgctgtcgccgctgctggccaatgtcttgctcgatgaggtggacaaggccttggagcggcgaggccactgcttcgtgcgctatgccgacgactgcaacgtgtatgtgcgcagtcgccgggcgggagcgcgggtgatggctttgctgcggcgtctgtacggcaagttgtgcctgaaggtcaatgaagccaagagcgcggtagccagtgtgttcggccgcaagttcctgggctacagcctgtgggtggcccggggaggaacggtcaagcgcaaggtggcggccaagccgctggcgacgttcaagcagcgggtgcggcaactgacccggcgcctgggcgggcgcagcatgcaggacgtggtgcaaaggctgcgaccttatctgctgggttggaaagcgtacttcggactggcgcaaacaccgaggatctggcgcgagctggacgaggggttgcgtcatcggctgcgtgcgatccagctcaagcagtggaaacgagggccgaccatgttccgggagttgcgcgcgttgggcgcaagccccgccgtggcgcagcgggtggcggccaatagccgctgctggtggcgcaacagcgacaaactgctcaacagcgtgttgacggtggcatggttcgaccgcctgggtctaccccgtctgtcctgacctcaacctctcgaaccgcccggtgcggacccgcatgccgggtggtgtggcaggggcgcagtctacgatgactgtcccctatgccgattccgcacagc

SEQ ID NO: 3179 - DNA, 1935 bp, Burkholderia cenocepacia
  source 1..1935: mol_type = genomic DNA
tacgtacagtgtgcgccgggagaccggtagagatcaaggggtgaaagtccccgacattgcaagaactagcgattcacgatttccccgagtcatgcgtggccagccgcgaggcgggttgcgaagcgttgacaggggcgctgataggccagccattgagccacgaaatggatacattcccgagtgctgacgtactactgtatgcggaaggcaacatcgcgcggcgcgctatcgcgagcgctgcgcggactcggcgtggtctgagaccctggcatgtcagtacgatctctacgcgggaaccgggagatctcccatctggccgccgacggaaatatggtcgagcggtccgcatcgggaaggcgaggagctgaagccgatgacgaacggatgggagaagtcggactcgcccatagtagcgaagaagctggcgaacaaacccgggcaaccggatgcggagtcagtggagcgaaggggtggggccaaggggaacacggaatggtcgcgcacgcgccggacgcagagccggataagcgtgtcccagagactggaccgtgtgcgtcaagccgcaaggcaaaggaagaaggagaagttcacggcgttgtaccacttgatcgacctcgaccttctggcgacggcgttcttctggctgaagcggaaggcggcagccggggtcgatggcgtgacgtggcacgactatgagcaagatctcgaccgaaatctcgaagacctgcatggcagactccgccggcaggcttatcgggcgctgcccagtcgcagacggtacataccgaaggcggatggcaaacagcgaccgctgggcattgctgcgctggaagacaagatcgtccagcgtgcactggtggcagtactcaatgctgtctacgagatggacttcttgggattctcatacggtttccggccgcaacgcagccagcacgatgcgctggatgcacttgcgacgggaatcgctcgcacgagcgtgagctggattctggacgccgacatcagcaggttctttgatacggtcgaccacgattggctgatccgtttcgtggaacatcgcataggcgaccagcgtgtgatccgactgatccgcaaatggctgaaggcgggagcgatggaagacggggtgatcgagcccacagacgaggggacgccgcaagggtctgtcatctcgcctctgctggcgaacatctacctgcattacgtcttcgacctctgggcaaaccagtggcgcaagcgccacgccgaggggaacgtcgtaatcgtccgatacgccgacgacgtcgtggttggtttcgataaaccacacgatgcgaagcggttcaggcgggccatgcaacaacgactggagcagtttgggctgtcggtacacccggagaaaacccggctgatcgaattcgggcgctttgcggcccggaaccgggcaagccgagggctgggcaaacccgagacgttcaacttccttggattcacccacatcagtggccgtgcgaaagacggtaggttcatgctcatgcgtaagacgcggagcgaccgtcttcgaacggcgctgaagggaatcaaggatgagttgcggcacagatggcaccagtcgattcccgagcaaggggactggttacgccgcgtggttcaagggtacttcaactaccatgcggtgccgaccaacttcgctgcgttgcgagccttccgcgcgcgcgagatcgacctctggaggctggcgcttcggcgccgcagccaaaaggacgacaccacgtgggcaaagatgcaccggctcgcgaagcagtggatacccaaggctcgcatccttcacccctggccggtcgtgcggtttgacgccaaccacccgaggcaggagcccggtgcgcgaatcgcgcacgccgggatctgtgcggggggtgcccagtaatgggcattcctaccgcgacagtgtagcct

SEQ ID NO: 3180 - DNA, 2449 bp, Bacteroides vulgatus
  source 1..2449: mol_type = genomic DNA
tcagaagttcgtgcgacgtgaagttgcgtaagtgattgtgtaacatcaagattacacctccagttccgtctggagtagcctacggacacgtgcattgggagtaatccttttgtacggagctgtcccgacaaggtagcctttccaaaaggagaagattgaaccgtgaggggaaatcaacggctgataacaccattcagcacgaggagcttggcttagcggtatggtcaacgaaagtgaactgtccgataaacatcgtaaggtataacgagccaaaggctgttgacaggctcggaccaaaaggtaagcagtcggctgtcctcttgaactttgggggcacacggacattagcactgccggtggaatagacaggacctaacccgcttatttatcacttatgtaaaacacggtaagcccgtatctctccagttcatcagagctggtaagcaagccgcaaggcaagcctacatggggtgtgggtataggatagcggaaaaagcgaatgcctccctgtaatggggaggatacggattgagccaatatcacgggttggtaaaggtaacatcatccgacacgaaagtgggcagacttccgcctatggtgacactttacaagatagtttacagaacttttaaagaaaggaaagcaaatgaacgcaaagaaattggcgtgtgcgcccgaagacatagacattcacgaactctggtcgaaaatcgactgggacaaatgtgagcgttttgtccaaaagctgcaagcacgtattgtaaaggctcaaagggaaggcagaaataacaaggtgaaagccctgcaatggatgcttacccactcgttctacgccaaagcattggcggtaaaacgagttacgactaacaaaggaaaatctacttccggcgttgacaagattacatggtcttctccattggcgaaagccaaagccatattcactctgaaaagacatggctacaagccacaacctttaaaacgtgtaaatatcaaaaagaagaacgggaaattacgcccactcggaataccaacgatgaaagaccgtgcgatgcaggcattgtacctaatggcacttgacccgatagcggaaaccactggcgacagccattcctacggattccgcagacatcgctgtacacatgatgccatcgagcaatgctacatcgttctttctcgttcggtcgctcccgaatggattcttgagggggacatcaaaggatgcttcgaccatatcagccatgcgtggttaatcaacaatatccctatggataaggagatactacgcaaatggctcgaatgcggatatgtgttcaatggagaactctttcctacggaagagggaaccccacaaggtggcataatatccccaactcttgcaaacatggcacttgacggactgcaagatttgttggaaaagagtgtcaagaaatatcaggtgaactacaaaaagatagttcctaagatacatcttgtacgatatgcagatgatttcattgtaacggcaaaggataaggaaacgatagaacaggttatacttccattagtacgtaagttccttgcggaaagaggtctgacactatcagaagaaaagacaaaaatcacacatataaatgagggatttgactttctcggtttcaatatccgaaagttccgcaataatacgctgctgacaactccatccaaagatgcgcaaaagaggttttgcgaaaaaatccgcaagacgatagaagccaacaagtgtgtaaaacagaagtcacttattatgatgctgaatccaatcataaaaggttggggtaattattataaatatggtacttctgcgaatgtattccaccgaatggattgggaaatcttcaagaaaatatggcaatgggcaagacgcagacatccgcagaaatgtaaaggatgggtaaaggataagtatttcagaacactaaatgggcactcgtggagatttgcggcagatatgggcaagaaagataagattgattatctcgaactgacctatctaccaaccatccaccatgagaaattcgtcaaggttcggcattatgccaatccgtatgacccatcagataaatcgtactacgaatggagagaaacctaccgaatgaagcaaacgctgaaaggcaggcaatctctaataaacatttggaaacgacagaataaagtatgtcctgtatgtggagagcgtattgacagggaaagaccttggagtatcactgaacaaatagtcagtggacgaaaggtaagaactcttgtacataccagttgtaaacgtaaaatgcaaagtagattatgaatatgaaagtcgaaaatgagatggctctaccgataacaaagtcggtaacggtcatgttgcttgagccgtatgcggggaaactcgcacgtacggttcttagaggggaaagctcccgtaagggggctgacctactcgacagttcgggcg

SEQ ID NO: 3181 - DNA, 1930 bp, Chlorobium phaeobacteroides
  source 1..1930: mol_type = genomic DNA
tcaatttagggtgcgccgggagaccggtaagaggtaaagggtgcaagtccctgcagtgaaaggattagcgatccgcactggccccgagtcatgcgcgcataaccgcgaggatatgcgcgaagcattgacaggggtgcatataggccagccattgagcggcgaaaatgagcaaatttggggagcccatgccctcctaaaagcagaaggcaatacagacgaagtgcgataacgcgagcacaagactgtccccacgacgtcagagaacctggcatgtatgtaagcctcttacacgggaaccgggagatctccgataccacccatcgtcgttggcgggtcgcatcgggaaaacgtaatagttgaagccgatgatgtacggtacggagaagtcagacctgcccatactaccggagaagcgagcgaacaaagcgggtaagcccgtagcggagttcgtggagggaaggggtgggaacaagagaaatgcggaactgcaaagcatggcccggacacagggtcgggaagccgtgttccaagcgcagggtcgcatacgtgaagcagtaaccagaaatcgaggagaaaagctgacagcgcttctgcatcacatctccgtagactgcctgcgctggtcgtacttcgaactgaagaagaccgcagcaacgggagtcgatgggataacgtggaaagattacggggaaggactggaagagaaccttgcagacctgcaccggcgaatccacacgggagcgtaccgggcacagccatcgcgccggaagtacataccgaaggcaaatggccaacaacgaccgctcggcatcgccgcattggaagacaaaattgtacagcgggcagtggtggcgattctcacgccaatctacgaagcggagtttctggggttcagctatggattccgtccgggacgcagtcagcatgatgcgctggatgcactcgcatacgggatcaaggtgaagaaaatcggctgggtattggacgccgatatttcccggttttttgatacgatcagccatgagtggatgatacgctttttggaacaccgtatcggtgacaagcggattgtccgactgattatcaagtggctgaaagctggggtactggaagatagcgtacggatcgaggcagaagaaggaacaccgcagggagccgtgatatcaccgctccttgcgaacatctaccttcactatgcttatgacctgtgggctaagcagtggcgggaaaagcactgcaaaggtgatatgatcgtcgtgcgtttcgctgacgatagtgtcgcaggcttccagaacaaggaagatggcgaaagattcctagctgatctgaaagagcgactggcaaagttcgcgctaacgttgcatccagagaaaacccgactgattgagttcggcaggtatgctgccaagaaccgacaaagacggggacaagggcggccggaaacctttgactttctcggatttacccacatctgtggagagaaagtagtggggaaaggctttcagctcttgcgcaagacgaagcgcggatcagtgagaaccaagctcggagaggtaaagaaagagctgagacggcgaatgcatgtctcagtatcggaacagggaaagtggctgaacagcgtgttgagaggtcactatgcctatttcgcagtgcccacaaacacgagggcgttatcggcattccgctaccatgttgccagacgttggatgaagagcctcaggcgccgaagccagcggcatgtgatgacatgggagcgaatgatgatatatattgatcagtacctcccaaacccaaagatccttcacccatggccggaacaacggttttgcgtcaaacactcaagttaggagccggatgcgggaattccgcttgtccggatctgtccggggggtgaggggtaactcttgtccctaccgggattttaaatatg

SEQ ID NO: 3182 - DNA, 1893 bp, Coprococcus catus
  source 1..1893: mol_type = genomic DNA
aatcggaattgtgcgcccagataagggcgagtagtctagcaggtggaatgcctgtctggtaaggtctaaccaaccgccagtagcgagtcttgggtgactgtcagtaacggtagttgctaagcgtagacagcgagaaaatagagagtgtgattgagcctcgaaattttgacatttagaaggctgacgttctaatttcgacggaaagcaatacaaatcaattcgcattggtgagaaatggtttgcttctgcggggtcaaagagcactttatgttttacattgtgattattcagtcaactggggagagcctattgtttcttgccattgcaagtatggcaaacaactgcaaaacaggagaatgtcaaaagaacagtaggcagtcggatagcttcatagtactgaagaagttgggtaatgccaacggaggaaagggagctacataataatggtctttctgaggacacatcaaccgtactcagggacggaggtattgatggaaacgaaattagaaagaatagcagaaatatcggcaaattcgccgagaccagagttcacatcgttgtatcatctaatcaataaagaaatgcttttgcaatgtcacaaagaattagacggaaacaaagcagtcggtgttgatgagattactaagaaagagtatgagagaaatctggagcaaaacatagatgacttggtagaaagactgaaaagaaaatcatacaaaccacagccatcaattagggtatatatccctaaaagcaatggaaaacttcgaccattaggaattgcgtgctatgaggacaaaatagtccaattagcattaaagaagatattggaagctatctatgaaccgagatttctgaactgcatgtacggattcagaccaaaccgaggatgtcataacgcaataaaagaactgtataagagattaaacaacacgaaaatctgctatattgtggatgctgacatcaaaggattcttcgaccatatgaagcatgaatggattatcaagtttctcaaactttatattaaagaccccaatataattggtcttgtcaagaagtatcttaaagtgggagtgatggataatggtgaacttatggtgaatgaagaaggttcagctcaaggcaatatcataagtccaatcctagcaaacatatatatgcacaatgtattgacactatggtataagtttattattaccaaagaatgcaagggagataactttctaattgcatatgcagatgattttgttgcaggatttcaatgcaaatgggaagcagagaattactacaagcttcttaaagaacgaatggaaaagttcggtttacaattagaagatagtaaaagtcgtctcttacaaagcggtgcttatattgcaagggcaaagcaaaagagcggtgagtgtatcagattacaaacatttgattttctgggattcacattctattgtgggcgttcacgcaaaggcatgccatatataatgccaaagacaagctctaagaaattcagacagaaaattcgaggtatcaaggtatggttatatgcgaatagagaccaaccgctaaagaaactaatgggtatgctaaatctgaaactaataggtcattataggtactatggcataagttttaatggcagaatgatttcaaactacaaacaacaagtgagagaacttctgtttaaggtgctgaatagacgaagtgacagaaagagttatacaagagaaggattcattgaaatgctgaaatattatccattggcaatgccaaagatttatgtcagcttgttttgagaatgtaaatattattatgaagagccgtatgcgggaaagccgcacgtacggttctgtgaggggcttacattgtgaggtgtaagtctactcgactgaggtgatg

SEQ ID NO: 3183 - DNA, 1898 bp, Cupriavidus taiwanensis
  source 1..1898: mol_type = genomic DNA
ttttctttttgtgcgcccggcagggcgcactcacttgagggtgaaagtcccttacacacccggcaaggggaagtgttagccataggcaagggttccccgggcgactgggggtctgaaggaagcccgaggcaaagcgctggcctgacgaacaggaagcggatatgaggcgacgcatctgggtaaggcagcaaaaagggccaaagcccagtacttgcacggaacggtgcggcgtagatccgacaggcataagcgtgaaggtgggtgcgtcatacccggggagatctgtaccgctgccacggtgctaccggcgtcgagaggtgtcgggatggcggtgcagaagtcagcagaggccatattaggcgagccgttggcgctgaagggccgaacatgaatgagcgcgattaggacgacagacctcgatgcttaccgacgaagcccaaatgcacgaacgagtgcagcccacagcggaggaaggcgggcggaacctgcccggggccgatgggggtgcggaggctggcacggcggctgttgggcaaacgaaagcgcgggcgccatcgctgatggaggcggtggtcgagagaagcaacatgtggctggcgtaccggagggtggtcggcaatggcggtgcggccggggtggatgccttggaggtgacggcgttgcgtgactggctgaaggtgagctggccaagcgtcagggcggcgttgctgggtggtcagtacatcccgcagtcggtgcgcgcggtggacattcccaagccttcgggcggggtgaggacactgggcatcccgacggtggtggaccggctgatccagcaggcgctgctgcaggttctccaaccgctctacgaaccggggttctccgagtcgagctatggcttcaggccgaggcgcagcgcccagcaggcggtcttgcaggcacagcggtacgtgcaggaaggccggcgatgggtggtggacatcgaccttgagaagttcttcgaccgggtcaaccacgacatcctgatgtcgcgggtggcacggcaagtgaaggatgtccgggtgctcaagctgatccggcggtatctggaagcggggctaatgcgtggcggggtggtcgaggcgaggaggcagggcacgccgcagggcgggccgctgtcgccgctgctgtcgaacattctgctgacggattgggaccgtgaactcgagaagcgggggttggcgttctgtcgctacgcggacgactgcaatatctacgtccgaagccaggcagcaggacagaggctgttggccgggatgatgacgttccttgcggagcggctgaatctgcaggtcaatgaggccaagagtgcctgtgcgcggccttgggcacgcaagttcctgggctacagcctgacagcgcatcgtcaggccaagctgcgtattgccccggaaagtctgcaaagactgaccggacgaatcaaggaactgatgcgcaaagggcgaggaaggagcctggctcacacgatagcggtgctgaatccggtgctgcgcgggtggatcgggtacttccagcacacccagagcaagcggccattggaggagctggacgggtggatacggcgccggctgcggtgcttgctatggcggcaggccaagagccgtgctacccgcactgtgatgctgcgtcggcaaggcttaacggaggatcgcgcgtggcactcggctcgcaacgggcagggcccatggtggaatgccggggctcgccacatgggcgcggccttcccgaagggctacttcgacgccttggggttgatctcgctgctggatactcagcagcgcttgcagtctcgttcgtgaaccgccgtatgcggaaccgcacgtacggtggtgtgagagggctgagggggtgacccctcaccctactcaatcctgccgcac

SEQ ID NO: 3184 - DNA, 2179 bp, Chlorobium luteolum
  source 1..2179: mol_type = genomic DNA
atgacatggagtgcgacgtgaagtcgcgtatttgaactgttctttgcagaaccagttgtgccgtcaactgcccccaccggcacatgcaggatgagcaatcgccctgtgtgaagctaccggaaacgtacccgcgggaaaccgtaggccgacccgtgaggagaagctgaatctgccagtagcaggcggagaggggcaagggggaggatggtatggttaacgcaggtgaatcgtcacaaccatcgttataataagcaagcgaaagctcactgacaacgcttggaccaaaaggtacgcgggcaggtatgctcccttccatgtggagcacacacggccaacaaatcccgccggtggagagacggaacctaacccatccgcatgttctatacgcggaacacggaaaccccgtacttccgcccggccatgccgggcaatccgactgtaaggaaggaccatgaaagtgcgggtatgagagtggggaagaagcgaacgccgtcctgtaatcgggcggataggggttgcaacatcaccccacgtgaaaacgggctgacgtcctcatggtctcgatttgcaagataacttgaagaacctcccatgcagaaggaacgcaaatgaacacggataaccctgtgtgtgcaccttccggcctcgactggcaagggatcaactggtcccggatcaagcgacaggtcaggaggcttcaggcacgtattgcaaaggcaacaaaggaaggccgtcatggcagggtgaaagccttgcagtggctgctgacccactcgcacagcggcaaggttcttgccgtcaaacgggtgacggaaaaccgggggaaaaacaccccgggagtcgacggagacgtctggaaaacatcaaaagcaaaggccaatgccgcagcatcgctgagacgaagaggctacaagccccttccccttcgaaggacctacattccgaagaagaacggtaagcaacgacctctcggcatcccaaccatgaaagacagggccatgcaagcgctctactggcttgcactggagcctgtagcggaaaccaccgcggacggcaactcgtacgggttccgaccatggcggtcaacagccgacgtggcagaacagtgtttcatctgcctcgcaagacgcgattccgcacaatggatacttgaggccgatattgccgggtgcttcgatgctatcagccaccaatggctggtcgacaacatccccatggatacgccgatcctccgcaaatggctgaaggcaggcttcgtgttcaacaacgagctctttcccacagcctcgggcacgccgcaaggcggcatcatcagtccgggactggcaaacatgagccttgacggcctcgagcaagcgcttgcaacagcatttccgcaagcgcgaagacgaggactgaaaatgcatatggtgcgctacgctgacgacttcatcatcactggaaactcgaaagagtggctggaacatgagatcatgccggtagtggtcgacttccttaaaaaacgagggctctggctctcagaggaaaagaccagggtaacgcacattacggaaggatttgatttcctcggctggaacatgcgcaagtacgacggcaagctacttatcaagccctcgaaagcgaacatcaaggcccacctcaccaaggtgcggggaatcatcaaggcgaaaaagacgatcaagcaggtggatctcatcggtctcctcaaccccgtcctgcggggatgggcgaactaccaccggcacagtgtcgccaaagacgtcttcgctcgcaacgaccacgaggtctggtcaatgctctggaaatgggcgaaacgacgacacccaaataaaggccttcgatggatcatggacaaatactttcatgccagaggaggcaggaaatgggtgttcgtcgccgaagaggcggaccgaaagaaagaacgacggctctttctggaagccagcatgccaatccagcgacacgtcaaaatcagaacgaaggcaaacccgcacgatccagtgtggagggagtacttcagcgcccgtagaacacagatgtggaaagcgacaccattgagttgccgggtgccttacggcgccttattcgaggcttgagccgtgtgcggtgaaagtcgcacgcacggttcttaggggacggtggcgcagtaatgcgccgctgttacccgattatggaaaac

SEQ ID NO: 3185 - DNA, 2175 bp, Chlorobium phaeobacteroides
  source 1..2175: mol_type = genomic DNA
caacccgttcgtgcgacgtgaaagtcgcatagttgaactgttctttgaaccagttgtgccgtcaactgctcccaccggcacatgcaggatgagtaatcgccctgtgtgaagctgccggaaacgtacccgcaggaaaccgtaggctgctccgcgaggaaatgccgaatctgccagtagcaggcggagaggggcaagggagagagtggtcttggctaaggtatctgaatcgctgcaaccgtcgttatgtcgaacgagtgaaagctactgtaacactcgaaccaaaaaggtatgcgagtaggtaaacgcctggatggagcgtttacgcggccaattactctcgccggcggctaggcggagcctacaccacttgagagttcactatgcggaacacggtaagcccgtagtgtcgcccagcatactgggcaatcgaaccgtaaggaacgaccatgatactgtgggtaaaggatcgaggagaaagcgaacgcctccctgtaatcgggcggataagggctacaatatcgccctatgcgaaagcaggcagacttcctcggggtctcgctttacaagaaaacttgaagaacctcttatgcagaaggaattgcaaatgaacatgggtagtaccgtgtgtgcaccttccgcctccaactggcaagggatcgaatggtctcaggtcaaacggcaggtcaagaggcttcaggcccgtattgtaaaggcaacacaggaaggtcgccactgcaaagtaaaagcattgcagtggttactgactcactcgtttagcggcaaagctcttgccgtgaagcgtgtgacggaaaaccggggaaaacacaccccgggagttgataaccaaatctggataacgccaaaagcaaaaaccaatgctgtagcatcactaaagcgaaggggttacaagcccctccctcttcgaaggatcaatattccgaagaagaacggtaagacccgacctctcggcatcccgacaatgaaagacagggccatgcaggcactttatctgcttgcactggaacctgtagcggaaaccactgcggacgataactcgtacgggtttcggccatggcggtcaacagcagacgcgagtgcaagatgttttacctgcctcgctcaacgcaattccgcccaatgggtacttgaggctgatattgccagttgcttcgatgctataagccatgagtggttgatcgacaacattccagttgacactgcgatcctccgcctgtggctaaaagcaggatttgtgctaaagaacgagctctttcccacagaagccggtacgccgcaaggcggaatcatcagcccggttctggcaaacatgtgtcttgacggtctcgagaaggcgctggcgaaagcctttccgcaagcaaagaaacgcggcctgaaaatgcacatggtgcgatacgctgacgactttgttataacaggaaactcgaaagagttgctggaaaacgaggtcttgccagtggtggtcgaattcttggctgaaagagggttattcctctctccggaaaagactaagataacgcacattacggaaggctttgatttcctcggctggaatgtacgcaagtacagcggcaaactgcttatcaagccgtcgaaagtgaataccaaggcccacctcctgaaggtgcgggaaatcattaaaggtaataaaacggccaaacaggtaagcttgatctacctcctcaatcccataatgaggggatgggcgaactaccatcaacatgtggtcgccaagaaatcctttgctcgcaatgacgcagaaatctggtcaatgctctggaaatgggcaaaaagacgacacccaaacaaaggaatgcgatgggtcaaggcacggtacttcaagacccaaaacgcccgcaactgggtgtttgccgctaaggatgaggccacaggcaaggaaatcagacttgtcactgaagccgatacaccaatcaagcgacatgtcaaaattaagtcaaaggcgaaccctcacaatccagtgtgggccgaatactttgcagcccgcaacaaacagatgaagaaatcagcaccgatgtacagccgggcgtcacaaggcgccttatgcgaggcttgagcccagtgcggtgaaagtcgcacgctgggttcttaggggacggtggcgtagcaatgcgccgccgttacccgacatcgagtcgt

SEQ ID NO: 3186 - DNA, 2093 bp, Geobacter uraniireducens
  source 1..2093: mol_type = genomic DNA
tgtttattcggtacgccaggccaagcctggctgatctatctgactgaaaagtgtcagacatgtaaattgctcgttcaccatgtagtcgcggtctgtcacgagagggtaaccaaacgtggggagtaagaccggttctttgtaagaaaagagcgaagggtacgataactaccctgacgacgaagacgcgagcccagcgcaagcgaacccgtttcggcctcgttacacgtagttgacagtggccaaccttccgaatgtggtgaagcctgccatccaccggtgataaacgagcgaaagaaccggtgggactgtccggggtgattggggagggcgcgtgtcgaaagatcagccgaggaacctgggaggtccgacgtaattcccaaagcgaaagggtttcgccgaagggagaacgccgacggggaatcaataacccgccaagcgtgtacggtcggaattcggagcggcccatagtagccgggaagcggggtaatgcccgtggagccaaggggccgtacttcagtcatgtttacacggaaagagaggagacccgcttgagcgacagacgctccataacggaatggatggccgaaggattcgaacctgaacccggactgccggtaaaagtctcccttctgcggtggaaactgagcagcaaggccaaacgagaaccgcagttccggttctatgccctttacgaccgaatccatcgtcgtgatgtacttgaaacggcgtggttgcgagtaaaggcgaacaagggcgcgccgggagtcgatggtgtcagcattgaatccatcgaggtgcgggcagacggaatatccggctatcttgacgaaattcaagaaagcctgagaaccaaaaactacaaaccatccccggtgcgtcgcgtctacatcaccaagcccaacggcaaactgcgcccgctcggcataccgtgcgtgcgggacagaattgtacaggcagccgtactccttatcctcgaaccgatatttgaggtggactttctcgactgctcccatggatttcgtcccaaaaggcgtccccatggagccctcgaccaagtcggtaataacctccaactcggacggcaggaagtgtatgacgcggatctttcgagctactttgacagcatcccccacgagcacctgatagtagaacttgagcggcgcatagccgaccggagtgtcctcaaactgatccggcaatggcttcacagtccggtcagagaagaagacggcagcatcagccgtcccaaacaagggacgccacaaggcggggtaatatctccccttcttgccaacatctaccttcaccggctcgaccgggcctttcacgaagaagcagacagcccctaccacttcgccagagcgcgcatggtacggtttgccgacgacttcgtagtaatggccagacacatgggcaatcgcataaccggatggctggaagagaaactcgaaacagaccttggactcagcatcaaccgtgacaaaaccggtattgtcagaatgaacaagaaagagagcctgaactttctgggattcaccctccgctatgaccgtgacctgcggggcagagattgggattatctcaacatcatgccgagtaagaaggccataggagcactcaagggaaaaatccgggagaagacccgaagcggatacaaaaagccgcttgtcgaagcaattgccgaggtaaacagcatccttcgcggatggggcaactacttcgactacgggtatccccggaaagtatttcgagacgtgaatcattacacgaggactcgctttcgaatatttctgaacaatcggagccaaaggcggagcaaacccttcagggcaggtgaaagcctgtatgccggacttaagcgatatggtctggtttacctgtaacagcaaagccacaactcctcaataatgccgtgcagcaagaggctgataggtaagccgtatgcgggaaatccgcacgtacggtttgacgagggggagctggttaaggcaactatggtaaggctacttaggcaccgccaaacgaaaggggcggaaacggacaagccaaacctaatgatgtcgtaacctgcttcctactctactggttaattg

SEQ ID NO: 3187 - DNA, 1908 bp, Geobacillus sp.
  source 1..1908: mol_type = genomic DNA
ctcttttcatgtgcgcccggcatgggtgtagtctatagggtgaaagtcccgaactgcgaaggcagaagtagcagttagcttaacgcaagggtgtctgcggcgacgcagaatctgaaggaagcgggcggcaaacttccggtctgaggaacacgaacttcataggaggctgggtatcattgggtgagtttgcatgacaaaacgaagccctttctgccgaaggtgataccgagtaaatgaagcagatagatggaaggaaagactgcactcttacccggggaggtctgtccgggaagccaagtgcgcttggcaaccgttggagcgatccaacgctgaacggacagaagtcagcagaggtcatagtactcgtctagcttaagatagaaggggaaggaccgaaccatgaaggagaacggccactaggcgttcatcttctttgatgaaacagacaacccgaaagggcctgcttgagggaggaaatggtgaagtccatgggggacctcaagagggtggagaagaagatggcacgaatagaacggatcgttcacgtagagaggaagaattggaatgtggatgaaacagatactgtcacgggagaatctcctgcgagcactcaaacaagtggaaaagaataaagggtcccatggaaccgatggaatgtccgtcaaagacctgcgaagacacctcgtggaacattgggacgtgatacggcgtgctttggaagaagggacctacgaaccttgcccggtccgacgggtcgaaatcccgaaaccgaacggaggagtcaggttactaggaatcccgaccgtgacagaccggttcatccaacaggccatcgcccaagtgctcacgccgatctttgacccatccttttcggaacacagctacgggtttcgtcccggtcgaagaggacacgacgcggtgaaaaaggcgaagcagtatattcaggaaggatatacatgggtggtagatatcgacttggaaaagttctttgatcgagtcaaccatgacaaactgatggggatattagcgaaacgaattccagacaaaatcctcctaaagttgatacggaagtatttacaggcaggggtcatgatcaacggggtggtcatggaaacacaagaggggactccacaaggagggccgctcagtccacttttgtccaacattctcttggatgagctggacaaagaattggaaaaacgagggcacaaatttgtacggtatgcggatgactgcaatatctacgtaaggacgaagaaggccggggaacgggtgatgaaatcgatcacggcattcattgaaaagaaactccggctgaaagtcaacgaaaccaaatcggcagtggatcgaccgtggaggagaaaattcctcggttttagcttcaccccaaataaggagccaaaaatccggatcgcaaaggaaagtattcggcgcatgaagcaaaggatgcgcaccatgacgagtcgatcgaaaccgattcccatgctcgagcgaatcgaacagctcaaccagtacattctgggatggtgtggatacttctcgttagcagagactccaagtgtgttcaaagaactagatggatggattcaacgaaggctgcgcatgtgccaatggaaagagtggaaacttccgagaaccagagtccgaaaactgcaaagtttaggagtgcccaagcggaaagcatatgaatggggaaacactcggaagaaatattggagagtggccgctagtcccatcttgcataaagcccttggcaactcctattgggagagccaagggctgaagagtctttatcaacgatatgaatctctgcgtcagacttaatggaaccgccgtataccgaacggtacgtacggtggtgtgagaggacgagggttaatcaccctctcctactcgatcattctgttg

SEQ ID NO: 3188 - DNA, 5571 bp, synthetic construct
  source 1..5571: mol_type = other DNA; note = Orna 1.0 design base
taatacgactcactatagggagaccctcgaccgtcgattgtccactggtcaacaatagatgacttacaactaatcggaaggtgcagagactcgacgggagctaccctaacgtcaagacgagggtaaagagagagtccaattctcaaagccaataggcagtagcgaaagctgcaagagaatgaaaatccgttgaccttaaacggtcgtgtgggttcaagtccctccacccccacgccggaaacgcaatagccgaaaaacaaaaaacaaaaaaattaaaacagcctgtgggttgatcccacccacaggcccattgggcgctagcactctggtatcacggtacctttgtgcgcctgttttataccccctcccccaactgtaacttagaagtaacacacaccgatcaacagtcagcgtggcacaccagccacgttttgatcaagcacttctgttaccccggactgagtatcaatagactgctcacgcggttgaaggagaaagcgttcgttatccggccaactacttcgaaaaacctagtaacaccgtggaagttgcagagtgtttcgctcagcactaccccagtgtagatcaggtcgatgagtcaccgcattccccacgggcgaccgtggcggtggctgcgttggcggcctgcccatggggaaacccatgggacgctctaatacagacatggtgcgaagagtctattgagctagttggtagtcctccggcccctgaatgcggctaatcctaactgcggagcacacaccctcaagccagagggcagtgtgtcgtaacgggcaactctgcagcggaaccgactactttgggtgtccgtgtttcattttattcctatactggctgcttatggtgacaattgagagatcgttaccatatagctattggattggccatccggtgactaatagagctattatatatccctttgttgggtttataccacttagcttgaaagaggttaaaacattacaattcattgttaagttgaatacagcaaaatggaagatgccaagaacatcaagaagggccctgctccattctaccctctggaagatggaacagccggcgagcagctgcacaaggccatgaagagatatgccctggtgcctggcacaatcgccttcacagatgcccacatcgaggtggacatcacctacgccgagtacttcgagatgtctgtgcggctggccgaagctatgaagcgctacggcctgaacaccaaccaccggatcgtcgtgtgcagcgagaacagcctgcagttcttcatgcctgtgctgggcgccctgttcatcggagttgctgtggcccctgccaacgacatctacaacgagcgcgagctgctgaacagcatgggcatctctcagcccaccgtggtgttcgtgtccaagaagggactgcagaaaatcctgaacgtgcagaagaagctgcccatcatccagaaaatcatcatcatggacagcaagaccgactaccagggcttccagagcatgtacaccttcgtgaccagccatctgccacctggcttcaacgagtacgacttcgtgcccgagagcttcgaccgggacaagacaatcgccctgatcatgaacagcagcggctctaccggactgcccaaaggtgttgccctgcctcatagaactgcctgcgtgcggtttagccacgccagagatcccatcttcggcaaccagatcatccccgacacagccatcctgagcgtggtgccttttcaccacggcttcggcatgttcaccacactgggctacctgatctgcggcttcagagtggtgctgatgtaccgcttcgaggaagaactgttcctgcggagcctgcaggactacaagatccagtctgctctgctggtgcctactctgttcagcttctttgccaagagcaccctgatcgataagtacgacctgagcaacctgcacgagatcgcctctggcggagcccctctgtctaaagaagtgggagaagccgtcgccaagcggttccatctgcctggcatcagacaaggctatggcctgaccgagacaaccagcgccattctgattacccctgagggcgacgataagcctggcgctgtgggaaaagtggtgccattcttcgaggccaaggtggtggatctggacaccggcaaaacactgggcgttaaccagaggggcgagctgtgtgttagaggccctatgatcatgagcggctacgtgaacaaccccgaggccacaaacgctctgatcgacaaggatggatggctgcacagcggcgacattgcctactgggacgaagatgagcacttcttcatcgtggaccggctgaagtccctgatcaagtacaagggctaccaggtggccccagccgagctggaatctattctgctgcaacaccccaacatcttcgatgccggcgttgcaggactgcccgatgatgatgctggcgaactgccagctgctgtggtggtgctggaacacggcaagaccatgaccgagaaagaaatcgtggactacgtggccagccaagtgaccaccgccaagaaactgagaggcggcgtggtgtttgtggacgaggtgccaaaaggcctgacaggcaagctggacgcccggaagatcagagagatcctgattaaggccaagaaaggcggcaagatcgccgtgtaatagctaactagaaaaaacaaaaaacaaaacggctattatgcgttaccggcgagacgctacggacttaaataattgagccttaaagaagaaattctttaagtggatgctctcaaactcagggaaacctaaatctagttatagacaaggcaatcctgagccaagccgaagtagtaattagtaagaccagtggacaatcgacggataacagcatatctagatatcggatcccgggcccgtcgactgcagaggcctgcatgcaagcttggcgtaatcatggtcatagctgtttcctgtgtgaaattgttatccgctcacaattccacacaacatacgagccggaagcataaagtgtaaagcctggggtgcctaatgagtgagctaactcacattaattgcgttgcgctcactgcccgctttccagtcgggaaacctgtcgtgccagctgcattaatgaatcggccaacgcgcggggagaggcggtttgcgtattgggcgctcttccgcttcctcgctcactgactcgctgcgctcggtcgttcggctgcggcgagcggtatcagctcactcaaaggcggtaatacggttatccacagaatcaggggataacgcaggaaagaacatgtgagcaaaaggccagcaaaaggccaggaaccgtaaaaaggccgcgttgctggcgtttttccataggctccgcccccctgacgagcatcacaaaaatcgacgctcaagtcagaggtggcgaaacccgacaggactataaagataccaggcgtttccccctggaagctccctcgtgcgctctcctgttccgaccctgccgcttaccggatacctgtccgcctttctcccttcgggaagcgtggcgctttctcatagctcacgctgtaggtatctcagttcggtgtaggtcgttcgctccaagctgggctgtgtgcacgaaccccccgttcagcccgaccgctgcgccttatccggtaactatcgtcttgagtccaacccggtaagacacgacttatcgccactggcagcagccactggtaacaggattagcagagcgaggtatgtaggcggtgctacagagttcttgaagtggtggcctaactacggctacactagaagaacagtatttggtatctgcgctctgctgaagccagttaccttcggaaaaagagttggtagctcttgatccggcaaacaaaccaccgctggtagcggtggtttttttgtttgcaagcagcagattacgcgcagaaaaaaaggatctcaagaagatcctttgatcttttctacggggtctgacgctcagtggaacgaaaactcacgttaagggattttggtcatgagattatcaaaaaggatcttcacctagatccttttaaattaaaaatgaagttttaaatcaatctaaagtatatatgagtaaacttggtctgacagttaccaatgcttaatcagtgaggcacctatctcagcgatctgtctatttcgttcatccatagttgcctgactccccgtcgtgtagataactacgatacgggagggcttaccatctggccccagtgctgcaatgataccgcgagacccacgctcaccggctccagatttatcagcaataaaccagccagccggaagggccgagcgcagaagtggtcctgcaactttatccgcctccatccagtctattaattgttgccgggaagctagagtaagtagttcgccagttaatagtttgcgcaacgttgttgccattgctacaggcatcgtggtgtcacgctcgtcgtttggtatggcttcattcagctccggttcccaacgatcaaggcgagttacatgatcccccatgttgtgcaaaaaagcggttagctccttcggtcctccgatcgttgtcagaagtaagttggccgcagtgttatcactcatggttatggcagcactgcataattctcttactgtcatgccatccgtaagatgcttttctgtgactggtgagtactcaaccaagtcattctgagaatagtgtatgcggcgaccgagttgctcttgcccggcgtcaatacgggataataccgcgccacatagcagaactttaaaagtgctcatcattggaaaacgttcttcggggcgaaaactctcaaggatcttaccgctgttgagatccagttcgatgtaacccactcgtgcacccaactgatcttcagcatcttttactttcaccagcgtttctgggtgagcaaaaacaggaaggcaaaatgccgcaaaaaagggaataagggcgacacggaaatgttgaatactcatactcttcctttttcaatattattgaagcatttatcagggttattgtctcatgagcggatacatatttgaatgtatttagaaaaataaacaaataggggttccgcgcacatttccccgaaaagtgccacctgacgtctaagaaaccattattatcatgacattaacctataaaaataggcgtatcacgaggccctttcgtctcgcgcgtttcggtgatgacggtgaaaacctctgacacatgcagctcccggagacggtcacagcttgtctgtaagcggatgccgggagcagacaagcccgtcagggcgcgtcagcgggtgttggcgggtgtcggggctggcttaactatgcggcatcagagcagattgtactgagagtgcaccatatgcggtgtgaaataccgcacagatgcgtaaggagaaaataccgcatcaggcgccattcgccattcaggctgcgcaactgttgggaagggcgatcggtgcgggcctcttcgctattacgccagctggcgaaagggggatgtgctgcaaggcgattaagttgggtaacgccagggttttcccagtcacgacgttgtaaaacgacggccagtgaattcgagctc

SEQ ID NO: 3189 - DNA, 5561 bp, synthetic construct
  source 1..5561: mol_type = other DNA; note = 5' 10nt exon del
taatacgactcactatagggagaccctcgaccgtcgattgtccactggtcaacaatagatgacttacaactaatcggaaggtgcagagactcgacgggagctaccctaacgtcaagacgagggtaaagagagagtccaattctcaaagccaataggcagtagcgaaagctgcaagagaatgaaaatccgttgaccttaaacggtcgtgtgggttcaagtccccgccggaaacgcaatagccgaaaaacaaaaaacaaaaaaattaaaacagcctgtgggttgatcccacccacaggcccattgggcgctagcactctggtatcacggtacctttgtgcgcctgttttataccccctcccccaactgtaacttagaagtaacacacaccgatcaacagtcagcgtggcacaccagccacgttttgatcaagcacttctgttaccccggactgagtatcaatagactgctcacgcggttgaaggagaaagcgttcgttatccggccaactacttcgaaaaacctagtaacaccgtggaagttgcagagtgtttcgctcagcactaccccagtgtagatcaggtcgatgagtcaccgcattccccacgggcgaccgtggcggtggctgcgttggcggcctgcccatggggaaacccatgggacgctctaatacagacatggtgcgaagagtctattgagctagttggtagtcctccggcccctgaatgcggctaatcctaactgcggagcacacaccctcaagccagagggcagtgtgtcgtaacgggcaactctgcagcggaaccgactactttgggtgtccgtgtttcattttattcctatactggctgcttatggtgacaattgagagatcgttaccatatagctattggattggccatccggtgactaatagagctattatatatccctttgttgggtttataccacttagcttgaaagaggttaaaacattacaattcattgttaagttgaatacagcaaaatggaagatgccaagaacatcaagaagggccctgctccattctaccctctggaagatggaacagccggcgagcagctgcacaaggccatgaagagatatgccctggtgcctggcacaatcgccttcacagatgcccacatcgaggtggacatcacctacgccgagtacttcgagatgtctgtgcggctggccgaagctatgaagcgctacggcctgaacaccaaccaccggatcgtcgtgtgcagcgagaacagcctgcagttcttcatgcctgtgctgggcgccctgttcatcggagttgctgtggcccctgccaacgacatctacaacgagcgcgagctgctgaacagcatgggcatctctcagcccaccgtggtgttcgtgtccaagaagggactgcagaaaatcctgaacgtgcagaagaagctgcccatcatccagaaaatcatcatcatggacagcaagaccgactaccagggcttccagagcatgtacaccttcgtgaccagccatctgccacctggcttcaacgagtacgacttcgtgcccgagagcttcgaccgggacaagacaatcgccctgatcatgaacagcagcggctctaccggactgcccaaaggtgttgccctgcctcatagaactgcctgcgtgcggtttagccacgccagagatcccatcttcggcaaccagatcatccccgacacagccatcctgagcgtggtgccttttcaccacggcttcggcatgttcaccacactgggctacctgatctgcggcttcagagtggtgctgatgtaccgcttcgaggaagaactgttcctgcggagcctgcaggactacaagatccagtctgctctgctggtgcctactctgttcagcttctttgccaagagcaccctgatcgataagtacgacctgagcaacctgcacgagatcgcctctggcggagcccctctgtctaaagaagtgggagaagccgtcgccaagcggttccatctgcctggcatcagacaaggctatggcctgaccgagacaaccagcgccattctgattacccctgagggcgacgataagcctggcgctgtgggaaaagtggtgccattcttcgaggccaaggtggtggatctggacaccggcaaaacactgggcgttaaccagaggggcgagctgtgtgttagaggccctatgatcatgagcggctacgtgaacaaccccgaggccacaaacgctctgatcgacaaggatggatggctgcacagcggcgacattgcctactgggacgaagatgagcacttcttcatcgtggaccggctgaagtccctgatcaagtacaagggctaccaggtggccccagccgagctggaatctattctgctgcaacaccccaacatcttcgatgccggcgttgcaggactgcccgatgatgatgctggcgaactgccagctgctgtggtggtgctggaacacggcaagaccatgaccgagaaagaaatcgtggactacgtggccagccaagtgaccaccgccaagaaactgagaggcggcgtggtgtttgtggacgaggtgccaaaaggcctgacaggcaagctggacgcccggaagatcagagagatcctgattaaggccaagaaaggcggcaagatcgccgtgtaatagctaactagaaaaaacaaaaaacaaaacggctattatgcgttaccggcgagacgctacggacttaaataattgagccttaaagaagaaattctttaagtggatgctctcaaactcagggaaacctaaatctagttatagacaaggcaatcctgagccaagccgaagtagtaattagtaagaccagtggacaatcgacggataacagcatatctagatatcggatcccgggcccgtcgactgcagaggcctgcatgcaagcttggcgtaatcatggtcatagctgtttcctgtgtgaaattgttatccgctcacaattccacacaacatacgagccggaagcataaagtgtaaagcctggggtgcctaatgagtgagctaactcacattaattgcgttgcgctcactgcccgctttccagtcgggaaacctgtcgtgccagctgcattaatgaatcggccaacgcgcggggagaggcggtttgcgtattgggcgctcttccgcttcctcgctcactgactcgctgcgctcggtcgttcggctgcggcgagcggtatcagctcactcaaaggcggtaatacggttatccacagaatcaggggataacgcaggaaagaacatgtgagcaaaaggccagcaaaaggccaggaaccgtaaaaaggccgcgttgctggcgtttttccataggctccgcccccctgacgagcatcacaaaaatcgacgctcaagtcagaggtggcgaaacccgacaggactataaagataccaggcgtttccccctggaagctccctcgtgcgctctcctgttccgaccctgccgcttaccggatacctgtccgcctttctcccttcgggaagcgtggcgctttctcatagctcacgctgtaggtatctcagttcggtgtaggtcgttcgctccaagctgggctgtgtgcacgaaccccccgttcagcccgaccgctgcgccttatccggtaactatcgtcttgagtccaacccggtaagacacgacttatcgccactggcagcagccactggtaacaggattagcagagcgaggtatgtaggcggtgctacagagttcttgaagtggtggcctaactacggctacactagaagaacagtatttggtatctgcgctctgctgaagccagttaccttcggaaaaagagttggtagctcttgatccggcaaacaaaccaccgctggtagcggtggtttttttgtttgcaagcagcagattacgcgcagaaaaaaaggatctcaagaagatcctttgatcttttctacggggtctgacgctcagtggaacgaaaactcacgttaagggattttggtcatgagattatcaaaaaggatcttcacctagatccttttaaattaaaaatgaagttttaaatcaatctaaagtatatatgagtaaacttggtctgacagttaccaatgcttaatcagtgaggcacctatctcagcgatctgtctatttcgttcatccatagttgcctgactccccgtcgtgtagataactacgatacgggagggcttaccatctggccccagtgctgcaatgataccgcgagacccacgctcaccggctccagatttatcagcaataaaccagccagccggaagggccgagcgcagaagtggtcctgcaactttatccgcctccatccagtctattaattgttgccgggaagctagagtaagtagttcgccagttaatagtttgcgcaacgttgttgccattgctacaggcatcgtggtgtcacgctcgtcgtttggtatggcttcattcagctccggttcccaacgatcaaggcgagttacatgatcccccatgttgtgcaaaaaagcggttagctccttcggtcctccgatcgttgtcagaagtaagttggccgcagtgttatcactcatggttatggcagcactgcataattctcttactgtcatgccatccgtaagatgcttttctgtgactggtgagtactcaaccaagtcattctgagaatagtgtatgcggcgaccgagttgctcttgcccggcgtcaatacgggataataccgcgccacatagcagaactttaaaagtgctcatcattggaaaacgttcttcggggcgaaaactctcaaggatcttaccgctgttgagatccagttcgatgtaacccactcgtgcacccaactgatcttcagcatcttttactttcaccagcgtttctgggtgagcaaaaacaggaaggcaaaatgccgcaaaaaagggaataagggcgacacggaaatgttgaatactcatactcttcctttttcaatattattgaagcatttatcagggttattgtctcatgagcggatacatatttgaatgtatttagaaaaataaacaaataggggttccgcgcacatttccccgaaaagtgccacctgacgtctaagaaaccattattatcatgacattaacctataaaaataggcgtatcacgaggccctttcgtctcgcgcgtttcggtgatgacggtgaaaacctctgacacatgcagctcccggagacggtcacagcttgtctgtaagcggatgccgggagcagacaagcccgtcagggcgcgtcagcgggtgttggcgggtgtcggggctggcttaactatgcggcatcagagcagattgtactgagagtgcaccatatgcggtgtgaaataccgcacagatgcgtaaggagaaaataccgcatcaggcgccattcgccattcaggctgcgcaactgttgggaagggcgatcggtgcgggcctcttcgctattacgccagctggcgaaagggggatgtgctgcaaggcgattaagttgggtaacgccagggttttcccagtcacgacgttgtaaaacgacggccagtgaattcgagctc

SEQ ID NO: 3190 - DNA, 5551 bp, synthetic construct
  source 1..5551: mol_type = other DNA; note = 5' 20nt exon del
taatacgactcactatagggagaccctcgaccgtcgattgtccactggtcaacaatagatgacttacaactaatcggaaggtgcagagactcgacgggagctaccctaacgtcaagacgagggtaaagagagagtccaattctcaaagccaataggcagtagcgaaagctgcaagagaatgaaaatccgttgaccttaaacggtcgtgtgggcgccggaaacgcaatagccgaaaaacaaaaaacaaaaaaattaaaacagcctgtgggttgatcccacccacaggcccattgggcgctagcactctggtatcacggtacctttgtgcgcctgttttataccccctcccccaactgtaacttagaagtaacacacaccgatcaacagtcagcgtggcacaccagccacgttttgatcaagcacttctgttaccccggactgagtatcaatagactgctcacgcggttgaaggagaaagcgttcgttatccggccaactacttcgaaaaacctagtaacaccgtggaagttgcagagtgtttcgctcagcactaccccagtgtagatcaggtcgatgagtcaccgcattccccacgggcgaccgtggcggtggctgcgttggcggcctgcccatggggaaacccatgggacgctctaatacagacatggtgcgaagagtctattgagctagttggtagtcctccggcccctgaatgcggctaatcctaactgcggagcacacaccctcaagccagagggcagtgtgtcgtaacgggcaactctgcagcggaaccgactactttgggtgtccgtgtttcattttattcctatactggctgcttatggtgacaattgagagatcgttaccatatagctattggattggccatccggtgactaatagagctattatatatccctttgttgggtttataccacttagcttgaaagaggttaaaacattacaattcattgttaagttgaatacagcaaaatggaagatgccaagaacatcaagaagggccctgctccattctaccctctggaagatggaacagccggcgagcagctgcacaaggccatgaagagatatgccctggtgcctggcacaatcgccttcacagatgcccacatcgaggtggacatcacctacgccgagtacttcgagatgtctgtgcggctggccgaagctatgaagcgctacggcctgaacaccaaccaccggatcgtcgtgtgcagcgagaacagcctgcagttcttcatgcctgtgctgggcgccctgttcatcggagttgctgtggcccctgccaacgacatctacaacgagcgcgagctgctgaacagcatgggcatctctcagcccaccgtggtgttcgtgtccaagaagggactgcagaaaatcctgaacgtgcagaagaagctgcccatcatccagaaaatcatcatcatggacagcaagaccgactaccagggcttccagagcatgtacaccttcgtgaccagccatctgccacctggcttcaacgagtacgacttcgtgcccgagagcttcgaccgggacaagacaatcgccctgatcatgaacagcagcggctctaccggactgcccaaaggtgttgccctgcctcatagaactgcctgcgtgcggtttagccacgccagagatcccatcttcggcaaccagatcatccccgacacagccatcctgagcgtggtgccttttcaccacggcttcggcatgttcaccacactgggctacctgatctgcggcttcagagtggtgctgatgtaccgcttcgaggaagaactgttcctgcggagcctgcaggactacaagatccagtctgctctgctggtgcctactctgttcagcttctttgccaagagcaccctgatcgataagtacgacctgagcaacctgcacgagatcgcctctggcggagcccctctgtctaaagaagtgggagaagccgtcgccaagcggttccatctgcctggcatcagacaaggctatggcctgaccgagacaaccagcgccattctgattacccctgagggcgacgataagcctggcgctgtgggaaaagtggtgccattcttcgaggccaaggtggtggatctggacaccggcaaaacactgggcgttaaccagaggggcgagctgtgtgttagaggccctatgatcatgagcggctacgtgaacaaccccgaggccacaaacgctctgatcgacaaggatggatggctgcacagcggcgacattgcctactgggacgaagatgagcacttcttcatcgtggaccggctgaagtccctgatcaagtacaagggctaccaggtggccccagccgagctggaatctattctgctgcaacaccccaacatcttcgatgccggcgttgcaggactgcccgatgatgatgctggcgaactgccagctgctgtggtggtgctggaacacggcaagaccatgaccgagaaagaaatcgtggactacgtggccagccaagtgaccaccgccaagaaactgagaggcggcgtggtgtttgtggacgaggtgccaaaaggcctgacaggcaagctggacgcccggaagatcagagagatcctgattaaggccaagaaaggcggcaagatcgccgtgtaatagctaactagaaaaaacaaaaaacaaaacggctattatgcgttaccggcgagacgctacggacttaaataattgagccttaaagaagaaattctttaagtggatgctctcaaactcagggaaacctaaatctagttatagacaaggcaatcctgagccaagccgaagtagtaattagtaagaccagtggacaatcgacggataacagcatatctagatatcggatcccgggcccgtcgactgcagaggcctgcatgcaagcttggcgtaatcatggtcatagctgtttcctgtgtgaaattgttatccgctcacaattccacacaacatacgagccggaagcataaagtgtaaagcctggggtgcctaatgagtgagctaactcacattaattgcgttgcgctcactgcccgctttccagtcgggaaacctgtcgtgccagctgcattaatgaatcggccaacgcgcggggagaggcggtttgcgtattgggcgctcttccgcttcctcgctcactgactcgctgcgctcggtcgttcggctgcggcgagcggtatcagctcactcaaaggcggtaatacggttatccacagaatcaggggataacgcaggaaagaacatgtgagcaaaaggccagcaaaaggccaggaaccgtaaaaaggccgcgttgctggcgtttttccataggctccgcccccctgacgagcatcacaaaaatcgacgctcaagtcagaggtggcgaaacccgacaggactataaagataccaggcgtttccccctggaagctccctcgtgcgctctcctgttccgaccctgccgcttaccggatacctgtccgcctttctcccttcgggaagcgtggcgctttctcatagctcacgctgtaggtatctcagttcggtgtaggtcgttcgctccaagctgggctgtgtgcacgaaccccccgttcagcccgaccgctgcgccttatccggtaactatcgtcttgagtccaacccggtaagacacgacttatcgccactggcagcagccactggtaacaggattagcagagcgaggtatgtaggcggtgctacagagttcttgaagtggtggcctaactacggctacactagaagaacagtatttggtatctgcgctctgctgaagccagttaccttcggaaaaagagttggtagctcttgatccggcaaacaaaccaccgctggtagcggtggtttttttgtttgcaagcagcagattacgcgcagaaaaaaaggatctcaagaagatcctttgatcttttctacggggtctgacgctcagtggaacgaaaactcacgttaagggattttggtcatgagattatcaaaaaggatcttcacctagatccttttaaattaaaaatgaagttttaaatcaatctaaagtatatatgagtaaacttggtctgacagttaccaatgcttaatcagtgaggcacctatctcagcgatctgtctatttcgttcatccatagttgcctgactccccgtcgtgtagataactacgatacgggagggcttaccatctggccccagtgctgcaatgataccgcgagacccacgctcaccggctccagatttatcagcaataaaccagccagccggaagggccgagcgcagaagtggtcctgcaactttatccgcctccatccagtctattaattgttgccgggaagctagagtaagtagttcgccagttaatagtttgcgcaacgttgttgccattgctacaggcatcgtggtgtcacgctcgtcgtttggtatggcttcattcagctccggttcccaacgatcaaggcgagttacatgatcccccatgttgtgcaaaaaagcggttagctccttcggtcctccgatcgttgtcagaagtaagttggccgcagtgttatcactcatggttatggcagcactgcataattctcttactgtcatgccatccgtaagatgcttttctgtgactggtgagtactcaaccaagtcattctgagaatagtgtatgcggcgaccgagttgctcttgcccggcgtcaatacgggataataccgcgccacatagcagaactttaaaagtgctcatcattggaaaacgttcttcggggcgaaaactctcaaggatcttaccgctgttgagatccagttcgatgtaacccactcgtgcacccaactgatcttcagcatcttttactttcaccagcgtttctgggtgagcaaaaacaggaaggcaaaatgccgcaaaaaagggaataagggcgacacggaaatgttgaatactcatactcttcctttttcaatattattgaagcatttatcagggttattgtctcatgagcggatacatatttgaatgtatttagaaaaataaacaaataggggttccgcgcacatttccccgaaaagtgccacctgacgtctaagaaaccattattatcatgacattaacctataaaaataggcgtatcacgaggccctttcgtctcgcgcgtttcggtgatgacggtgaaaacctctgacacatgcagctcccggagacggtcacagcttgtctgtaagcggatgccgggagcagacaagcccgtcagggcgcgtcagcgggtgttggcgggtgtcggggctggcttaactatgcggcatcagagcagattgtactgagagtgcaccatatgcggtgtgaaataccgcacagatgcgtaaggagaaaataccgcatcaggcgccattcgccattcaggctgcgcaactgttgggaagggcgatcggtgcgggcctcttcgctattacgccagctggcgaaagggggatgtgctgcaaggcgattaagttgggtaacgccagggttttcccagtcacgacgttgtaaaacgacggccagtgaattcgagctc

SEQ ID NO: 3191 - DNA, 5541 bp, synthetic construct
  source 1..5541: mol_type = other DNA; note = 5' 30nt exon del
taatacgactcactatagggagaccctcgaccgtcgattgtccactggtcaacaatagatgacttacaactaatcggaaggtgcagagactcgacgggagctaccctaacgtcaagacgagggtaaagagagagtccaattctcaaagccaataggcagtagcgaaagctgcaagagaatgaaaatccgttgaccttaaacgcgccggaaacgcaatagccgaaaaacaaaaaacaaaaaaattaaaacagcctgtgggttgatcccacccacaggcccattgggcgctagcactctggtatcacggtacctttgtgcgcctgttttataccccctcccccaactgtaacttagaagtaacacacaccgatcaacagtcagcgtggcacaccagccacgttttgatcaagcacttctgttaccccggactgagtatcaatagactgctcacgcggttgaaggagaaagcgttcgttatccggccaactacttcgaaaaacctagtaacaccgtggaagttgcagagtgtttcgctcagcactaccccagtgtagatcaggtcgatgagtcaccgcattccccacgggcgaccgtggcggtggctgcgttggcggcctgcccatggggaaacccatgggacgctctaatacagacatggtgcgaagagtctattgagctagttggtagtcctccggcccctgaatgcggctaatcctaactgcggagcacacaccctcaagccagagggcagtgtgtcgtaacgggcaactctgcagcggaaccgactactttgggtgtccgtgtttcattttattcctatactggctgcttatggtgacaattgagagatcgttaccatatagctattggattggccatccggtgactaatagagctattatatatccctttgttgggtttataccacttagcttgaaagaggttaaaacattacaattcattgttaagttgaatacagcaaaatggaagatgccaagaacatcaagaagggccctgctccattctaccctctggaagatggaacagccggcgagcagctgcacaaggccatgaagagatatgccctggtgcctggcacaatcgccttcacagatgcccacatcgaggtggacatcacctacgccgagtacttcgagatgtctgtgcggctggccgaagctatgaagcgctacggcctgaacaccaaccaccggatcgtcgtgtgcagcgagaacagcctgcagttcttcatgcctgtgctgggcgccctgttcatcggagttgctgtggcccctgccaacgacatctacaacgagcgcgagctgctgaacagcatgggcatctctcagcccaccgtggtgttcgtgtccaagaagggactgcagaaaatcctgaacgtgcagaagaagctgcccatcatccagaaaatcatcatcatggacagcaagaccgactaccagggcttccagagcatgtacaccttcgtgaccagccatctgccacctggcttcaacgagtacgacttcgtgcccgagagcttcgaccgggacaagacaatcgccctgatcatgaacagcagcggctctaccggactgcccaaaggtgttgccctgcctcatagaactgcctgcgtgcggtttagccacgccagagatcccatcttcggcaaccagatcatccccgacacagccatcctgagcgtggtgccttttcaccacggcttcggcatgttcaccacactgggctacctgatctgcggcttcagagtggtgctgatgtaccgcttcgaggaagaactgttcctgcggagcctgcaggactacaagatccagtctgctctgctggtgcctactctgttcagcttctttgccaagagcaccctgatcgataagtacgacctgagcaacctgcacgagatcgcctctggcggagcccctctgtctaaagaagtgggagaagccgtcgccaagcggttccatctgcctggcatcagacaaggctatggcctgaccgagacaaccagcgccattctgattacccctgagggcgacgataagcctggcgctgtgggaaaagtggtgccattcttcgaggccaaggtggtggatctggacaccggcaaaacactgggcgttaaccagaggggcgagctgtgtgttagaggccctatgatcatgagcggctacgtgaacaaccccgaggccacaaacgctctgatcgacaaggatggatggctgcacagcggcgacattgcctactgggacgaagatgagcacttcttcatcgtggaccggctgaagtccctgatcaagtacaagggctaccaggtggccccagccgagctggaatctattctgctgcaacaccccaacatcttcgatgccggcgttgcaggactgcccgatgatgatgctggcgaactgccagctgctgtggtggtgctggaacacggcaagaccatgaccgagaaagaaatcgtggactacgtggccagccaagtgaccaccgccaagaaactgagaggcggcgtggtgtttgtggacgaggtgccaaaaggcctgacaggcaagctggacgcccggaagatcagagagatcctgattaaggccaagaaaggcggcaagatcgccgtgtaatagctaactagaaaaaacaaaaaacaaaacggctattatgcgttaccggcgagacgctacggacttaaataattgagccttaaagaagaaattctttaagtggatgctctcaaactcagggaaacctaaatctagttatagacaaggcaatcctgagccaagccgaagtagtaattagtaagaccagtggacaatcgacggataacagcatatctagatatcggatcccgggcccgtcgactgcagaggcctgcatgcaagcttggcgtaatcatggtcatagctgtttcctgtgtgaaattgttatccgctcacaattccacacaacatacgagccggaagcataaagtgtaaagcctggggtgcctaatgagtgagctaactcacattaattgcgttgcgctcactgcccgctttccagtcgggaaacctgtcgtgccagctgcattaatgaatcggccaacgcgcggggagaggcggtttgcgtattgggcgctcttccgcttcctcgctcactgactcgctgcgctcggtcgttcggctgcggcgagcggtatcagctcactcaaaggcggtaatacggttatccacagaatcaggggataacgcaggaaagaacatgtgagcaaaaggccagcaaaaggccaggaaccgtaaaaaggccgcgttgctggcgtttttccataggctccgcccccctgacgagcatcacaaaaatcgacgctcaagtcagaggtggcgaaacccgacaggactataaagataccaggcgtttccccctggaagctccctcgtgcgctctcctgttccgaccctgccgcttaccggatacctgtccgcctttctcccttcgggaagcgtggcgctttctcatagctcacgctgtaggtatctcagttcggtgtaggtcgttcgctccaagctgggctgtgtgcacgaaccccccgttcagcccgaccgctgcgccttatccggtaactatcgtcttgagtccaacccggtaagacacgacttatcgccactggcagcagccactggtaacaggattagcagagcgaggtatgtaggcggtgctacagagttcttgaagtggtggcctaactacggctacactagaagaacagtatttggtatctgcgctctgctgaagccagttaccttcggaaaaagagttggtagctcttgatccggcaaacaaaccaccgctggtagcggtggtttttttgtttgcaagcagcagattacgcgcagaaaaaaaggatctcaagaagatcctttgatcttttctacggggtctgacgctcagtggaacgaaaactcacgttaagggattttggtcatgagattatcaaaaaggatcttcacctagatccttttaaattaaaaatgaagttttaaatcaatctaaagtatatatgagtaaacttggtctgacagttaccaatgcttaatcagtgaggcacctatctcagcgatctgtctatttcgttcatccatagttgcctgactccccgtcgtgtagataactacgatacgggagggcttaccatctggccccagtgctgcaatgataccgcgagacccacgctcaccggctccagatttatcagcaataaaccagccagccggaagggccgagcgcagaagtggtcctgcaactttatccgcctccatccagtctattaattgttgccgggaagctagagtaagtagttcgccagttaatagtttgcgcaacgttgttgccattgctacaggcatcgtggtgtcacgctcgtcgtttggtatggcttcattcagctccggttcccaacgatcaaggcgagttacatgatcccccatgttgtgcaaaaaagcggttagctccttcggtcctccgatcgttgtcagaagtaagttggccgcagtgttatcactcatggttatggcagcactgcataattctcttactgtcatgccatccgtaagatgcttttctgtgactggtgagtactcaaccaagtcattctgagaatagtgtatgcggcgaccgagttgctcttgcccggcgtcaatacgggataataccgcgccacatagcagaactttaaaagtgctcatcattggaaaacgttcttcggggcgaaaactctcaaggatcttaccgctgttgagatccagttcgatgtaacccactcgtgcacccaactgatcttcagcatcttttactttcaccagcgtttctgggtgagcaaaaacaggaaggcaaaatgccgcaaaaaagggaataagggcgacacggaaatgttgaatactcatactcttcctttttcaatattattgaagcatttatcagggttattgtctcatgagcggatacatatttgaatgtatttagaaaaataaacaaataggggttccgcgcacatttccccgaaaagtgccacctgacgtctaagaaaccattattatcatgacattaacctataaaaataggcgtatcacgaggccctttcgtctcgcgcgtttcggtgatgacggtgaaaacctctgacacatgcagctcccggagacggtcacagcttgtctgtaagcggatgccgggagcagacaagcccgtcagggcgcgtcagcgggtgttggcgggtgtcggggctggcttaactatgcggcatcagagcagattgtactgagagtgcaccatatgcggtgtgaaataccgcacagatgcgtaaggagaaaataccgcatcaggcgccattcgccattcaggctgcgcaactgttgggaagggcgatcggtgcgggcctcttcgctattacgccagctggcgaaagggggatgtgctgcaaggcgattaagttgggtaacgccagggttttcccagtcacgacgttgtaaaacgacggccagtgaattcgagctc

SEQ ID NO: 3192 - DNA, 5531 bp, synthetic construct
  source 1..5531: mol_type = other DNA; note = 5' 40nt exon del
taatacgactcactatagggagaccctcgaccgtcgattgtccactggtcaacaatagatgacttacaactaatcggaaggtgcagagactcgacgggagctaccctaacgtcaagacgagggtaaagagagagtccaattctcaaagccaataggcagtagcgaaagctgcaagagaatgaaaatccgttgcgccggaaacgcaatagccgaaaaacaaaaaacaaaaaaattaaaacagcctgtgggttgatcccacccacaggcccattgggcgctagcactctggtatcacggtacctttgtgcgcctgttttataccccctcccccaactgtaacttagaagtaacacacaccgatcaacagtcagcgtggcacaccagccacgttttgatcaagcacttctgttaccccggactgagtatcaatagactgctcacgcggttgaaggagaaagcgttcgttatccggccaactacttcgaaaaacctagtaacaccgtggaagttgcagagtgtttcgctcagcactaccccagtgtagatcaggtcgatgagtcaccgcattccccacgggcgaccgtggcggtggctgcgttggcggcctgcccatggggaaacccatgggacgctctaatacagacatggtgcgaagagtctattgagctagttggtagtcctccggcccctgaatgcggctaatcctaactgcggagcacacaccctcaagccagagggcagtgtgtcgtaacgggcaactctgcagcggaaccgactactttgggtgtccgtgtttcattttattcctatactggctgcttatggtgacaattgagagatcgttaccatatagctattggattggccatccggtgactaatagagctattatatatccctttgttgggtttataccacttagcttgaaagaggttaaaacattacaattcattgttaagttgaatacagcaaaatggaagatgccaagaacatcaagaagggccctgctccattctaccctctggaagatggaacagccggcgagcagctgcacaaggccatgaagagatatgccctggtgcctggcacaatcgccttcacagatgcccacatcgaggtggacatcacctacgccgagtacttcgagatgtctgtgcggctggccgaagctatgaagcgctacggcctgaacaccaaccaccggatcgtcgtgtgcagcgagaacagcctgcagttcttcatgcctgtgctgggcgccctgttcatcggagttgctgtggcccctgccaacgacatctacaacgagcgcgagctgctgaacagcatgggcatctctcagcccaccgtggtgttcgtgtccaagaagggactgcagaaaatcctgaacgtgcagaagaagctgcccatcatccagaaaatcatcatcatggacagcaagaccgactaccagggcttccagagcatgtacaccttcgtgaccagccatctgccacctggcttcaacgagtacgacttcgtgcccgagagcttcgaccgggacaagacaatcgccctgatcatgaacagcagcggctctaccggactgcccaaaggtgttgccctgcctcatagaactgcctgcgtgcggtttagccacgccagagatcccatcttcggcaaccagatcatccccgacacagccatcctgagcgtggtgccttttcaccacggcttcggcatgttcaccacactgggctacctgatctgcggcttcagagtggtgctgatgtaccgcttcgaggaagaactgttcctgcggagcctgcaggactacaagatccagtctgctctgctggtgcctactctgttcagcttctttgccaagagcaccctgatcgataagtacgacctgagcaacctgcacgagatcgcctctggcggagcccctctgtctaaagaagtgggagaagccgtcgccaagcggttccatctgcctggcatcagacaaggctatggcctgaccgagacaaccagcgccattctgattacccctgagggcgacgataagcctggcgctgtgggaaaagtggtgccattcttcgaggccaaggtggtggatctggacaccggcaaaacactgggcgttaaccagaggggcgagctgtgtgttagaggccctatgatcatgagcggctacgtgaacaaccccgaggccacaaacgctctgatcgacaaggatggatggctgcacagcggcgacattgcctactgggacgaagatgagcacttcttcatcgtggaccggctgaagtccctgatcaagtacaagggctaccaggtggccccagccgagctggaatctattctgctgcaacaccccaacatcttcgatgccggcgttgcaggactgcccgatgatgatgctggcgaactgccagctgctgtggtggtgctggaacacggcaagaccatgaccgagaaagaaatcgtggactacgtggccagccaagtgaccaccgccaagaaactgagaggcggcgtggtgtttgtggacgaggtgccaaaaggcctgacaggcaagctggacgcccggaagatcagagagatcctgattaaggccaagaaaggcggcaagatcgccgtgtaatagctaactagaaaaaacaaaaaacaaaacggctattatgcgttaccggcgagacgctacggacttaaataattgagccttaaagaagaaattctttaagtggatgctctcaaactcagggaaacctaaatctagttatagacaaggcaatcctgagccaagccgaagtagtaattagtaagaccagtggacaatcgacggataacagcatatctagatatcggatcccgggcccgtcgactgcagaggcctgcatgcaagcttggcgtaatcatggtcatagctgtttcctgtgtgaaattgttatccgctcacaattccacacaacatacgagccggaagcataaagtgtaaagcctggggtgcctaatgagtgagctaactcacattaattgcgttgcgctcactgcccgctttccagtcgggaaacctgtcgtgccagctgcattaatgaatcggccaacgcgcggggagaggcggtttgcgtattgggcgctcttccgcttcctcgctcactgactcgctgcgctcggtcgttcggctgcggcgagcggtatcagctcactcaaaggcggtaatacggttatccacagaatcaggggataacgcaggaaagaacatgtgagcaaaaggccagcaaaaggccaggaaccgtaaaaaggccgcgttgctggcgtttttccataggctccgcccccctgacgagcatcacaaaaatcgacgctcaagtcagaggtggcgaaacccgacaggactataaagataccaggcgtttccccctggaagctccctcgtgcgctctcctgttccgaccctgccgcttaccggatacctgtccgcctttctcccttcgggaagcgtggcgctttctcatagctcacgctgtaggtatctcagttcggtgtaggtcgttcgctccaagctgggctgtgtgcacgaaccccccgttcagcccgaccgctgcgccttatccggtaactatcgtcttgagtccaacccggtaagacacgacttatcgccactggcagcagccactggtaacaggattagcagagcgaggtatgtaggcggtgctacagagttcttgaagtggtggcctaactacggctacactagaagaacagtatttggtatctgcgctctgctgaagccagttaccttcggaaaaagagttggtagctcttgatccggcaaacaaaccaccgctggtagcggtggtttttttgtttgcaagcagcagattacgcgcagaaaaaaaggatctcaagaagatcctttgatcttttctacggggtctgacgctcagtggaacgaaaactcacgttaagggattttggtcatgagattatcaaaaaggatcttcacctagatccttttaaattaaaaatgaagttttaaatcaatctaaagtatatatgagtaaacttggtctgacagttaccaatgcttaatcagtgaggcacctatctcagcgatctgtctatttcgttcatccatagttgcctgactccccgtcgtgtagataactacgatacgggagggcttaccatctggccccagtgctgcaatgataccgcgagacccacgctcaccggctccagatttatcagcaataaaccagccagccggaagggccgagcgcagaagtggtcctgcaactttatccgcctccatccagtctattaattgttgccgggaagctagagtaagtagttcgccagttaatagtttgcgcaacgttgttgccattgctacaggcatcgtggtgtcacgctcgtcgtttggtatggcttcattcagctccggttcccaacgatcaaggcgagttacatgatcccccatgttgtgcaaaaaagcggttagctccttcggtcctccgatcgttgtcagaagtaagttggccgcagtgttatcactcatggttatggcagcactgcataattctcttactgtcatgccatccgtaagatgcttttctgtgactggtgagtactcaaccaagtcattctgagaatagtgtatgcggcgaccgagttgctcttgcccggcgtcaatacgggataataccgcgccacatagcagaactttaaaagtgctcatcattggaaaacgttcttcggggcgaaaactctcaaggatcttaccgctgttgagatccagttcgatgtaacccactcgtgcacccaactgatcttcagcatcttttactttcaccagcgtttctgggtgagcaaaaacaggaaggcaaaatgccgcaaaaaagggaataagggcgacacggaaatgttgaatactcatactcttcctttttcaatattattgaagcatttatcagggttattgtctcatgagcggatacatatttgaatgtatttagaaaaataaacaaataggggttccgcgcacatttccccgaaaagtgccacctgacgtctaagaaaccattattatcatgacattaacctataaaaataggcgtatcacgaggccctttcgtctcgcgcgtttcggtgatgacggtgaaaacctctgacacatgcagctcccggagacggtcacagcttgtctgtaagcggatgccgggagcagacaagcccgtcagggcgcgtcagcgggtgttggcgggtgtcggggctggcttaactatgcggcatcagagcagattgtactgagagtgcaccatatgcggtgtgaaataccgcacagatgcgtaaggagaaaataccgcatcaggcgccattcgccattcaggctgcgcaactgttgggaagggcgatcggtgcgggcctcttcgctattacgccagctggcgaaagggggatgtgctgcaaggcgattaagttgggtaacgccagggttttcccagtcacgacgttgtaaaacgacggccagtgaattcgagctc

SEQ ID NO: 3193 - DNA, 5529 bp, synthetic construct
  source 1..5529: mol_type = other DNA; note = 5' 42nt exon del
taatacgactcactatagggagaccctcgaccgtcgattgtccactggtcaacaatagatgacttacaactaatcggaaggtgcagagactcgacgggagctaccctaacgtcaagacgagggtaaagagagagtccaattctcaaagccaataggcagtagcgaaagctgcaagagaatgaaaatccgtcgccggaaacgcaatagccgaaaaacaaaaaacaaaaaaattaaaacagcctgtgggttgatcccacccacaggcccattgggcgctagcactctggtatcacggtacctttgtgcgcctgttttataccccctcccccaactgtaacttagaagtaacacacaccgatcaacagtcagcgtggcacaccagccacgttttgatcaagcacttctgttaccccggactgagtatcaatagactgctcacgcggttgaaggagaaagcgttcgttatccggccaactacttcgaaaaacctagtaacaccgtggaagttgcagagtgtttcgctcagcactaccccagtgtagatcaggtcgatgagtcaccgcattccccacgggcgaccgtggcggtggctgcgttggcggcctgcccatggggaaacccatgggacgctctaatacagacatggtgcgaagagtctattgagctagttggtagtcctccggcccctgaatgcggctaatcctaactgcggagcacacaccctcaagccagagggcagtgtgtcgtaacgggcaactctgcagcggaaccgactactttgggtgtccgtgtttcattttattcctatactggctgcttatggtgacaattgagagatcgttaccatatagctattggattggccatccggtgactaatagagctattatatatccctttgttgggtttataccacttagcttgaaagaggttaaaacattacaattcattgttaagttgaatacagcaaaatggaagatgccaagaacatcaagaagggccctgctccattctaccctctggaagatggaacagccggcgagcagctgcacaaggccatgaagagatatgccctggtgcctggcacaatcgccttcacagatgcccacatcgaggtggacatcacctacgccgagtacttcgagatgtctgtgcggctggccgaagctatgaagcgctacggcctgaacaccaaccaccggatcgtcgtgtgcagcgagaacagcctgcagttcttcatgcctgtgctgggcgccctgttcatcggagttgctgtggcccctgccaacgacatctacaacgagcgcgagctgctgaacagcatgggcatctctcagcccaccgtggtgttcgtgtccaagaagggactgcagaaaatcctgaacgtgcagaagaagctgcccatcatccagaaaatcatcatcatggacagcaagaccgactaccagggcttccagagcatgtacaccttcgtgaccagccatctgccacctggcttcaacgagtacgacttcgtgcccgagagcttcgaccgggacaagacaatcgccctgatcatgaacagcagcggctctaccggactgcccaaaggtgttgccctgcctcatagaactgcctgcgtgcggtttagccacgccagagatcccatcttcggcaaccagatcatccccgacacagccatcctgagcgtggtgccttttcaccacggcttcggcatgttcaccacactgggctacctgatctgcggcttcagagtggtgctgatgtaccgcttcgaggaagaactgttcctgcggagcctgcaggactacaagatccagtctgctctgctggtgcctactctgttcagcttctttgccaagagcaccctgatcgataagtacgacctgagcaacctgcacgagatcgcctctggcggagcccctctgtctaaagaagtgggagaagccgtcgccaagcggttccatctgcctggcatcagacaaggctatggcctgaccgagacaaccagcgccattctgattacccctgagggcgacgataagcctggcgctgtgggaaaagtggtgccattcttcgaggccaaggtggtggatctggacaccggcaaaacactgggcgttaaccagaggggcgagctgtgtgttagaggccctatgatcatgagcggctacgtgaacaaccccgaggccacaaacgctctgatcgacaaggatggatggctgcacagcggcgacattgcctactgggacgaagatgagcacttcttcatcgtggaccggctgaagtccctgatcaagtacaagggctaccaggtggccccagccgagctggaatctattctgctgcaacaccccaacatcttcgatgccggcgttgcaggactgcccgatgatgatgctggcgaactgccagctgctgtggtggtgctggaacacggcaagaccatgaccgagaaagaaatcgtggactacgtggccagccaagtgaccaccgccaagaaactgagaggcggcgtggtgtttgtggacgaggtgccaaaaggcctgacaggcaagctggacgcccggaagatcagagagatcctgattaaggccaagaaaggcggcaagatcgccgtgtaatagctaactagaaaaaacaaaaaacaaaacggctattatgcgttaccggcgagacgctacggacttaaataattgagccttaaagaagaaattctttaagtggatgctctcaaactcagggaaacctaaatctagttatagacaaggcaatcctgagccaagccgaagtagtaattagtaagaccagtggacaatcgacggataacagcatatctagatatcggatcccgggcccgtcgactgcagaggcctgcatgcaagcttggcgtaatcatggtcatagctgtttcctgtgtgaaattgttatccgctcacaattccacacaacatacgagccggaagcataaagtgtaaagcctggggtgcctaatgagtgagctaactcacattaattgcgttgcgctcactgcccgctttccagtcgggaaacctgtcgtgccagctgcattaatgaatcggccaacgcgcggggagaggcggtttgcgtattgggcgctcttccgcttcctcgctcactgactcgctgcgctcggtcgttcggctgcggcgagcggtatcagctcactcaaaggcggtaatacggttatccacagaatcaggggataacgcaggaaagaacatgtgagcaaaaggccagcaaaaggccaggaaccgtaaaaaggccgcgttgctggcgtttttccataggctccgcccccctgacgagcatcacaaaaatcgacgctcaagtcagaggtggcgaaacccgacaggactataaagataccaggcgtttccccctggaagctccctcgtgcgctctcctgttccgaccctgccgcttaccggatacctgtccgcctttctcccttcgggaagcgtggcgctttctcatagctcacgctgtaggtatctcagttcggtgtaggtcgttcgctccaagctgggctgtgtgcacgaaccccccgttcagcccgaccgctgcgccttatccggtaactatcgtcttgagtccaacccggtaagacacgacttatcgccactggcagcagccactggtaacaggattagcagagcgaggtatgtaggcggtgctacagagttcttgaagtggtggcctaactacggctacactagaagaacagtatttggtatctgcgctctgctgaagccagttaccttcggaaaaagagttggtagctcttgatccggcaaacaaaccaccgctggtagcggtggtttttttgtttgcaagcagcagattacgcgcagaaaaaaaggatctcaagaagatcctttgatcttttctacggggtctgacgctcagtggaacgaaaactcacgttaagggattttggtcatgagattatcaaaaaggatcttcacctagatccttttaaattaaaaatgaagttttaaatcaatctaaagtatatatgagtaaacttggtctgacagttaccaatgcttaatcagtgaggcacctatctcagcgatctgtctatttcgttcatccatagttgcctgactccccgtcgtgtagataactacgatacgggagggcttaccatctggccccagtgctgcaatgataccgcgagacccacgctcaccggctccagatttatcagcaataaaccagccagccggaagggccgagcgcagaagtggtcctgcaactttatccgcctccatccagtctattaattgttgccgggaagctagagtaagtagttcgccagttaatagtttgcgcaacgttgttgccattgctacaggcatcgtggtgtcacgctcgtcgtttggtatggcttcattcagctccggttcccaacgatcaaggcgagttacatgatcccccatgttgtgcaaaaaagcggttagctccttcggtcctccgatcgttgtcagaagtaagttggccgcagtgttatcactcatggttatggcagcactgcataattctcttactgtcatgccatccgtaagatgcttttctgtgactggtgagtactcaaccaagtcattctgagaatagtgtatgcggcgaccgagttgctcttgcccggcgtcaatacgggataataccgcgccacatagcagaactttaaaagtgctcatcattggaaaacgttcttcggggcgaaaactctcaaggatcttaccgctgttgagatccagttcgatgtaacccactcgtgcacccaactgatcttcagcatcttttactttcaccagcgtttctgggtgagcaaaaacaggaaggcaaaatgccgcaaaaaagggaataagggcgacacggaaatgttgaatactcatactcttcctttttcaatattattgaagcatttatcagggttattgtctcatgagcggatacatatttgaatgtatttagaaaaataaacaaataggggttccgcgcacatttccccgaaaagtgccacctgacgtctaagaaaccattattatcatgacattaacctataaaaataggcgtatcacgaggccctttcgtctcgcgcgtttcggtgatgacggtgaaaacctctgacacatgcagctcccggagacggtcacagcttgtctgtaagcggatgccgggagcagacaagcccgtcagggcgcgtcagcgggtgttggcgggtgtcggggctggcttaactatgcggcatcagagcagattgtactgagagtgcaccatatgcggtgtgaaataccgcacagatgcgtaaggagaaaataccgcatcaggcgccattcgccattcaggctgcgcaactgttgggaagggcgatcggtgcgggcctcttcgctattacgccagctggcgaaagggggatgtgctgcaaggcgattaagttgggtaacgccagggttttcccagtcacgacgttgtaaaacgacggccagtgaattcgagctc

SEQ ID NO: 3194 - DNA, 5527 bp, synthetic construct
  source 1..5527: mol_type = other DNA; note = 5' 44nt exon del
taatacgactcactatagggagaccctcgaccgtcgattgtccactggtcaacaatagatgacttacaactaatcggaaggtgcagagactcgacgggagctaccctaacgtcaagacgagggtaaagagagagtccaattctcaaagccaataggcagtagcgaaagctgcaagagaatgaaaatcccgccggaaacgcaatagccgaaaaacaaaaaacaaaaaaattaaaacagcctgtgggttgatcccacccacaggcccattgggcgctagcactctggtatcacggtacctttgtgcgcctgttttataccccctcccccaactgtaacttagaagtaacacacaccgatcaacagtcagcgtggcacaccagccacgttttgatcaagcacttctgttaccccggactgagtatcaatagactgctcacgcggttgaaggagaaagcgttcgttatccggccaactacttcgaaaaacctagtaacaccgtggaagttgcagagtgtttcgctcagcactaccccagtgtagatcaggtcgatgagtcaccgcattccccacgggcgaccgtggcggtggctgcgttggcggcctgcccatggggaaacccatgggacgctctaatacagacatggtgcgaagagtctattgagctagttggtagtcctccggcccctgaatgcggctaatcctaactgcggagcacacaccctcaagccagagggcagtgtgtcgtaacgggcaactctgcagcggaaccgactactttgggtgtccgtgtttcattttattcctatactggctgcttatggtgacaattgagagatcgttaccatatagctattggattggccatccggtgactaatagagctattatatatccctttgttgggtttataccacttagcttgaaagaggttaaaacattacaattcattgttaagttgaatacagcaaaatggaagatgccaagaacatcaagaagggccctgctccattctaccctctggaagatggaacagccggcgagcagctgcacaaggccatgaagagatatgccctggtgcctggcacaatcgccttcacagatgcccacatcgaggtggacatcacctacgccgagtacttcgagatgtctgtgcggctggccgaagctatgaagcgctacggcctgaacaccaaccaccggatcgtcgtgtgcagcgagaacagcctgcagttcttcatgcctgtgctgggcgccctgttcatcggagttgctgtggcccctgccaacgacatctacaacgagcgcgagctgctgaacagcatgggcatctctcagcccaccgtggtgttcgtgtccaagaagggactgcagaaaatcctgaacgtgcagaagaagctgcccatcatccagaaaatcatcatcatggacagcaagaccgactaccagggcttccagagcatgtacaccttcgtgaccagccatctgccacctggcttcaacgagtacgacttcgtgcccgagagcttcgaccgggacaagacaatcgccctgatcatgaacagcagcggctctaccggactgcccaaaggtgttgccctgcctcatagaactgcctgcgtgcggtttagccacgccagagatcccatcttcggcaaccagatcatccccgacacagccatcctgagcgtggtgccttttcaccacggcttcggcatgttcaccacactgggctacctgatctgcggcttcagagtggtgctgatgtaccgcttcgaggaagaactgttcctgcggagcctgcaggactacaagatccagtctgctctgctggtgcctactctgttcagcttctttgccaagagcaccctgatcgataagtacgacctgagcaacctgcacgagatcgcctctggcggagcccctctgtctaaagaagtgggagaagccgtcgccaagcggttccatctgcctggcatcagacaaggctatggcctgaccgagacaaccagcgccattctgattacccctgagggcgacgataagcctggcgctgtgggaaaagtggtgccattcttcgaggccaaggtggtggatctggacaccggcaaaacactgggcgttaaccagaggggcgagctgtgtgttagaggccctatgatcatgagcggctacgtgaacaaccccgaggccacaaacgctctgatcgacaaggatggatggctgcacagcggcgacattgcctactgggacgaagatgagcacttcttcatcgtggaccggctgaagtccctgatcaagtacaagggctaccaggtggccccagccgagctggaatctattctgctgcaacaccccaacatcttcgatgccggcgttgcaggactgcccgatgatgatgctggcgaactgccagctgctgtggtggtgctggaacacggcaagaccatgaccgagaaagaaatcgtggactacgtggccagccaagtgaccaccgccaagaaactgagaggcggcgtggtgtttgtggacgaggtgccaaaaggcctgacaggcaagctggacgcccggaagatcagagagatcctgattaaggccaagaaaggcggcaagatcgccgtgtaatagctaactagaaaaaacaaaaaacaaaacggctattatgcgttaccggcgagacgctacggacttaaataattgagccttaaagaagaaattctttaagtggatgctctcaaactcagggaaacctaaatctagttatagacaaggcaatcctgagccaagccgaagtagtaattagtaagaccagtggacaatcgacggataacagcatatctagatatcggatcccgggcccgtcgactgcagaggcctgcatgcaagcttggcgtaatcatggtcatagctgtttcctgtgtgaaattgttatccgctcacaattccacacaacatacgagccggaagcataaagtgtaaagcctggggtgcctaatgagtgagctaactcacattaattgcgttgcgctcactgcccgctttccagtcgggaaacctgtcgtgccagctgcattaatgaatcggccaacgcgcggggagaggcggtttgcgtattgggcgctcttccgcttcctcgctcactgactcgctgcgctcggtcgttcggctgcggcgagcggtatcagctcactcaaaggcggtaatacggttatccacagaatcaggggataacgcaggaaagaacatgtgagcaaaaggccagcaaaaggccaggaaccgtaaaaaggccgcgttgctggcgtttttccataggctccgcccccctgacgagcatcacaaaaatcgacgctcaagtcagaggtggcgaaacccgacaggactataaagataccaggcgtttccccctggaagctccctcgtgcgctctcctgttccgaccctgccgcttaccggatacctgtccgcctttctcccttcgggaagcgtggcgctttctcatagctcacgctgtaggtatctcagttcggtgtaggtcgttcgctccaagctgggctgtgtgcacgaaccccccgttcagcccgaccgctgcgccttatccggtaactatcgtcttgagtccaacccggtaagacacgacttatcgccactggcagcagccactggtaacaggattagcagagcgaggtatgtaggcggtgctacagagttcttgaagtggtggcctaactacggctacactagaagaacagtatttggtatctgcgctctgctgaagccagttaccttcggaaaaagagttggtagctcttgatccggcaaacaaaccaccgctggtagcggtggtttttttgtttgcaagcagcagattacgcgcagaaaaaaaggatctcaagaagatcctttgatcttttctacggggtctgacgctcagtggaacgaaaactcacgttaagggattttggtcatgagattatcaaaaaggatcttcacctagatccttttaaattaaaaatgaagttttaaatcaatctaaagtatatatgagtaaacttggtctgacagttaccaatgcttaatcagtgaggcacctatctcagcgatctgtctatttcgttcatccatagttgcctgactccccgtcgtgtagataactacgatacgggagggcttaccatctggccccagtgctgcaatgataccgcgagacccacgctcaccggctccagatttatcagcaataaaccagccagccggaagggccgagcgcagaagtggtcctgcaactttatccgcctccatccagtctattaattgttgccgggaagctagagtaagtagttcgccagttaatagtttgcgcaacgttgttgccattgctacaggcatcgtggtgtcacgctcgtcgtttggtatggcttcattcagctccggttcccaacgatcaaggcgagttacatgatcccccatgttgtgcaaaaaagcggttagctccttcggtcctccgatcgttgtcagaagtaagttggccgcagtgttatcactcatggttatggcagcactgcataattctcttactgtcatgccatccgtaagatgcttttctgtgactggtgagtactcaaccaagtcattctgagaatagtgtatgcggcgaccgagttgctcttgcccggcgtcaatacgggataataccgcgccacatagcagaactttaaaagtgctcatcattggaaaacgttcttcggggcgaaaactctcaaggatcttaccgctgttgagatccagttcgatgtaacccactcgtgcacccaactgatcttcagcatcttttactttcaccagcgtttctgggtgagcaaaaacaggaaggcaaaatgccgcaaaaaagggaataagggcgacacggaaatgttgaatactcatactcttcctttttcaatattattgaagcatttatcagggttattgtctcatgagcggatacatatttgaatgtatttagaaaaataaacaaataggggttccgcgcacatttccccgaaaagtgccacctgacgtctaagaaaccattattatcatgacattaacctataaaaataggcgtatcacgaggccctttcgtctcgcgcgtttcggtgatgacggtgaaaacctctgacacatgcagctcccggagacggtcacagcttgtctgtaagcggatgccgggagcagacaagcccgtcagggcgcgtcagcgggtgttggcgggtgtcggggctggcttaactatgcggcatcagagcagattgtactgagagtgcaccatatgcggtgtgaaataccgcacagatgcgtaaggagaaaataccgcatcaggcgccattcgccattcaggctgcgcaactgttgggaagggcgatcggtgcgggcctcttcgctattacgccagctggcgaaagggggatgtgctgcaaggcgattaagttgggtaacgccagggttttcccagtcacgacgttgtaaaacgacggccagtgaattcgagctc

SEQ ID NO: 3195 - DNA, 5525 bp, synthetic construct
  source 1..5525: mol_type = other DNA; note = 5' 46nt exon del
taatacgactcactatagggagaccctcgaccgtcgattgtccactggtcaacaatagatgacttacaactaatcggaaggtgcagagactcgacgggagctaccctaacgtcaagacgagggtaaagagagagtccaattctcaaagccaataggcagtagcgaaagctgcaagagaatgaaaatcgccggaaacgcaatagccgaaaaacaaaaaacaaaaaaattaaaacagcctgtgggttgatcccacccacaggcccattgggcgctagcactctggtatcacggtacctttgtgcgcctgttttataccccctcccccaactgtaacttagaagtaacacacaccgatcaacagtcagcgtggcacaccagccacgttttgatcaagcacttctgttaccccggactgagtatcaatagactgctcacgcggttgaaggagaaagcgttcgttatccggccaactacttcgaaaaacctagtaacaccgtggaagttgcagagtgtttcgctcagcactaccccagtgtagatcaggtcgatgagtcaccgcattccccacgggcgaccgtggcggtggctgcgttggcggcctgcccatggggaaacccatgggacgctctaatacagacatggtgcgaagagtctattgagctagttggtagtcctccggcccctgaatgcggctaatcctaactgcggagcacacaccctcaagccagagggcagtgtgtcgtaacgggcaactctgcagcggaaccgactactttgggtgtccgtgtttcattttattcctatactggctgcttatggtgacaattgagagatcgttaccatatagctattggattggccatccggtgactaatagagctattatatatccctttgttgggtttataccacttagcttgaaagaggttaaaacattacaattcattgttaagttgaatacagcaaaatggaagatgccaagaacatcaagaagggccctgctccattctaccctctggaagatggaacagccggcgagcagctgcacaaggccatgaagagatatgccctggtgcctggcacaatcgccttcacagatgcccacatcgaggtggacatcacctacgccgagtacttcgagatgtctgtgcggctggccgaagctatgaagcgctacggcctgaacaccaaccaccggatcgtcgtgtgcagcgagaacagcctgcagttcttcatgcctgtgctgggcgccctgttcatcggagttgctgtggcccctgccaacgacatctacaacgagcgcgagctgctgaacagcatgggcatctctcagcccaccgtggtgttcgtgtccaagaagggactgcagaaaatcctgaacgtgcagaagaagctgcccatcatccagaaaatcatcatcatggacagcaagaccgactaccagggcttccagagcatgtacaccttcgtgaccagccatctgccacctggcttcaacgagtacgacttcgtgcccgagagcttcgaccgggacaagacaatcgccctgatcatgaacagcagcggctctaccggactgcccaaaggtgttgccctgcctcatagaactgcctgcgtgcggtttagccacgccagagatcccatcttcggcaaccagatcatccccgacacagccatcctgagcgtggtgccttttcaccacggcttcggcatgttcaccacactgggctacctgatctgcggcttcagagtggtgctgatgtaccgcttcgaggaagaactgttcctgcggagcctgcaggactacaagatccagtctgctctgctggtgcctactctgttcagcttctttgccaagagcaccctgatcgataagtacgacctgagcaacctgcacgagatcgcctctggcggagcccctctgtctaaagaagtgggagaagccgtcgccaagcggttccatctgcctggcatcagacaaggctatggcctgaccgagacaaccagcgccattctgattacccctgagggcgacgataagcctggcgctgtgggaaaagtggtgccattcttcgaggccaaggtggtggatctggacaccggcaaaacactgggcgttaaccagaggggcgagctgtgtgttagaggccctatgatcatgagcggctacgtgaacaaccccgaggccacaaacgctctgatcgacaaggatggatggctgcacagcggcgacattgcctactgggacgaagatgagcacttcttcatcgtggaccggctgaagtccctgatcaagtacaagggctaccaggtggccccagccgagctggaatctattctgctgcaacaccccaacatcttcgatgccggcgttgcaggactgcccgatgatgatgctggcgaactgccagctgctgtggtggtgctggaacacggcaagaccatgaccgagaaagaaatcgtggactacgtggccagccaagtgaccaccgccaagaaactgagaggcggcgtggtgtttgtggacgaggtgccaaaaggcctgacaggcaagctggacgcccggaagatcagagagatcctgattaaggccaagaaaggcggcaagatcgccgtgtaatagctaactagaaaaaacaaaaaacaaaacggctattatgcgttaccggcgagacgctacggacttaaataattgagccttaaagaagaaattctttaagtggatgctctcaaactcagggaaacctaaatctagttatagacaaggcaatcctgagccaagccgaagtagtaattagtaagaccagtggacaatcgacggataacagcatatctagatatcggatcccgggcccgtcgactgcagaggcctgcatgcaagcttggcgtaatcatggtcatagctgtttcctgtgtgaaattgttatccgctcacaattccacacaacatacgagccggaagcataaagtgtaaagcctggggtgcctaatgagtgagctaactcacattaattgcgttgcgctcactgcccgctttccagtcgggaaacctgtcgtgccagctgcattaatgaatcggccaacgcgcggggagaggcggtttgcgtattgggcgctcttccgcttcctcgctcactgactcgctgcgctcggtcgttcggctgcggcgagcggtatcagctcactcaaaggcggtaatacggttatccacagaatcaggggataacgcaggaaagaacatgtgagcaaaaggccagcaaaaggccaggaaccgtaaaaaggccgcgttgctggcgtttttccataggctccgcccccctgacgagcatcacaaaaatcgacgctcaagtcagaggtggcgaaacccgacaggactataaagataccaggcgtttccccctggaagctccctcgtgcgctctcctgttccgaccctgccgcttaccggatacctgtccgcctttctcccttcgggaagcgtggcgctttctcatagctcacgctgtaggtatctcagttcggtgtaggtcgttcgctccaagctgggctgtgtgcacgaaccccccgttcagcccgaccgctgcgccttatccggtaactatcgtcttgagtccaacccggtaagacacgacttatcgccactggcagcagccactggtaacaggattagcagagcgaggtatgtaggcggtgctacagagttcttgaagtggtggcctaactacggctacactagaagaacagtatttggtatctgcgctctgctgaagccagttaccttcggaaaaagagttggtagctcttgatccggcaaacaaaccaccgctggtagcggtggtttttttgtttgcaagcagcagattacgcgcagaaaaaaaggatctcaagaagatcctttgatcttttctacggggtctgacgctcagtggaacgaaaactcacgttaagggattttggtcatgagattatcaaaaaggatcttcacctagatccttttaaattaaaaatgaagttttaaatcaatctaaagtatatatgagtaaacttggtctgacagttaccaatgcttaatcagtgaggcacctatctcagcgatctgtctatttcgttcatccatagttgcctgactccccgtcgtgtagataactacgatacgggagggcttaccatctggccccagtgctgcaatgataccgcgagacccacgctcaccggctccagatttatcagcaataaaccagccagccggaagggccgagcgcagaagtggtcctgcaactttatccgcctccatccagtctattaattgttgccgggaagctagagtaagtagttcgccagttaatagtttgcgcaacgttgttgccattgctacaggcatcgtggtgtcacgctcgtcgtttggtatggcttcattcagctccggttcccaacgatcaaggcgagttacatgatcccccatgttgtgcaaaaaagcggttagctccttcggtcctccgatcgttgtcagaagtaagttggccgcagtgttatcactcatggttatggcagcactgcataattctcttactgtcatgccatccgtaagatgcttttctgtgactggtgagtactcaaccaagtcattctgagaatagtgtatgcggcgaccgagttgctcttgcccggcgtcaatacgggataataccgcgccacatagcagaactttaaaagtgctcatcattggaaaacgttcttcggggcgaaaactctcaaggatcttaccgctgttgagatccagttcgatgtaacccactcgtgcacccaactgatcttcagcatcttttactttcaccagcgtttctgggtgagcaaaaacaggaaggcaaaatgccgcaaaaaagggaataagggcgacacggaaatgttgaatactcatactcttcctttttcaatattattgaagcatttatcagggttattgtctcatgagcggatacatatttgaatgtatttagaaaaataaacaaataggggttccgcgcacatttccccgaaaagtgccacctgacgtctaagaaaccattattatcatgacattaacctataaaaataggcgtatcacgaggccctttcgtctcgcgcgtttcggtgatgacggtgaaaacctctgacacatgcagctcccggagacggtcacagcttgtctgtaagcggatgccgggagcagacaagcccgtcagggcgcgtcagcgggtgttggcgggtgtcggggctggcttaactatgcggcatcagagcagattgtactgagagtgcaccatatgcggtgtgaaataccgcacagatgcgtaaggagaaaataccgcatcaggcgccattcgccattcaggctgcgcaactgttgggaagggcgatcggtgcgggcctcttcgctattacgccagctggcgaaagggggatgtgctgcaaggcgattaagttgggtaacgccagggttttcccagtcacgacgttgtaaaacgacggccagtgaattcgagctc

SEQ ID NO: 3196 - DNA, 5523 bp, synthetic construct
  source 1..5523: mol_type = other DNA; note = 5' 48nt exon del
taatacgactcactatagggagaccctcgaccgtcgattgtccactggtcaacaatagatgacttacaactaatcggaaggtgcagagactcgacgggagctaccctaacgtcaagacgagggtaaagagagagtccaattctcaaagccaataggcagtagcgaaagctgcaagagaatgaaacgccggaaacgcaatagccgaaaaacaaaaaacaaaaaaattaaaacagcctgtgggttgatcccacccacaggcccattgggcgctagcactctggtatcacggtacctttgtgcgcctgttttataccccctcccccaactgtaacttagaagtaacacacaccgatcaacagtcagcgtggcacaccagccacgttttgatcaagcacttctgttaccccggactgagtatcaatagactgctcacgcggttgaaggagaaagcgttcgttatccggccaactacttcgaaaaacctagtaacaccgtggaagttgcagagtgtttcgctcagcactaccccagtgtagatcaggtcgatgagtcaccgcattccccacgggcgaccgtggcggtggctgcgttggcggcctgcccatggggaaacccatgggacgctctaatacagacatggtgcgaagagtctattgagctagttggtagtcctccggcccctgaatgcggctaatcctaactgcggagcacacaccctcaagccagagggcagtgtgtcgtaacgggcaactctgcagcggaaccgactactttgggtgtccgtgtttcattttattcctatactggctgcttatggtgacaattgagagatcgttaccatatagctattggattggccatccggtgactaatagagctattatatatccctttgttgggtttataccacttagcttgaaagaggttaaaacattacaattcattgttaagttgaatacagcaaaatggaagatgccaagaacatcaagaagggccctgctccattctaccctctggaagatggaacagccggcgagcagctgcacaaggccatgaagagatatgccctggtgcctggcacaatcgccttcacagatgcccacatcgaggtggacatcacctacgccgagtacttcgagatgtctgtgcggctggccgaagctatgaagcgctacggcctgaacaccaaccaccggatcgtcgtgtgcagcgagaacagcctgcagttcttcatgcctgtgctgggcgccctgttcatcggagttgctgtggcccctgccaacgacatctacaacgagcgcgagctgctgaacagcatgggcatctctcagcccaccgtggtgttcgtgtccaagaagggactgcagaaaatcctgaacgtgcagaagaagctgcccatcatccagaaaatcatcatcatggacagcaagaccgactaccagggcttccagagcatgtacaccttcgtgaccagccatctgccacctggcttcaacgagtacgacttcgtgcccgagagcttcgaccgggacaagacaatcgccctgatcatgaacagcagcggctctaccggactgcccaaaggtgttgccctgcctcatagaactgcctgcgtgcggtttagccacgccagagatcccatcttcggcaaccagatcatccccgacacagccatcctgagcgtggtgccttttcaccacggcttcggcatgttcaccacactgggctacctgatctgcggcttcagagtggtgctgatgtaccgcttcgaggaagaactgttcctgcggagcctgcaggactacaagatccagtctgctctgctggtgcctactctgttcagcttctttgccaagagcaccctgatcgataagtacgacctgagcaacctgcacgagatcgcctctggcggagcccctctgtctaaagaagtgggagaagccgtcgccaagcggttccatctgcctggcatcagacaaggctatggcctgaccgagacaaccagcgccattctgattacccctgagggcgacgataagcctggcgctgtgggaaaagtggtgccattcttcgaggccaaggtggtggatctggacaccggcaaaacactgggcgttaaccagaggggcgagctgtgtgttagaggccctatgatcatgagcggctacgtgaacaaccccgaggccacaaacgctctgatcgacaaggatggatggctgcacagcggcgacattgcctactgggacgaagatgagcacttcttcatcgtggaccggctgaagtccctgatcaagtacaagggctaccaggtggccccagccgagctggaatctattctgctgcaacaccccaacatcttcgatgccggcgttgcaggactgcccgatgatgatgctggcgaactgccagctgctgtggtggtgctggaacacggcaagaccatgaccgagaaagaaatcgtggactacgtggccagccaagtgaccaccgccaagaaactgagaggcggcgtggtgtttgtggacgaggtgccaaaaggcctgacaggcaagctggacgcccggaagatcagagagatcctgattaaggccaagaaaggcggcaagatcgccgtgtaatagctaactagaaaaaacaaaaaacaaaacggctattatgcgttaccggcgagacgctacggacttaaataattgagccttaaagaagaaattctttaagtggatgctctcaaactcagggaaacctaaatctagttatagacaaggcaatcctgagccaagccgaagtagtaattagtaagaccagtggacaatcgacggataacagcatatctagatatcggatcccgggcccgtcgactgcagaggcctgcatgcaagcttggcgtaatcatggtcatagctgtttcctgtgtgaaattgttatccgctcacaattccacacaacatacgagccggaagcataaagtgtaaagcctggggtgcctaatgagtgagctaactcacattaattgcgttgcgctcactgcccgctttccagtcgggaaacctgtcgtgccagctgcattaatgaatcggccaacgcgcggggagaggcggtttgcgtattgggcgctcttccgcttcctcgctcactgactcgctgcgctcggtcgttcggctgcggcgagcggtatcagctcactcaaaggcggtaatacggttatccacagaatcaggggataacgcaggaaagaacatgtgagcaaaaggccagcaaaaggccaggaaccgtaaaaaggccgcgttgctggcgtttttccataggctccgcccccctgacgagcatcacaaaaatcgacgctcaagtcagaggtggcgaaacccgacaggactataaagataccaggcgtttccccctggaagctccctcgtgcgctctcctgttccgaccctgccgcttaccggatacctgtccgcctttctcccttcgggaagcgtggcgctttctcatagctcacgctgtaggtatctcagttcggtgtaggtcgttcgctccaagctgggctgtgtgcacgaaccccccgttcagcccgaccgctgcgccttatccggtaactatcgtcttgagtccaacccggtaagacacgacttatcgccactggcagcagccactggtaacaggattagcagagcgaggtatgtaggcggtgctacagagttcttgaagtggtggcctaactacggctacactagaagaacagtatttggtatctgcgctctgctgaagccagttaccttcggaaaaagagttggtagctcttgatccggcaaacaaaccaccgctggtagcggtggtttttttgtttgcaagcagcagattacgcgcagaaaaaaaggatctcaagaagatcctttgatcttttctacggggtctgacgctcagtggaacgaaaactcacgttaagggattttggtcatgagattatcaaaaaggatcttcacctagatccttttaaattaaaaatgaagttttaaatcaatctaaagtatatatgagtaaacttggtctgacagttaccaatgcttaatcagtgaggcacctatctcagcgatctgtctatttcgttcatccatagttgcctgactccccgtcgtgtagataactacgatacgggagggcttaccatctggccccagtgctgcaatgataccgcgagacccacgctcaccggctccagatttatcagcaataaaccagccagccggaagggccgagcgcagaagtggtcctgcaactttatccgcctccatccagtctattaattgttgccgggaagctagagtaagtagttcgccagttaatagtttgcgcaacgttgttgccattgctacaggcatcgtggtgtcacgctcgtcgtttggtatggcttcattcagctccggttcccaacgatcaaggcgagttacatgatcccccatgttgtgcaaaaaagcggttagctccttcggtcctccgatcgttgtcagaagtaagttggccgcagtgttatcactcatggttatggcagcactgcataattctcttactgtcatgccatccgtaagatgcttttctgtgactggtgagtactcaaccaagtcattctgagaatagtgtatgcggcgaccgagttgctcttgcccggcgtcaatacgggataataccgcgccacatagcagaactttaaaagtgctcatcattggaaaacgttcttcggggcgaaaactctcaaggatcttaccgctgttgagatccagttcgatgtaacccactcgtgcacccaactgatcttcagcatcttttactttcaccagcgtttctgggtgagcaaaaacaggaaggcaaaatgccgcaaaaaagggaataagggcgacacggaaatgttgaatactcatactcttcctttttcaatattattgaagcatttatcagggttattgtctcatgagcggatacatatttgaatgtatttagaaaaataaacaaataggggttccgcgcacatttccccgaaaagtgccacctgacgtctaagaaaccattattatcatgacattaacctataaaaataggcgtatcacgaggccctttcgtctcgcgcgtttcggtgatgacggtgaaaacctctgacacatgcagctcccggagacggtcacagcttgtctgtaagcggatgccgggagcagacaagcccgtcagggcgcgtcagcgggtgttggcgggtgtcggggctggcttaactatgcggcatcagagcagattgtactgagagtgcaccatatgcggtgtgaaataccgcacagatgcgtaaggagaaaataccgcatcaggcgccattcgccattcaggctgcgcaactgttgggaagggcgatcggtgcgggcctcttcgctattacgccagctggcgaaagggggatgtgctgcaaggcgattaagttgggtaacgccagggttttcccagtcacgacgttgtaaaacgacggccagtgaattcgagctc

SEQ ID NO: 3197 - DNA, 5521 bp, synthetic construct
  source 1..5521: mol_type = other DNA; note = 5' 50nt exon del
taatacgactcactatagggagaccctcgaccgtcgattgtccactggtcaacaatagatgacttacaactaatcggaaggtgcagagactcgacgggagctaccctaacgtcaagacgagggtaaagagagagtccaattctcaaagccaataggcagtagcgaaagctgcaagagaatgacgccggaaacgcaatagccgaaaaacaaaaaacaaaaaaattaaaacagcctgtgggttgatcccacccacaggcccattgggcgctagcactctggtatcacggtacctttgtgcgcctgttttataccccctcccccaactgtaacttagaagtaacacacaccgatcaacagtcagcgtggcacaccagccacgttttgatcaagcacttctgttaccccggactgagtatcaatagactgctcacgcggttgaaggagaaagcgttcgttatccggccaactacttcgaaaaacctagtaacaccgtggaagttgcagagtgtttcgctcagcactaccccagtgtagatcaggtcgatgagtcaccgcattccccacgggcgaccgtggcggtggctgcgttggcggcctgcccatggggaaacccatgggacgctctaatacagacatggtgcgaagagtctattgagctagttggtagtcctccggcccctgaatgcggctaatcctaactgcggagcacacaccctcaagccagagggcagtgtgtcgtaacgggcaactctgcagcggaaccgactactttgggtgtccgtgtttcattttattcctatactggctgcttatggtgacaattgagagatcgttaccatatagctattggattggccatccggtgactaatagagctattatatatccctttgttgggtttataccacttagcttgaaagaggttaaaacattacaattcattgttaagttgaatacagcaaaatggaagatgccaagaacatcaagaagggccctgctccattctaccctctggaagatggaacagccggcgagcagctgcacaaggccatgaagagatatgccctggtgcctggcacaatcgccttcacagatgcccacatcgaggtggacatcacctacgccgagtacttcgagatgtctgtgcggctggccgaagctatgaagcgctacggcctgaacaccaaccaccggatcgtcgtgtgcagcgagaacagcctgcagttcttcatgcctgtgctgggcgccctgttcatcggagttgctgtggcccctgccaacgacatctacaacgagcgcgagctgctgaacagcatgggcatctctcagcccaccgtggtgttcgtgtccaagaagggactgcagaaaatcctgaacgtgcagaagaagctgcccatcatccagaaaatcatcatcatggacagcaagaccgactaccagggcttccagagcatgtacaccttcgtgaccagccatctgccacctggcttcaacgagtacgacttcgtgcccgagagcttcgaccgggacaagacaatcgccctgatcatgaacagcagcggctctaccggactgcccaaaggtgttgccctgcctcatagaactgcctgcgtgcggtttagccacgccagagatcccatcttcggcaaccagatcatccccgacacagccatcctgagcgtggtgccttttcaccacggcttcggcatgttcaccacactgggctacctgatctgcggcttcagagtggtgctgatgtaccgcttcgaggaagaactgttcctgcggagcctgcaggactacaagatccagtctgctctgctggtgcctactctgttcagcttctttgccaagagcaccctgatcgataagtacgacctgagcaacctgcacgagatcgcctctggcggagcccctctgtctaaagaagtgggagaagccgtcgccaagcggttccatctgcctggcatcagacaaggctatggcctgaccgagacaaccagcgccattctgattacccctgagggcgacgataagcctggcgctgtgggaaaagtggtgccattcttcgaggccaaggtggtggatctggacaccggcaaaacactgggcgttaaccagaggggcgagctgtgtgttagaggccctatgatcatgagcggctacgtgaacaaccccgaggccacaaacgctctgatcgacaaggatggatggctgcacagcggcgacattgcctactgggacgaagatgagcacttcttcatcgtggaccggctgaagtccctgatcaagtacaagggctaccaggtggccccagccgagctggaatctattctgctgcaacaccccaacatcttcgatgccggcgttgcaggactgcccgatgatgatgctggcgaactgccagctgctgtggtggtgctggaacacggcaagaccatgaccgagaaagaaatcgtggactacgtggccagccaagtgaccaccgccaagaaactgagaggcggcgtggtgtttgtggacgaggtgccaaaaggcctgacaggcaagctggacgcccggaagatcagagagatcctgattaaggccaagaaaggcggcaagatcgccgtgtaatagctaactagaaaaaacaaaaaacaaaacggctattatgcgttaccggcgagacgctacggacttaaataattgagccttaaagaagaaattctttaagtggatgctctcaaactcagggaaacctaaatctagttatagacaaggcaatcctgagccaagccgaagtagtaattagtaagaccagtggacaatcgacggataacagcatatctagatatcggatcccgggcccgtcgactgcagaggcctgcatgcaagcttggcgtaatcatggtcatagctgtttcctgtgtgaaattgttatccgctcacaattccacacaacatacgagccggaagcataaagtgtaaagcctggggtgcctaatgagtgagctaactcacattaattgcgttgcgctcactgcccgctttccagtcgggaaacctgtcgtgccagctgcattaatgaatcggccaacgcgcggggagaggcggtttgcgtattgggcgctcttccgcttcctcgctcactgactcgctgcgctcggtcgttcggctgcggcgagcggtatcagctcactcaaaggcggtaatacggttatccacagaatcaggggataacgcaggaaagaacatgtgagcaaaaggccagcaaaaggccaggaaccgtaaaaaggccgcgttgctggcgtttttccataggctccgcccccctgacgagcatcacaaaaatcgacgctcaagtcagaggtggcgaaacccgacaggactataaagataccaggcgtttccccctggaagctccctcgtgcgctctcctgttccgaccctgccgcttaccggatacctgtccgcctttctcccttcgggaagcgtggcgctttctcatagctcacgctgtaggtatctcagttcggtgtaggtcgttcgctccaagctgggctgtgtgcacgaaccccccgttcagcccgaccgctgcgccttatccggtaactatcgtcttgagtccaacccggtaagacacgacttatcgccactggcagcagccactggtaacaggattagcagagcgaggtatgtaggcggtgctacagagttcttgaagtggtggcctaactacggctacactagaagaacagtatttggtatctgcgctctgctgaagccagttaccttcggaaaaagagttggtagctcttgatccggcaaacaaaccaccgctggtagcggtggtttttttgtttgcaagcagcagattacgcgcagaaaaaaaggatctcaagaagatcctttgatcttttctacggggtctgacgctcagtggaacgaaaactcacgttaagggattttggtcatgagattatcaaaaaggatcttcacctagatccttttaaattaaaaatgaagttttaaatcaatctaaagtatatatgagtaaacttggtctgacagttaccaatgcttaatcagtgaggcacctatctcagcgatctgtctatttcgttcatccatagttgcctgactccccgtcgtgtagataactacgatacgggagggcttaccatctggccccagtgctgcaatgataccgcgagacccacgctcaccggctccagatttatcagcaataaaccagccagccggaagggccgagcgcagaagtggtcctgcaactttatccgcctccatccagtctattaattgttgccgggaagctagagtaagtagttcgccagttaatagtttgcgcaacgttgttgccattgctacaggcatcgtggtgtcacgctcgtcgtttggtatggcttcattcagctccggttcccaacgatcaaggcgagttacatgatcccccatgttgtgcaaaaaagcggttagctccttcggtcctccgatcgttgtcagaagtaagttggccgcagtgttatcactcatggttatggcagcactgcataattctcttactgtcatgccatccgtaagatgcttttctgtgactggtgagtactcaaccaagtcattctgagaatagtgtatgcggcgaccgagttgctcttgcccggcgtcaatacgggataataccgcgccacatagcagaactttaaaagtgctcatcattggaaaacgttcttcggggcgaaaactctcaaggatcttaccgctgttgagatccagttcgatgtaacccactcgtgcacccaactgatcttcagcatcttttactttcaccagcgtttctgggtgagcaaaaacaggaaggcaaaatgccgcaaaaaagggaataagggcgacacggaaatgttgaatactcatactcttcctttttcaatattattgaagcatttatcagggttattgtctcatgagcggatacatatttgaatgtatttagaaaaataaacaaataggggttccgcgcacatttccccgaaaagtgccacctgacgtctaagaaaccattattatcatgacattaacctataaaaataggcgtatcacgaggccctttcgtctcgcgcgtttcggtgatgacggtgaaaacctctgacacatgcagctcccggagacggtcacagcttgtctgtaagcggatgccgggagcagacaagcccgtcagggcgcgtcagcgggtgttggcgggtgtcggggctggcttaactatgcggcatcagagcagattgtactgagagtgcaccatatgcggtgtgaaataccgcacagatgcgtaaggagaaaataccgcatcaggcgccattcgccattcaggctgcgcaactgttgggaagggcgatcggtgcgggcctcttcgctattacgccagctggcgaaagggggatgtgctgcaaggcgattaagttgggtaacgccagggttttcccagtcacgacgttgtaaaacgacggccagtgaattcgagctc

SEQ ID NO: 3198 - DNA, 5567 bp, synthetic construct
  source 1..5567: mol_type = other DNA; note = 3' 4nt exon del
taatacgactcactatagggagaccctcgaccgtcgattgtccactggtcaacaatagatgacttacaactaatcggaaggtgcagagactcgacgggagctaccctaacgtcaagacgagggtaaagagagagtccaattctcaaagccaataggcagtagcgaaagctgcaagagaatgaaaatccgttgaccttaaacggtcgtgtgggttcaagtccctccacccccacgccggaaacgcaatagccgaaaaacaaaaaacaaaaaaattaaaacagcctgtgggttgatcccacccacaggcccattgggcgctagcactctggtatcacggtacctttgtgcgcctgttttataccccctcccccaactgtaacttagaagtaacacacaccgatcaacagtcagcgtggcacaccagccacgttttgatcaagcacttctgttaccccggactgagtatcaatagactgctcacgcggttgaaggagaaagcgttcgttatccggccaactacttcgaaaaacctagtaacaccgtggaagttgcagagtgtttcgctcagcactaccccagtgtagatcaggtcgatgagtcaccgcattccccacgggcgaccgtggcggtggctgcgttggcggcctgcccatggggaaacccatgggacgctctaatacagacatggtgcgaagagtctattgagctagttggtagtcctccggcccctgaatgcggctaatcctaactgcggagcacacaccctcaagccagagggcagtgtgtcgtaacgggcaactctgcagcggaaccgactactttgggtgtccgtgtttcattttattcctatactggctgcttatggtgacaattgagagatcgttaccatatagctattggattggccatccggtgactaatagagctattatatatccctttgttgggtttataccacttagcttgaaagaggttaaaacattacaattcattgttaagttgaatacagcaaaatggaagatgccaagaacatcaagaagggccctgctccattctaccctctggaagatggaacagccggcgagcagctgcacaaggccatgaagagatatgccctggtgcctggcacaatcgccttcacagatgcccacatcgaggtggacatcacctacgccgagtacttcgagatgtctgtgcggctggccgaagctatgaagcgctacggcctgaacaccaaccaccggatcgtcgtgtgcagcgagaacagcctgcagttcttcatgcctgtgctgggcgccctgttcatcggagttgctgtggcccctgccaacgacatctacaacgagcgcgagctgctgaacagcatgggcatctctcagcccaccgtggtgttcgtgtccaagaagggactgcagaaaatcctgaacgtgcagaagaagctgcccatcatccagaaaatcatcatcatggacagcaagaccgactaccagggcttccagagcatgtacaccttcgtgaccagccatctgccacctggcttcaacgagtacgacttcgtgcccgagagcttcgaccgggacaagacaatcgccctgatcatgaacagcagcggctctaccggactgcccaaaggtgttgccctgcctcatagaactgcctgcgtgcggtttagccacgccagagatcccatcttcggcaaccagatcatccccgacacagccatcctgagcgtggtgccttttcaccacggcttcggcatgttcaccacactgggctacctgatctgcggcttcagagtggtgctgatgtaccgcttcgaggaagaactgttcctgcggagcctgcaggactacaagatccagtctgctctgctggtgcctactctgttcagcttctttgccaagagcaccctgatcgataagtacgacctgagcaacctgcacgagatcgcctctggcggagcccctctgtctaaagaagtgggagaagccgtcgccaagcggttccatctgcctggcatcagacaaggctatggcctgaccgagacaaccagcgccattctgattacccctgagggcgacgataagcctggcgctgtgggaaaagtggtgccattcttcgaggccaaggtggtggatctggacaccggcaaaacactgggcgttaaccagaggggcgagctgtgtgttagaggccctatgatcatgagcggctacgtgaacaaccccgaggccacaaacgctctgatcgacaaggatggatggctgcacagcggcgacattgcctactgggacgaagatgagcacttcttcatcgtggaccggctgaagtccctgatcaagtacaagggctaccaggtggccccagccgagctggaatctattctgctgcaacaccccaacatcttcgatgccggcgttgcaggactgcccgatgatgatgctggcgaactgccagctgctgtggtggtgctggaacacggcaagaccatgaccgagaaagaaatcgtggactacgtggccagccaagtgaccaccgccaagaaactgagaggcggcgtggtgtttgtggacgaggtgccaaaaggcctgacaggcaagctggacgcccggaagatcagagagatcctgattaaggccaagaaaggcggcaagatcgccgtgtaatagctaactagaaaaaacaaaaaacaaaacggctattatgcgttaccggcggctacggacttaaataattgagccttaaagaagaaattctttaagtggatgctctcaaactcagggaaacctaaatctagttatagacaaggcaatcctgagccaagccgaagtagtaattagtaagaccagtggacaatcgacggataacagcatatctagatatcggatcccgggcccgtcgactgcagaggcctgcatgcaagcttggcgtaatcatggtcatagctgtttcctgtgtgaaattgttatccgctcacaattccacacaacatacgagccggaagcataaagtgtaaagcctggggtgcctaatgagtgagctaactcacattaattgcgttgcgctcactgcccgctttccagtcgggaaacctgtcgtgccagctgcattaatgaatcggccaacgcgcggggagaggcggtttgcgtattgggcgctcttccgcttcctcgctcactgactcgctgcgctcggtcgttcggctgcggcgagcggtatcagctcactcaaaggcggtaatacggttatccacagaatcaggggataacgcaggaaagaacatgtgagcaaaaggccagcaaaaggccaggaaccgtaaaaaggccgcgttgctggcgtttttccataggctccgcccccctgacgagcatcacaaaaatcgacgctcaagtcagaggtggcgaaacccgacaggactataaagataccaggcgtttccccctggaagctccctcgtgcgctctcctgttccgaccctgccgcttaccggatacctgtccgcctttctcccttcgggaagcgtggcgctttctcatagctcacgctgtaggtatctcagttcggtgtaggtcgttcgctccaagctgggctgtgtgcacgaaccccccgttcagcccgaccgctgcgccttatccggtaactatcgtcttgagtccaacccggtaagacacgacttatcgccactggcagcagccactggtaacaggattagcagagcgaggtatgtaggcggtgctacagagttcttgaagtggtggcctaactacggctacactagaagaacagtatttggtatctgcgctctgctgaagccagttaccttcggaaaaagagttggtagctcttgatccggcaaacaaaccaccgctggtagcggtggtttttttgtttgcaagcagcagattacgcgcagaaaaaaaggatctcaagaagatcctttgatcttttctacggggtctgacgctcagtggaacgaaaactcacgttaagggattttggtcatgagattatcaaaaaggatcttcacctagatccttttaaattaaaaatgaagttttaaatcaatctaaagtatatatgagtaaacttggtctgacagttaccaatgcttaatcagtgaggcacctatctcagcgatctgtctatttcgttcatccatagttgcctgactccccgtcgtgtagataactacgatacgggagggcttaccatctggccccagtgctgcaatgataccgcgagacccacgctcaccggctccagatttatcagcaataaaccagccagccggaagggccgagcgcagaagtggtcctgcaactttatccgcctccatccagtctattaattgttgccgggaagctagagtaagtagttcgccagttaatagtttgcgcaacgttgttgccattgctacaggcatcgtggtgtcacgctcgtcgtttggtatggcttcattcagctccggttcccaacgatcaaggcgagttacatgatcccccatgttgtgcaaaaaagcggttagctccttcggtcctccgatcgttgtcagaagtaagttggccgcagtgttatcactcatggttatggcagcactgcataattctcttactgtcatgccatccgtaagatgcttttctgtgactggtgagtactcaaccaagtcattctgagaatagtgtatgcggcgaccgagttgctcttgcccggcgtcaatacgggataataccgcgccacatagcagaactttaaaagtgctcatcattggaaaacgttcttcggggcgaaaactctcaaggatcttaccgctgttgagatccagttcgatgtaacccactcgtgcacccaactgatcttcagcatcttttactttcaccagcgtttctgggtgagcaaaaacaggaaggcaaaatgccgcaaaaaagggaataagggcgacacggaaatgttgaatactcatactcttcctttttcaatattattgaagcatttatcagggttattgtctcatgagcggatacatatttgaatgtatttagaaaaataaacaaataggggttccgcgcacatttccccgaaaagtgccacctgacgtctaagaaaccattattatcatgacattaacctataaaaataggcgtatcacgaggccctttcgtctcgcgcgtttcggtgatgacggtgaaaacctctgacacatgcagctcccggagacggtcacagcttgtctgtaagcggatgccgggagcagacaagcccgtcagggcgcgtcagcgggtgttggcgggtgtcggggctggcttaactatgcggcatcagagcagattgtactgagagtgcaccatatgcggtgtgaaataccgcacagatgcgtaaggagaaaataccgcatcaggcgccattcgccattcaggctgcgcaactgttgggaagggcgatcggtgcgggcctcttcgctattacgccagctggcgaaagggggatgtgctgcaaggcgattaagttgggtaacgccagggttttcccagtcacgacgttgtaaaacgacggccagtgaattcgagctc

SEQ ID NO: 3199 - DNA, 5565 bp, synthetic construct
  source 1..5565: mol_type = other DNA; note = 3' 6nt exon del
taatacgactcactatagggagaccctcgaccgtcgattgtccactggtcaacaatagatgacttacaactaatcggaaggtgcagagactcgacgggagctaccctaacgtcaagacgagggtaaagagagagtccaattctcaaagccaataggcagtagcgaaagctgcaagagaatgaaaatccgttgaccttaaacggtcgtgtgggttcaagtccctccacccccacgccggaaacgcaatagccgaaaaacaaaaaacaaaaaaattaaaacagcctgtgggttgatcccacccacaggcccattgggcgctagcactctggtatcacggtacctttgtgcgcctgttttataccccctcccccaactgtaacttagaagtaacacacaccgatcaacagtcagcgtggcacaccagccacgttttgatcaagcacttctgttaccccggactgagtatcaatagactgctcacgcggttgaaggagaaagcgttcgttatccggccaactacttcgaaaaacctagtaacaccgtggaagttgcagagtgtttcgctcagcactaccccagtgtagatcaggtcgatgagtcaccgcattccccacgggcgaccgtggcggtggctgcgttggcggcctgcccatggggaaacccatgggacgctctaatacagacatggtgcgaagagtctattgagctagttggtagtcctccggcccctgaatgcggctaatcctaactgcggagcacacaccctcaagccagagggcagtgtgtcgtaacgggcaactctgcagcggaaccgactactttgggtgtccgtgtttcattttattcctatactggctgcttatggtgacaattgagagatcgttaccatatagctattggattggccatccggtgactaatagagctattatatatccctttgttgggtttataccacttagcttgaaagaggttaaaacattacaattcattgttaagttgaatacagcaaaatggaagatgccaagaacatcaagaagggccctgctccattctaccctctggaagatggaacagccggcgagcagctgcacaaggccatgaagagatatgccctggtgcctggcacaatcgccttcacagatgcccacatcgaggtggacatcacctacgccgagtacttcgagatgtctgtgcggctggccgaagctatgaagcgctacggcctgaacaccaaccaccggatcgtcgtgtgcagcgagaacagcctgcagttcttcatgcctgtgctgggcgccctgttcatcggagttgctgtggcccctgccaacgacatctacaacgagcgcgagctgctgaacagcatgggcatctctcagcccaccgtggtgttcgtgtccaagaagggactgcagaaaatcctgaacgtgcagaagaagctgcccatcatccagaaaatcatcatcatggacagcaagaccgactaccagggcttccagagcatgtacaccttcgtgaccagccatctgccacctggcttcaacgagtacgacttcgtgcccgagagcttcgaccgggacaagacaatcgccctgatcatgaacagcagcggctctaccggactgcccaaaggtgttgccctgcctcatagaactgcctgcgtgcggtttagccacgccagagatcccatcttcggcaaccagatcatccccgacacagccatcctgagcgtggtgccttttcaccacggcttcggcatgttcaccacactgggctacctgatctgcggcttcagagtggtgctgatgtaccgcttcgaggaagaactgttcctgcggagcctgcaggactacaagatccagtctgctctgctggtgcctactctgttcagcttctttgccaagagcaccctgatcgataagtacgacctgagcaacctgcacgagatcgcctctggcggagcccctctgtctaaagaagtgggagaagccgtcgccaagcggttccatctgcctggcatcagacaaggctatggcctgaccgagacaaccagcgccattctgattacccctgagggcgacgataagcctggcgctgtgggaaaagtggtgccattcttcgaggccaaggtggtggatctggacaccggcaaaacactgggcgttaaccagaggggcgagctgtgtgttagaggccctatgatcatgagcggctacgtgaacaaccccgaggccacaaacgctctgatcgacaaggatggatggctgcacagcggcgacattgcctactgggacgaagatgagcacttcttcatcgtggaccggctgaagtccctgatcaagtacaagggctaccaggtggccccagccgagctggaatctattctgctgcaacaccccaacatcttcgatgccggcgttgcaggactgcccgatgatgatgctggcgaactgccagctgctgtggtggtgctggaacacggcaagaccatgaccgagaaagaaatcgtggactacgtggccagccaagtgaccaccgccaagaaactgagaggcggcgtggtgtttgtggacgaggtgccaaaaggcctgacaggcaagctggacgcccggaagatcagagagatcctgattaaggccaagaaaggcggcaagatcgccgtgtaatagctaactagaaaaaacaaaaaacaaaacggctattatgcgttaccggcgtacggacttaaataattgagccttaaagaagaaattctttaagtggatgctctcaaactcagggaaacctaaatctagttatagacaaggcaatcctgagccaagccgaagtagtaattagtaagaccagtggacaatcgacggataacagcatatctagatatcggatcccgggcccgtcgactgcagaggcctgcatgcaagcttggcgtaatcatggtcatagctgtttcctgtgtgaaattgttatccgctcacaattccacacaacatacgagccggaagcataaagtgtaaagcctggggtgcctaatgagtgagctaactcacattaattgcgttgcgctcactgcccgctttccagtcgggaaacctgtcgtgccagctgcattaatgaatcggccaacgcgcggggagaggcggtttgcgtattgggcgctcttccgcttcctcgctcactgactcgctgcgctcggtcgttcggctgcggcgagcggtatcagctcactcaaaggcggtaatacggttatccacagaatcaggggataacgcaggaaagaacatgtgagcaaaaggccagcaaaaggccaggaaccgtaaaaaggccgcgttgctggcgtttttccataggctccgcccccctgacgagcatcacaaaaatcgacgctcaagtcagaggtggcgaaacccgacaggactataaagataccaggcgtttccccctggaagctccctcgtgcgctctcctgttccgaccctgccgcttaccggatacctgtccgcctttctcccttcgggaagcgtggcgctttctcatagctcacgctgtaggtatctcagttcggtgtaggtcgttcgctccaagctgggctgtgtgcacgaaccccccgttcagcccgaccgctgcgccttatccggtaactatcgtcttgagtccaacccggtaagacacgacttatcgccactggcagcagccactggtaacaggattagcagagcgaggtatgtaggcggtgctacagagttcttgaagtggtggcctaactacggctacactagaagaacagtatttggtatctgcgctctgctgaagccagttaccttcggaaaaagagttggtagctcttgatccggcaaacaaaccaccgctggtagcggtggtttttttgtttgcaagcagcagattacgcgcagaaaaaaaggatctcaagaagatcctttgatcttttctacggggtctgacgctcagtggaacgaaaactcacgttaagggattttggtcatgagattatcaaaaaggatcttcacctagatccttttaaattaaaaatgaagttttaaatcaatctaaagtatatatgagtaaacttggtctgacagttaccaatgcttaatcagtgaggcacctatctcagcgatctgtctatttcgttcatccatagttgcctgactccccgtcgtgtagataactacgatacgggagggcttaccatctggccccagtgctgcaatgataccgcgagacccacgctcaccggctccagatttatcagcaataaaccagccagccggaagggccgagcgcagaagtggtcctgcaactttatccgcctccatccagtctattaattgttgccgggaagctagagtaagtagttcgccagttaatagtttgcgcaacgttgttgccattgctacaggcatcgtggtgtcacgctcgtcgtttggtatggcttcattcagctccggttcccaacgatcaaggcgagttacatgatcccccatgttgtgcaaaaaagcggttagctccttcggtcctccgatcgttgtcagaagtaagttggccgcagtgttatcactcatggttatggcagcactgcataattctcttactgtcatgccatccgtaagatgcttttctgtgactggtgagtactcaaccaagtcattctgagaatagtgtatgcggcgaccgagttgctcttgcccggcgtcaatacgggataataccgcgccacatagcagaactttaaaagtgctcatcattggaaaacgttcttcggggcgaaaactctcaaggatcttaccgctgttgagatccagttcgatgtaacccactcgtgcacccaactgatcttcagcatcttttactttcaccagcgtttctgggtgagcaaaaacaggaaggcaaaatgccgcaaaaaagggaataagggcgacacggaaatgttgaatactcatactcttcctttttcaatattattgaagcatttatcagggttattgtctcatgagcggatacatatttgaatgtatttagaaaaataaacaaataggggttccgcgcacatttccccgaaaagtgccacctgacgtctaagaaaccattattatcatgacattaacctataaaaataggcgtatcacgaggccctttcgtctcgcgcgtttcggtgatgacggtgaaaacctctgacacatgcagctcccggagacggtcacagcttgtctgtaagcggatgccgggagcagacaagcccgtcagggcgcgtcagcgggtgttggcgggtgtcggggctggcttaactatgcggcatcagagcagattgtactgagagtgcaccatatgcggtgtgaaataccgcacagatgcgtaaggagaaaataccgcatcaggcgccattcgccattcaggctgcgcaactgttgggaagggcgatcggtgcgggcctcttcgctattacgccagctggcgaaagggggatgtgctgcaaggcgattaagttgggtaacgccagggttttcccagtcacgacgttgtaaaacgacggccagtgaattcgagctc

SEQ ID NO: 3200 - DNA, 5564 bp, synthetic construct
  source 1..5564: mol_type = other DNA; note = 3' 7nt exon del
taatacgactcactatagggagaccctcgaccgtcgattgtccactggtcaacaatagatgacttacaactaatcggaaggtgcagagactcgacgggagctaccctaacgtcaagacgagggtaaagagagagtccaattctcaaagccaataggcagtagcgaaagctgcaagagaatgaaaatccgttgaccttaaacggtcgtgtgggttcaagtccctccacccccacgccggaaacgcaatagccgaaaaacaaaaaacaaaaaaattaaaacagcctgtgggttgatcccacccacaggcccattgggcgctagcactctggtatcacggtacctttgtgcgcctgttttataccccctcccccaactgtaacttagaagtaacacacaccgatcaacagtcagcgtggcacaccagccacgttttgatcaagcacttctgttaccccggactgagtatcaatagactgctcacgcggttgaaggagaaagcgttcgttatccggccaactacttcgaaaaacctagtaacaccgtggaagttgcagagtgtttcgctcagcactaccccagtgtagatcaggtcgatgagtcaccgcattccccacgggcgaccgtggcggtggctgcgttggcggcctgcccatggggaaacccatgggacgctctaatacagacatggtgcgaagagtctattgagctagttggtagtcctccggcccctgaatgcggctaatcctaactgcggagcacacaccctcaagccagagggcagtgtgtcgtaacgggcaactctgcagcggaaccgactactttgggtgtccgtgtttcattttattcctatactggctgcttatggtgacaattgagagatcgttaccatatagctattggattggccatccggtgactaatagagctattatatatccctttgttgggtttataccacttagcttgaaagaggttaaaacattacaattcattgttaagttgaatacagcaaaatggaagatgccaagaacatcaagaagggccctgctccattctaccctctggaagatggaacagccggcgagcagctgcacaaggccatgaagagatatgccctggtgcctggcacaatcgccttcacagatgcccacatcgaggtggacatcacctacgccgagtacttcgagatgtctgtgcggctggccgaagctatgaagcgctacggcctgaacaccaaccaccggatcgtcgtgtgcagcgagaacagcctgcagttcttcatgcctgtgctgggcgccctgttcatcggagttgctgtggcccctgccaacgacatctacaacgagcgcgagctgctgaacagcatgggcatctctcagcccaccgtggtgttcgtgtccaagaagggactgcagaaaatcctgaacgtgcagaagaagctgcccatcatccagaaaatcatcatcatggacagcaagaccgactaccagggcttccagagcatgtacaccttcgtgaccagccatctgccacctggcttcaacgagtacgacttcgtgcccgagagcttcgaccgggacaagacaatcgccctgatcatgaacagcagcggctctaccggactgcccaaaggtgttgccctgcctcatagaactgcctgcgtgcggtttagccacgccagagatcccatcttcggcaaccagatcatccccgacacagccatcctgagcgtggtgccttttcaccacggcttcggcatgttcaccacactgggctacctgatctgcggcttcagagtggtgctgatgtaccgcttcgaggaagaactgttcctgcggagcctgcaggactacaagatccagtctgctctgctggtgcctactctgttcagcttctttgccaagagcaccctgatcgataagtacgacctgagcaacctgcacgagatcgcctctggcggagcccctctgtctaaagaagtgggagaagccgtcgccaagcggttccatctgcctggcatcagacaaggctatggcctgaccgagacaaccagcgccattctgattacccctgagggcgacgataagcctggcgctgtgggaaaagtggtgccattcttcgaggccaaggtggtggatctggacaccggcaaaacactgggcgttaaccagaggggcgagctgtgtgttagaggccctatgatcatgagcggctacgtgaacaaccccgaggccacaaacgctctgatcgacaaggatggatggctgcacagcggcgacattgcctactgggacgaagatgagcacttcttcatcgtggaccggctgaagtccctgatcaagtacaagggctaccaggtggccccagccgagctggaatctattctgctgcaacaccccaacatcttcgatgccggcgttgcaggactgcccgatgatgatgctggcgaactgccagctgctgtggtggtgctggaacacggcaagaccatgaccgagaaagaaatcgtggactacgtggccagccaagtgaccaccgccaagaaactgagaggcggcgtggtgtttgtggacgaggtgccaaaaggcctgacaggcaagctggacgcccggaagatcagagagatcctgattaaggccaagaaaggcggcaagatcgccgtgtaatagctaactagaaaaaacaaaaaacaaaacggctattatgcgttaccggcgacggacttaaataattgagccttaaagaagaaattctttaagtggatgctctcaaactcagggaaacctaaatctagttatagacaaggcaatcctgagccaagccgaagtagtaattagtaagaccagtggacaatcgacggataacagcatatctagatatcggatcccgggcccgtcgactgcagaggcctgcatgcaagcttggcgtaatcatggtcatagctgtttcctgtgtgaaattgttatccgctcacaattccacacaacatacgagccggaagcataaagtgtaaagcctggggtgcctaatgagtgagctaactcacattaattgcgttgcgctcactgcccgctttccagtcgggaaacctgtcgtgccagctgcattaatgaatcggccaacgcgcggggagaggcggtttgcgtattgggcgctcttccgcttcctcgctcactgactcgctgcgctcggtcgttcggctgcggcgagcggtatcagctcactcaaaggcggtaatacggttatccacagaatcaggggataacgcaggaaagaacatgtgagcaaaaggccagcaaaaggccaggaaccgtaaaaaggccgcgttgctggcgtttttccataggctccgcccccctgacgagcatcacaaaaatcgacgctcaagtcagaggtggcgaaacccgacaggactataaagataccaggcgtttccccctggaagctccctcgtgcgctctcctgttccgaccctgccgcttaccggatacctgtccgcctttctcccttcgggaagcgtggcgctttctcatagctcacgctgtaggtatctcagttcggtgtaggtcgttcgctccaagctgggctgtgtgcacgaaccccccgttcagcccgaccgctgcgccttatccggtaactatcgtcttgagtccaacccggtaagacacgacttatcgccactggcagcagccactggtaacaggattagcagagcgaggtatgtaggcggtgctacagagttcttgaagtggtggcctaactacggctacactagaagaacagtatttggtatctgcgctctgctgaagccagttaccttcggaaaaagagttggtagctcttgatccggcaaacaaaccaccgctggtagcggtggtttttttgtttgcaagcagcagattacgcgcagaaaaaaaggatctcaagaagatcctttgatcttttctacggggtctgacgctcagtggaacgaaaactcacgttaagggattttggtcatgagattatcaaaaaggatcttcacctagatccttttaaattaaaaatgaagttttaaatcaatctaaagtatatatgagtaaacttggtctgacagttaccaatgcttaatcagtgaggcacctatctcagcgatctgtctatttcgttcatccatagttgcctgactccccgtcgtgtagataactacgatacgggagggcttaccatctggccccagtgctgcaatgataccgcgagacccacgctcaccggctccagatttatcagcaataaaccagccagccggaagggccgagcgcagaagtggtcctgcaactttatccgcctccatccagtctattaattgttgccgggaagctagagtaagtagttcgccagttaatagtttgcgcaacgttgttgccattgctacaggcatcgtggtgtcacgctcgtcgtttggtatggcttcattcagctccggttcccaacgatcaaggcgagttacatgatcccccatgttgtgcaaaaaagcggttagctccttcggtcctccgatcgttgtcagaagtaagttggccgcagtgttatcactcatggttatggcagcactgcataattctcttactgtcatgccatccgtaagatgcttttctgtgactggtgagtactcaaccaagtcattctgagaatagtgtatgcggcgaccgagttgctcttgcccggcgtcaatacgggataataccgcgccacatagcagaactttaaaagtgctcatcattggaaaacgttcttcggggcgaaaactctcaaggatcttaccgctgttgagatccagttcgatgtaacccactcgtgcacccaactgatcttcagcatcttttactttcaccagcgtttctgggtgagcaaaaacaggaaggcaaaatgccgcaaaaaagggaataagggcgacacggaaatgttgaatactcatactcttcctttttcaatattattgaagcatttatcagggttattgtctcatgagcggatacatatttgaatgtatttagaaaaataaacaaataggggttccgcgcacatttccccgaaaagtgccacctgacgtctaagaaaccattattatcatgacattaacctataaaaataggcgtatcacgaggccctttcgtctcgcgcgtttcggtgatgacggtgaaaacctctgacacatgcagctcccggagacggtcacagcttgtctgtaagcggatgccgggagcagacaagcccgtcagggcgcgtcagcgggtgttggcgggtgtcggggctggcttaactatgcggcatcagagcagattgtactgagagtgcaccatatgcggtgtgaaataccgcacagatgcgtaaggagaaaataccgcatcaggcgccattcgccattcaggctgcgcaactgttgggaagggcgatcggtgcgggcctcttcgctattacgccagctggcgaaagggggatgtgctgcaaggcgattaagttgggtaacgccagggttttcccagtcacgacgttgtaaaacgacggccagtgaattcgagctc

SEQ ID NO: 3201 - DNA, 5563 bp, synthetic construct
  source 1..5563: mol_type = other DNA; note = 3' 8nt exon del
taatacgactcactatagggagaccctcgaccgtcgattgtccactggtcaacaatagatgacttacaactaatcggaaggtgcagagactcgacgggagctaccctaacgtcaagacgagggtaaagagagagtccaattctcaaagccaataggcagtagcgaaagctgcaagagaatgaaaatccgttgaccttaaacggtcgtgtgggttcaagtccctccacccccacgccggaaacgcaatagccgaaaaacaaaaaacaaaaaaattaaaacagcctgtgggttgatcccacccacaggcccattgggcgctagcactctggtatcacggtacctttgtgcgcctgttttataccccctcccccaactgtaacttagaagtaacacacaccgatcaacagtcagcgtggcacaccagccacgttttgatcaagcacttctgttaccccggactgagtatcaatagactgctcacgcggttgaaggagaaagcgttcgttatccggccaactacttcgaaaaacctagtaacaccgtggaagttgcagagtgtttcgctcagcactaccccagtgtagatcaggtcgatgagtcaccgcattccccacgggcgaccgtggcggtggctgcgttggcggcctgcccatggggaaacccatgggacgctctaatacagacatggtgcgaagagtctattgagctagttggtagtcctccggcccctgaatgcggctaatcctaactgcggagcacacaccctcaagccagagggcagtgtgtcgtaacgggcaactctgcagcggaaccgactactttgggtgtccgtgtttcattttattcctatactggctgcttatggtgacaattgagagatcgttaccatatagctattggattggccatccggtgactaatagagctattatatatccctttgttgggtttataccacttagcttgaaagaggttaaaacattacaattcattgttaagttgaatacagcaaaatggaagatgccaagaacatcaagaagggccctgctccattctaccctctggaagatggaacagccggcgagcagctgcacaaggccatgaagagatatgccctggtgcctggcacaatcgccttcacagatgcccacatcgaggtggacatcacctacgccgagtacttcgagatgtctgtgcggctggccgaagctatgaagcgctacggcctgaacaccaaccaccggatcgtcgtgtgcagcgagaacagcctgcagttcttcatgcctgtgctgggcgccctgttcatcggagttgctgtggcccctgccaacgacatctacaacgagcgcgagctgctgaacagcatgggcatctctcagcccaccgtggtgttcgtgtccaagaagggactgcagaaaatcctgaacgtgcagaagaagctgcccatcatccagaaaatcatcatcatggacagcaagaccgactaccagggcttccagagcatgtacaccttcgtgaccagccatctgccacctggcttcaacgagtacgacttcgtgcccgagagcttcgaccgggacaagacaatcgccctgatcatgaacagcagcggctctaccggactgcccaaaggtgttgccctgcctcatagaactgcctgcgtgcggtttagccacgccagagatcccatcttcggcaaccagatcatccccgacacagccatcctgagcgtggtgccttttcaccacggcttcggcatgttcaccacactgggctacctgatctgcggcttcagagtggtgctgatgtaccgcttcgaggaagaactgttcctgcggagcctgcaggactacaagatccagtctgctctgctggtgcctactctgttcagcttctttgccaagagcaccctgatcgataagtacgacctgagcaacctgcacgagatcgcctctggcggagcccctctgtctaaagaagtgggagaagccgtcgccaagcggttccatctgcctggcatcagacaaggctatggcctgaccgagacaaccagcgccattctgattacccctgagggcgacgataagcctggcgctgtgggaaaagtggtgccattcttcgaggccaaggtggtggatctggacaccggcaaaacactgggcgttaaccagaggggcgagctgtgtgttagaggccctatgatcatgagcggctacgtgaacaaccccgaggccacaaacgctctgatcgacaaggatggatggctgcacagcggcgacattgcctactgggacgaagatgagcacttcttcatcgtggaccggctgaagtccctgatcaagtacaagggctaccaggtggccccagccgagctggaatctattctgctgcaacaccccaacatcttcgatgccggcgttgcaggactgcccgatgatgatgctggcgaactgccagctgctgtggtggtgctggaacacggcaagaccatgaccgagaaagaaatcgtggactacgtggccagccaagtgaccaccgccaagaaactgagaggcggcgtggtgtttgtggacgaggtgccaaaaggcctgacaggcaagctggacgcccggaagatcagagagatcctgattaaggccaagaaaggcggcaagatcgccgtgtaatagctaactagaaaaaacaaaaaacaaaacggctattatgcgttaccggcgcggacttaaataattgagccttaaagaagaaattctttaagtggatgctctcaaactcagggaaacctaaatctagttatagacaaggcaatcctgagccaagccgaagtagtaattagtaagaccagtggacaatcgacggataacagcatatctagatatcggatcccgggcccgtcgactgcagaggcctgcatgcaagcttggcgtaatcatggtcatagctgtttcctgtgtgaaattgttatccgctcacaattccacacaacatacgagccggaagcataaagtgtaaagcctggggtgcctaatgagtgagctaactcacattaattgcgttgcgctcactgcccgctttccagtcgggaaacctgtcgtgccagctgcattaatgaatcggccaacgcgcggggagaggcggtttgcgtattgggcgctcttccgcttcctcgctcactgactcgctgcgctcggtcgttcggctgcggcgagcggtatcagctcactcaaaggcggtaatacggttatccacagaatcaggggataacgcaggaaagaacatgtgagcaaaaggccagcaaaaggccaggaaccgtaaaaaggccgcgttgctggcgtttttccataggctccgcccccctgacgagcatcacaaaaatcgacgctcaagtcagaggtggcgaaacccgacaggactataaagataccaggcgtttccccctggaagctccctcgtgcgctctcctgttccgaccctgccgcttaccggatacctgtccgcctttctcccttcgggaagcgtggcgctttctcatagctcacgctgtaggtatctcagttcggtgtaggtcgttcgctccaagctgggctgtgtgcacgaaccccccgttcagcccgaccgctgcgccttatccggtaactatcgtcttgagtccaacccggtaagacacgacttatcgccactggcagcagccactggtaacaggattagcagagcgaggtatgtaggcggtgctacagagttcttgaagtggtggcctaactacggctacactagaagaacagtatttggtatctgcgctctgctgaagccagttaccttcggaaaaagagttggtagctcttgatccggcaaacaaaccaccgctggtagcggtggtttttttgtttgcaagcagcagattacgcgcagaaaaaaaggatctcaagaagatcctttgatcttttctacggggtctgacgctcagtggaacgaaaactcacgttaagggattttggtcatgagattatcaaaaaggatcttcacctagatccttttaaattaaaaatgaagttttaaatcaatctaaagtatatatgagtaaacttggtctgacagttaccaatgcttaatcagtgaggcacctatctcagcgatctgtctatttcgttcatccatagttgcctgactccccgtcgtgtagataactacgatacgggagggcttaccatctggccccagtgctgcaatgataccgcgagacccacgctcaccggctccagatttatcagcaataaaccagccagccggaagggccgagcgcagaagtggtcctgcaactttatccgcctccatccagtctattaattgttgccgggaagctagagtaagtagttcgccagttaatagtttgcgcaacgttgttgccattgctacaggcatcgtggtgtcacgctcgtcgtttggtatggcttcattcagctccggttcccaacgatcaaggcgagttacatgatcccccatgttgtgcaaaaaagcggttagctccttcggtcctccgatcgttgtcagaagtaagttggccgcagtgttatcactcatggttatggcagcactgcataattctcttactgtcatgccatccgtaagatgcttttctgtgactggtgagtactcaaccaagtcattctgagaatagtgtatgcggcgaccgagttgctcttgcccggcgtcaatacgggataataccgcgccacatagcagaactttaaaagtgctcatcattggaaaacgttcttcggggcgaaaactctcaaggatcttaccgctgttgagatccagttcgatgtaacccactcgtgcacccaactgatcttcagcatcttttactttcaccagcgtttctgggtgagcaaaaacaggaaggcaaaatgccgcaaaaaagggaataagggcgacacggaaatgttgaatactcatactcttcctttttcaatattattgaagcatttatcagggttattgtctcatgagcggatacatatttgaatgtatttagaaaaataaacaaataggggttccgcgcacatttccccgaaaagtgccacctgacgtctaagaaaccattattatcatgacattaacctataaaaataggcgtatcacgaggccctttcgtctcgcgcgtttcggtgatgacggtgaaaacctctgacacatgcagctcccggagacggtcacagcttgtctgtaagcggatgccgggagcagacaagcccgtcagggcgcgtcagcgggtgttggcgggtgtcggggctggcttaactatgcggcatcagagcagattgtactgagagtgcaccatatgcggtgtgaaataccgcacagatgcgtaaggagaaaataccgcatcaggcgccattcgccattcaggctgcgcaactgttgggaagggcgatcggtgcgggcctcttcgctattacgccagctggcgaaagggggatgtgctgcaaggcgattaagttgggtaacgccagggttttcccagtcacgacgttgtaaaacgacggccagtgaattcgagctc

SEQ ID NO: 3202 - DNA, 5562 bp, synthetic construct
  source 1..5562: mol_type = other DNA; note = 3' 9nt exon del
taatacgactcactatagggagaccctcgaccgtcgattgtccactggtcaacaatagatgacttacaactaatcggaaggtgcagagactcgacgggagctaccctaacgtcaagacgagggtaaagagagagtccaattctcaaagccaataggcagtagcgaaagctgcaagagaatgaaaatccgttgaccttaaacggtcgtgtgggttcaagtccctccacccccacgccggaaacgcaatagccgaaaaacaaaaaacaaaaaaattaaaacagcctgtgggttgatcccacccacaggcccattgggcgctagcactctggtatcacggtacctttgtgcgcctgttttataccccctcccccaactgtaacttagaagtaacacacaccgatcaacagtcagcgtggcacaccagccacgttttgatcaagcacttctgttaccccggactgagtatcaatagactgctcacgcggttgaaggagaaagcgttcgttatccggccaactacttcgaaaaacctagtaacaccgtggaagttgcagagtgtttcgctcagcactaccccagtgtagatcaggtcgatgagtcaccgcattccccacgggcgaccgtggcggtggctgcgttggcggcctgcccatggggaaacccatgggacgctctaatacagacatggtgcgaagagtctattgagctagttggtagtcctccggcccctgaatgcggctaatcctaactgcggagcacacaccctcaagccagagggcagtgtgtcgtaacgggcaactctgcagcggaaccgactactttgggtgtccgtgtttcattttattcctatactggctgcttatggtgacaattgagagatcgttaccatatagctattggattggccatccggtgactaatagagctattatatatccctttgttgggtttataccacttagcttgaaagaggttaaaacattacaattcattgttaagttgaatacagcaaaatggaagatgccaagaacatcaagaagggccctgctccattctaccctctggaagatggaacagccggcgagcagctgcacaaggccatgaagagatatgccctggtgcctggcacaatcgccttcacagatgcccacatcgaggtggacatcacctacgccgagtacttcgagatgtctgtgcggctggccgaagctatgaagcgctacggcctgaacaccaaccaccggatcgtcgtgtgcagcgagaacagcctgcagttcttcatgcctgtgctgggcgccctgttcatcggagttgctgtggcccctgccaacgacatctacaacgagcgcgagctgctgaacagcatgggcatctctcagcccaccgtggtgttcgtgtccaagaagggactgcagaaaatcctgaacgtgcagaagaagctgcccatcatccagaaaatcatcatcatggacagcaagaccgactaccagggcttccagagcatgtacaccttcgtgaccagccatctgccacctggcttcaacgagtacgacttcgtgcccgagagcttcgaccgggacaagacaatcgccctgatcatgaacagcagcggctctaccggactgcccaaaggtgttgccctgcctcatagaactgcctgcgtgcggtttagccacgccagagatcccatcttcggcaaccagatcatccccgacacagccatcctgagcgtggtgccttttcaccacggcttcggcatgttcaccacactgggctacctgatctgcggcttcagagtggtgctgatgtaccgcttcgaggaagaactgttcctgcggagcctgcaggactacaagatccagtctgctctgctggtgcctactctgttcagcttctttgccaagagcaccctgatcgataagtacgacctgagcaacctgcacgagatcgcctctggcggagcccctctgtctaaagaagtgggagaagccgtcgccaagcggttccatctgcctggcatcagacaaggctatggcctgaccgagacaaccagcgccattctgattacccctgagggcgacgataagcctggcgctgtgggaaaagtggtgccattcttcgaggccaaggtggtggatctggacaccggcaaaacactgggcgttaaccagaggggcgagctgtgtgttagaggccctatgatcatgagcggctacgtgaacaaccccgaggccacaaacgctctgatcgacaaggatggatggctgcacagcggcgacattgcctactgggacgaagatgagcacttcttcatcgtggaccggctgaagtccctgatcaagtacaagggctaccaggtggccccagccgagctggaatctattctgctgcaacaccccaacatcttcgatgccggcgttgcaggactgcccgatgatgatgctggcgaactgccagctgctgtggtggtgctggaacacggcaagaccatgaccgagaaagaaatcgtggactacgtggccagccaagtgaccaccgccaagaaactgagaggcggcgtggtgtttgtggacgaggtgccaaaaggcctgacaggcaagctggacgcccggaagatcagagagatcctgattaaggccaagaaaggcggcaagatcgccgtgtaatagctaactagaaaaaacaaaaaacaaaacggctattatgcgttaccggcgggacttaaataattgagccttaaagaagaaattctttaagtggatgctctcaaactcagggaaacctaaatctagttatagacaaggcaatcctgagccaagccgaagtagtaattagtaagaccagtggacaatcgacggataacagcatatctagatatcggatcccgggcccgtcgactgcagaggcctgcatgcaagcttggcgtaatcatggtcatagctgtttcctgtgtgaaattgttatccgctcacaattccacacaacatacgagccggaagcataaagtgtaaagcctggggtgcctaatgagtgagctaactcacattaattgcgttgcgctcactgcccgctttccagtcgggaaacctgtcgtgccagctgcattaatgaatcggccaacgcgcggggagaggcggtttgcgtattgggcgctcttccgcttcctcgctcactgactcgctgcgctcggtcgttcggctgcggcgagcggtatcagctcactcaaaggcggtaatacggttatccacagaatcaggggataacgcaggaaagaacatgtgagcaaaaggccagcaaaaggccaggaaccgtaaaaaggccgcgttgctggcgtttttccataggctccgcccccctgacgagcatcacaaaaatcgacgctcaagtcagaggtggcgaaacccgacaggactataaagataccaggcgtttccccctggaagctccctcgtgcgctctcctgttccgaccctgccgcttaccggatacctgtccgcctttctcccttcgggaagcgtggcgctttctcatagctcacgctgtaggtatctcagttcggtgtaggtcgttcgctccaagctgggctgtgtgcacgaaccccccgttcagcccgaccgctgcgccttatccggtaactatcgtcttgagtccaacccggtaagacacgacttatcgccactggcagcagccactggtaacaggattagcagagcgaggtatgtaggcggtgctacagagttcttgaagtggtggcctaactacggctacactagaagaacagtatttggtatctgcgctctgctgaagccagttaccttcggaaaaagagttggtagctcttgatccggcaaacaaaccaccgctggtagcggtggtttttttgtttgcaagcagcagattacgcgcagaaaaaaaggatctcaagaagatcctttgatcttttctacggggtctgacgctcagtggaacgaaaactcacgttaagggattttggtcatgagattatcaaaaaggatcttcacctagatccttttaaattaaaaatgaagttttaaatcaatctaaagtatatatgagtaaacttggtctgacagttaccaatgcttaatcagtgaggcacctatctcagcgatctgtctatttcgttcatccatagttgcctgactccccgtcgtgtagataactacgatacgggagggcttaccatctggccccagtgctgcaatgataccgcgagacccacgctcaccggctccagatttatcagcaataaaccagccagccggaagggccgagcgcagaagtggtcctgcaactttatccgcctccatccagtctattaattgttgccgggaagctagagtaagtagttcgccagttaatagtttgcgcaacgttgttgccattgctacaggcatcgtggtgtcacgctcgtcgtttggtatggcttcattcagctccggttcccaacgatcaaggcgagttacatgatcccccatgttgtgcaaaaaagcggttagctccttcggtcctccgatcgttgtcagaagtaagttggccgcagtgttatcactcatggttatggcagcactgcataattctcttactgtcatgccatccgtaagatgcttttctgtgactggtgagtactcaaccaagtcattctgagaatagtgtatgcggcgaccgagttgctcttgcccggcgtcaatacgggataataccgcgccacatagcagaactttaaaagtgctcatcattggaaaacgttcttcggggcgaaaactctcaaggatcttaccgctgttgagatccagttcgatgtaacccactcgtgcacccaactgatcttcagcatcttttactttcaccagcgtttctgggtgagcaaaaacaggaaggcaaaatgccgcaaaaaagggaataagggcgacacggaaatgttgaatactcatactcttcctttttcaatattattgaagcatttatcagggttattgtctcatgagcggatacatatttgaatgtatttagaaaaataaacaaataggggttccgcgcacatttccccgaaaagtgccacctgacgtctaagaaaccattattatcatgacattaacctataaaaataggcgtatcacgaggccctttcgtctcgcgcgtttcggtgatgacggtgaaaacctctgacacatgcagctcccggagacggtcacagcttgtctgtaagcggatgccgggagcagacaagcccgtcagggcgcgtcagcgggtgttggcgggtgtcggggctggcttaactatgcggcatcagagcagattgtactgagagtgcaccatatgcggtgtgaaataccgcacagatgcgtaaggagaaaataccgcatcaggcgccattcgccattcaggctgcgcaactgttgggaagggcgatcggtgcgggcctcttcgctattacgccagctggcgaaagggggatgtgctgcaaggcgattaagttgggtaacgccagggttttcccagtcacgacgttgtaaaacgacggccagtgaattcgagctc

SEQ ID NO: 3203 - DNA, 5561 bp, synthetic construct
  source 1..5561: mol_type = other DNA; note = 3' 10nt exon del
taatacgactcactatagggagaccctcgaccgtcgattgtccactggtcaacaatagatgacttacaactaatcggaaggtgcagagactcgacgggagctaccctaacgtcaagacgagggtaaagagagagtccaattctcaaagccaataggcagtagcgaaagctgcaagagaatgaaaatccgttgaccttaaacggtcgtgtgggttcaagtccctccacccccacgccggaaacgcaatagccgaaaaacaaaaaacaaaaaaattaaaacagcctgtgggttgatcccacccacaggcccattgggcgctagcactctggtatcacggtacctttgtgcgcctgttttataccccctcccccaactgtaacttagaagtaacacacaccgatcaacagtcagcgtggcacaccagccacgttttgatcaagcacttctgttaccccggactgagtatcaatagactgctcacgcggttgaaggagaaagcgttcgttatccggccaactacttcgaaaaacctagtaacaccgtggaagttgcagagtgtttcgctcagcactaccccagtgtagatcaggtcgatgagtcaccgcattccccacgggcgaccgtggcggtggctgcgttggcggcctgcccatggggaaacccatgggacgctctaatacagacatggtgcgaagagtctattgagctagttggtagtcctccggcccctgaatgcggctaatcctaactgcggagcacacaccctcaagccagagggcagtgtgtcgtaacgggcaactctgcagcggaaccgactactttgggtgtccgtgtttcattttattcctatactggctgcttatggtgacaattgagagatcgttaccatatagctattggattggccatccggtgactaatagagctattatatatccctttgttgggtttataccacttagcttgaaagaggttaaaacattacaattcattgttaagttgaatacagcaaaatggaagatgccaagaacatcaagaagggccctgctccattctaccctctggaagatggaacagccggcgagcagctgcacaaggccatgaagagatatgccctggtgcctggcacaatcgccttcacagatgcccacatcgaggtggacatcacctacgccgagtacttcgagatgtctgtgcggctggccgaagctatgaagcgctacggcctgaacaccaaccaccggatcgtcgtgtgcagcgagaacagcctgcagttcttcatgcctgtgctgggcgccctgttcatcggagttgctgtggcccctgccaacgacatctacaacgagcgcgagctgctgaacagcatgggcatctctcagcccaccgtggtgttcgtgtccaagaagggactgcagaaaatcctgaacgtgcagaagaagctgcccatcatccagaaaatcatcatcatggacagcaagaccgactaccagggcttccagagcatgtacaccttcgtgaccagccatctgccacctggcttcaacgagtacgacttcgtgcccgagagcttcgaccgggacaagacaatcgccctgatcatgaacagcagcggctctaccggactgcccaaaggtgttgccctgcctcatagaactgcctgcgtgcggtttagccacgccagagatcccatcttcggcaaccagatcatccccgacacagccatcctgagcgtggtgccttttcaccacggcttcggcatgttcaccacactgggctacctgatctgcggcttcagagtggtgctgatgtaccgcttcgaggaagaactgttcctgcggagcctgcaggactacaagatccagtctgctctgctggtgcctactctgttcagcttctttgccaagagcaccctgatcgataagtacgacctgagcaacctgcacgagatcgcctctggcggagcccctctgtctaaagaagtgggagaagccgtcgccaagcggttccatctgcctggcatcagacaaggctatggcctgaccgagacaaccagcgccattctgattacccctgagggcgacgataagcctggcgctgtgggaaaagtggtgccattcttcgaggccaaggtggtggatctggacaccggcaaaacactgggcgttaaccagaggggcgagctgtgtgttagaggccctatgatcatgagcggctacgtgaacaaccccgaggccacaaacgctctgatcgacaaggatggatggctgcacagcggcgacattgcctactgggacgaagatgagcacttcttcatcgtggaccggctgaagtccctgatcaagtacaagggctaccaggtggccccagccgagctggaatctattctgctgcaacaccccaacatcttcgatgccggcgttgcaggactgcccgatgatgatgctggcgaactgccagctgctgtggtggtgctggaacacggcaagaccatgaccgagaaagaaatcgtggactacgtggccagccaagtgaccaccgccaagaaactgagaggcggcgtggtgtttgtggacgaggtgccaaaaggcctgacaggcaagctggacgcccggaagatcagagagatcctgattaaggccaagaaaggcggcaagatcgccgtgtaatagctaactagaaaaaacaaaaaacaaaacggctattatgcgttaccggcggacttaaataattgagccttaaagaagaaattctttaagtggatgctctcaaactcagggaaacctaaatctagttatagacaaggcaatcctgagccaagccgaagtagtaattagtaagaccagtggacaatcgacggataacagcatatctagatatcggatcccgggcccgtcgactgcagaggcctgcatgcaagcttggcgtaatcatggtcatagctgtttcctgtgtgaaattgttatccgctcacaattccacacaacatacgagccggaagcataaagtgtaaagcctggggtgcctaatgagtgagctaactcacattaattgcgttgcgctcactgcccgctttccagtcgggaaacctgtcgtgccagctgcattaatgaatcggccaacgcgcggggagaggcggtttgcgtattgggcgctcttccgcttcctcgctcactgactcgctgcgctcggtcgttcggctgcggcgagcggtatcagctcactcaaaggcggtaatacggttatccacagaatcaggggataacgcaggaaagaacatgtgagcaaaaggccagcaaaaggccaggaaccgtaaaaaggccgcgttgctggcgtttttccataggctccgcccccctgacgagcatcacaaaaatcgacgctcaagtcagaggtggcgaaacccgacaggactataaagataccaggcgtttccccctggaagctccctcgtgcgctctcctgttccgaccctgccgcttaccggatacctgtccgcctttctcccttcgggaagcgtggcgctttctcatagctcacgctgtaggtatctcagttcggtgtaggtcgttcgctccaagctgggctgtgtgcacgaaccccccgttcagcccgaccgctgcgccttatccggtaactatcgtcttgagtccaacccggtaagacacgacttatcgccactggcagcagccactggtaacaggattagcagagcgaggtatgtaggcggtgctacagagttcttgaagtggtggcctaactacggctacactagaagaacagtatttggtatctgcgctctgctgaagccagttaccttcggaaaaagagttggtagctcttgatccggcaaacaaaccaccgctggtagcggtggtttttttgtttgcaagcagcagattacgcgcagaaaaaaaggatctcaagaagatcctttgatcttttctacggggtctgacgctcagtggaacgaaaactcacgttaagggattttggtcatgagattatcaaaaaggatcttcacctagatccttttaaattaaaaatgaagttttaaatcaatctaaagtatatatgagtaaacttggtctgacagttaccaatgcttaatcagtgaggcacctatctcagcgatctgtctatttcgttcatccatagttgcctgactccccgtcgtgtagataactacgatacgggagggcttaccatctggccccagtgctgcaatgataccgcgagacccacgctcaccggctccagatttatcagcaataaaccagccagccggaagggccgagcgcagaagtggtcctgcaactttatccgcctccatccagtctattaattgttgccgggaagctagagtaagtagttcgccagttaatagtttgcgcaacgttgttgccattgctacaggcatcgtggtgtcacgctcgtcgtttggtatggcttcattcagctccggttcccaacgatcaaggcgagttacatgatcccccatgttgtgcaaaaaagcggttagctccttcggtcctccgatcgttgtcagaagtaagttggccgcagtgttatcactcatggttatggcagcactgcataattctcttactgtcatgccatccgtaagatgcttttctgtgactggtgagtactcaaccaagtcattctgagaatagtgtatgcggcgaccgagttgctcttgcccggcgtcaatacgggataataccgcgccacatagcagaactttaaaagtgctcatcattggaaaacgttcttcggggcgaaaactctcaaggatcttaccgctgttgagatccagttcgatgtaacccactcgtgcacccaactgatcttcagcatcttttactttcaccagcgtttctgggtgagcaaaaacaggaaggcaaaatgccgcaaaaaagggaataagggcgacacggaaatgttgaatactcatactcttcctttttcaatattattgaagcatttatcagggttattgtctcatgagcggatacatatttgaatgtatttagaaaaataaacaaataggggttccgcgcacatttccccgaaaagtgccacctgacgtctaagaaaccattattatcatgacattaacctataaaaataggcgtatcacgaggccctttcgtctcgcgcgtttcggtgatgacggtgaaaacctctgacacatgcagctcccggagacggtcacagcttgtctgtaagcggatgccgggagcagacaagcccgtcagggcgcgtcagcgggtgttggcgggtgtcggggctggcttaactatgcggcatcagagcagattgtactgagagtgcaccatatgcggtgtgaaataccgcacagatgcgtaaggagaaaataccgcatcaggcgccattcgccattcaggctgcgcaactgttgggaagggcgatcggtgcgggcctcttcgctattacgccagctggcgaaagggggatgtgctgcaaggcgattaagttgggtaacgccagggttttcccagtcacgacgttgtaaaacgacggccagtgaattcgagctc

SEQ ID NO: 3204 - DNA, 5559 bp, synthetic construct
  source 1..5559: mol_type = other DNA; note = 3' 12nt exon del
taatacgactcactatagggagaccctcgaccgtcgattgtccactggtcaacaatagatgacttacaactaatcggaaggtgcagagactcgacgggagctaccctaacgtcaagacgagggtaaagagagagtccaattctcaaagccaataggcagtagcgaaagctgcaagagaatgaaaatccgttgaccttaaacggtcgtgtgggttcaagtccctccacccccacgccggaaacgcaatagccgaaaaacaaaaaacaaaaaaattaaaacagcctgtgggttgatcccacccacaggcccattgggcgctagcactctggtatcacggtacctttgtgcgcctgttttataccccctcccccaactgtaacttagaagtaacacacaccgatcaacagtcagcgtggcacaccagccacgttttgatcaagcacttctgttaccccggactgagtatcaatagactgctcacgcggttgaaggagaaagcgttcgttatccggccaactacttcgaaaaacctagtaacaccgtggaagttgcagagtgtttcgctcagcactaccccagtgtagatcaggtcgatgagtcaccgcattccccacgggcgaccgtggcggtggctgcgttggcggcctgcccatggggaaacccatgggacgctctaatacagacatggtgcgaagagtctattgagctagttggtagtcctccggcccctgaatgcggctaatcctaactgcggagcacacaccctcaagccagagggcagtgtgtcgtaacgggcaactctgcagcggaaccgactactttgggtgtccgtgtttcattttattcctatactggctgcttatggtgacaattgagagatcgttaccatatagctattggattggccatccggtgactaatagagctattatatatccctttgttgggtttataccacttagcttgaaagaggttaaaacattacaattcattgttaagttgaatacagcaaaatggaagatgccaagaacatcaagaagggccctgctccattctaccctctggaagatggaacagccggcgagcagctgcacaaggccatgaagagatatgccctggtgcctggcacaatcgccttcacagatgcccacatcgaggtggacatcacctacgccgagtacttcgagatgtctgtgcggctggccgaagctatgaagcgctacggcctgaacaccaaccaccggatcgtcgtgtgcagcgagaacagcctgcagttcttcatgcctgtgctgggcgccctgttcatcggagttgctgtggcccctgccaacgacatctacaacgagcgcgagctgctgaacagcatgggcatctctcagcccaccgtggtgttcgtgtccaagaagggactgcagaaaatcctgaacgtgcagaagaagctgcccatcatccagaaaatcatcatcatggacagcaagaccgactaccagggcttccagagcatgtacaccttcgtgaccagccatctgccacctggcttcaacgagtacgacttcgtgcccgagagcttcgaccgggacaagacaatcgccctgatcatgaacagcagcggctctaccggactgcccaaaggtgttgccctgcctcatagaactgcctgcgtgcggtttagccacgccagagatcccatcttcggcaaccagatcatccccgacacagccatcctgagcgtggtgccttttcaccacggcttcggcatgttcaccacactgggctacctgatctgcggcttcagagtggtgctgatgtaccgcttcgaggaagaactgttcctgcggagcctgcaggactacaagatccagtctgctctgctggtgcctactctgttcagcttctttgccaagagcaccctgatcgataagtacgacctgagcaacctgcacgagatcgcctctggcggagcccctctgtctaaagaagtgggagaagccgtcgccaagcggttccatctgcctggcatcagacaaggctatggcctgaccgagacaaccagcgccattctgattacccctgagggcgacgataagcctggcgctgtgggaaaagtggtgccattcttcgaggccaaggtggtggatctggacaccggcaaaacactgggcgttaaccagaggggcgagctgtgtgttagaggccctatgatcatgagcggctacgtgaacaaccccgaggccacaaacgctctgatcgacaaggatggatggctgcacagcggcgacattgcctactgggacgaagatgagcacttcttcatcgtggaccggctgaagtccctgatcaagtacaagggctaccaggtggccccagccgagctggaatctattctgctgcaacaccccaacatcttcgatgccggcgttgcaggactgcccgatgatgatgctggcgaactgccagctgctgtggtggtgctggaacacggcaagaccatgaccgagaaagaaatcgtggactacgtggccagccaagtgaccaccgccaagaaactgagaggcggcgtggtgtttgtggacgaggtgccaaaaggcctgacaggcaagctggacgcccggaagatcagagagatcctgattaaggccaagaaaggcggcaagatcgccgtgtaatagctaactagaaaaaacaaaaaacaaaacggctattatgcgttaccggcgcttaaataattgagccttaaagaagaaattctttaagtggatgctctcaaactcagggaaacctaaatctagttatagacaaggcaatcctgagccaagccgaagtagtaattagtaagaccagtggacaatcgacggataacagcatatctagatatcggatcccgggcccgtcgactgcagaggcctgcatgcaagcttggcgtaatcatggtcatagctgtttcctgtgtgaaattgttatccgctcacaattccacacaacatacgagccggaagcataaagtgtaaagcctggggtgcctaatgagtgagctaactcacattaattgcgttgcgctcactgcccgctttccagtcgggaaacctgtcgtgccagctgcattaatgaatcggccaacgcgcggggagaggcggtttgcgtattgggcgctcttccgcttcctcgctcactgactcgctgcgctcggtcgttcggctgcggcgagcggtatcagctcactcaaaggcggtaatacggttatccacagaatcaggggataacgcaggaaagaacatgtgagcaaaaggccagcaaaaggccaggaaccgtaaaaaggccgcgttgctggcgtttttccataggctccgcccccctgacgagcatcacaaaaatcgacgctcaagtcagaggtggcgaaacccgacaggactataaagataccaggcgtttccccctggaagctccctcgtgcgctctcctgttccgaccctgccgcttaccggatacctgtccgcctttctcccttcgggaagcgtggcgctttctcatagctcacgctgtaggtatctcagttcggtgtaggtcgttcgctccaagctgggctgtgtgcacgaaccccccgttcagcccgaccgctgcgccttatccggtaactatcgtcttgagtccaacccggtaagacacgacttatcgccactggcagcagccactggtaacaggattagcagagcgaggtatgtaggcggtgctacagagttcttgaagtggtggcctaactacggctacactagaagaacagtatttggtatctgcgctctgctgaagccagttaccttcggaaaaagagttggtagctcttgatccggcaaacaaaccaccgctggtagcggtggtttttttgtttgcaagcagcagattacgcgcagaaaaaaaggatctcaagaagatcctttgatcttttctacggggtctgacgctcagtggaacgaaaactcacgttaagggattttggtcatgagattatcaaaaaggatcttcacctagatccttttaaattaaaaatgaagttttaaatcaatctaaagtatatatgagtaaacttggtctgacagttaccaatgcttaatcagtgaggcacctatctcagcgatctgtctatttcgttcatccatagttgcctgactccccgtcgtgtagataactacgatacgggagggcttaccatctggccccagtgctgcaatgataccgcgagacccacgctcaccggctccagatttatcagcaataaaccagccagccggaagggccgagcgcagaagtggtcctgcaactttatccgcctccatccagtctattaattgttgccgggaagctagagtaagtagttcgccagttaatagtttgcgcaacgttgttgccattgctacaggcatcgtggtgtcacgctcgtcgtttggtatggcttcattcagctccggttcccaacgatcaaggcgagttacatgatcccccatgttgtgcaaaaaagcggttagctccttcggtcctccgatcgttgtcagaagtaagttggccgcagtgttatcactcatggttatggcagcactgcataattctcttactgtcatgccatccgtaagatgcttttctgtgactggtgagtactcaaccaagtcattctgagaatagtgtatgcggcgaccgagttgctcttgcccggcgtcaatacgggataataccgcgccacatagcagaactttaaaagtgctcatcattggaaaacgttcttcggggcgaaaactctcaaggatcttaccgctgttgagatccagttcgatgtaacccactcgtgcacccaactgatcttcagcatcttttactttcaccagcgtttctgggtgagcaaaaacaggaaggcaaaatgccgcaaaaaagggaataagggcgacacggaaatgttgaatactcatactcttcctttttcaatattattgaagcatttatcagggttattgtctcatgagcggatacatatttgaatgtatttagaaaaataaacaaataggggttccgcgcacatttccccgaaaagtgccacctgacgtctaagaaaccattattatcatgacattaacctataaaaataggcgtatcacgaggccctttcgtctcgcgcgtttcggtgatgacggtgaaaacctctgacacatgcagctcccggagacggtcacagcttgtctgtaagcggatgccgggagcagacaagcccgtcagggcgcgtcagcgggtgttggcgggtgtcggggctggcttaactatgcggcatcagagcagattgtactgagagtgcaccatatgcggtgtgaaataccgcacagatgcgtaaggagaaaataccgcatcaggcgccattcgccattcaggctgcgcaactgttgggaagggcgatcggtgcgggcctcttcgctattacgccagctggcgaaagggggatgtgctgcaaggcgattaagttgggtaacgccagggttttcccagtcacgacgttgtaaaacgacggccagtgaattcgagctc

SEQ ID NO: 3205 - DNA, 5557 bp, synthetic construct
  source 1..5557: mol_type = other DNA; note = 3' 14nt exon del
taatacgactcactatagggagaccctcgaccgtcgattgtccactggtcaacaatagatgacttacaactaatcggaaggtgcagagactcgacgggagctaccctaacgtcaagacgagggtaaagagagagtccaattctcaaagccaataggcagtagcgaaagctgcaagagaatgaaaatccgttgaccttaaacggtcgtgtgggttcaagtccctccacccccacgccggaaacgcaatagccgaaaaacaaaaaacaaaaaaattaaaacagcctgtgggttgatcccacccacaggcccattgggcgctagcactctggtatcacggtacctttgtgcgcctgttttataccccctcccccaactgtaacttagaagtaacacacaccgatcaacagtcagcgtggcacaccagccacgttttgatcaagcacttctgttaccccggactgagtatcaatagactgctcacgcggttgaaggagaaagcgttcgttatccggccaactacttcgaaaaacctagtaacaccgtggaagttgcagagtgtttcgctcagcactaccccagtgtagatcaggtcgatgagtcaccgcattccccacgggcgaccgtggcggtggctgcgttggcggcctgcccatggggaaacccatgggacgctctaatacagacatggtgcgaagagtctattgagctagttggtagtcctccggcccctgaatgcggctaatcctaactgcggagcacacaccctcaagccagagggcagtgtgtcgtaacgggcaactctgcagcggaaccgactactttgggtgtccgtgtttcattttattcctatactggctgcttatggtgacaattgagagatcgttaccatatagctattggattggccatccggtgactaatagagctattatatatccctttgttgggtttataccacttagcttgaaagaggttaaaacattacaattcattgttaagttgaatacagcaaaatggaagatgccaagaacatcaagaagggccctgctccattctaccctctggaagatggaacagccggcgagcagctgcacaaggccatgaagagatatgccctggtgcctggcacaatcgccttcacagatgcccacatcgaggtggacatcacctacgccgagtacttcgagatgtctgtgcggctggccgaagctatgaagcgctacggcctgaacaccaaccaccggatcgtcgtgtgcagcgagaacagcctgcagttcttcatgcctgtgctgggcgccctgttcatcggagttgctgtggcccctgccaacgacatctacaacgagcgcgagctgctgaacagcatgggcatctctcagcccaccgtggtgttcgtgtccaagaagggactgcagaaaatcctgaacgtgcagaagaagctgcccatcatccagaaaatcatcatcatggacagcaagaccgactaccagggcttccagagcatgtacaccttcgtgaccagccatctgccacctggcttcaacgagtacgacttcgtgcccgagagcttcgaccgggacaagacaatcgccctgatcatgaacagcagcggctctaccggactgcccaaaggtgttgccctgcctcatagaactgcctgcgtgcggtttagccacgccagagatcccatcttcggcaaccagatcatccccgacacagccatcctgagcgtggtgccttttcaccacggcttcggcatgttcaccacactgggctacctgatctgcggcttcagagtggtgctgatgtaccgcttcgaggaagaactgttcctgcggagcctgcaggactacaagatccagtctgctctgctggtgcctactctgttcagcttctttgccaagagcaccctgatcgataagtacgacctgagcaacctgcacgagatcgcctctggcggagcccctctgtctaaagaagtgggagaagccgtcgccaagcggttccatctgcctggcatcagacaaggctatggcctgaccgagacaaccagcgccattctgattacccctgagggcgacgataagcctggcgctgtgggaaaagtggtgccattcttcgaggccaaggtggtggatctggacaccggcaaaacactgggcgttaaccagaggggcgagctgtgtgttagaggccctatgatcatgagcggctacgtgaacaaccccgaggccacaaacgctctgatcgacaaggatggatggctgcacagcggcgacattgcctactgggacgaagatgagcacttcttcatcgtggaccggctgaagtccctgatcaagtacaagggctaccaggtggccccagccgagctggaatctattctgctgcaacaccccaacatcttcgatgccggcgttgcaggactgcccgatgatgatgctggcgaactgccagctgctgtggtggtgctggaacacggcaagaccatgaccgagaaagaaatcgtggactacgtggccagccaagtgaccaccgccaagaaactgagaggcggcgtggtgtttgtggacgaggtgccaaaaggcctgacaggcaagctggacgcccggaagatcagagagatcctgattaaggccaagaaaggcggcaagatcgccgtgtaatagctaactagaaaaaacaaaaaacaaaacggctattatgcgttaccggcgtaaataattgagccttaaagaagaaattctttaagtggatgctctcaaactcagggaaacctaaatctagttatagacaaggcaatcctgagccaagccgaagtagtaattagtaagaccagtggacaatcgacggataacagcatatctagatatcggatcccgggcccgtcgactgcagaggcctgcatgcaagcttggcgtaatcatggtcatagctgtttcctgtgtgaaattgttatccgctcacaattccacacaacatacgagccggaagcataaagtgtaaagcctggggtgcctaatgagtgagctaactcacattaattgcgttgcgctcactgcccgctttccagtcgggaaacctgtcgtgccagctgcattaatgaatcggccaacgcgcggggagaggcggtttgcgtattgggcgctcttccgcttcctcgctcactgactcgctgcgctcggtcgttcggctgcggcgagcggtatcagctcactcaaaggcggtaatacggttatccacagaatcaggggataacgcaggaaagaacatgtgagcaaaaggccagcaaaaggccaggaaccgtaaaaaggccgcgttgctggcgtttttccataggctccgcccccctgacgagcatcacaaaaatcgacgctcaagtcagaggtggcgaaacccgacaggactataaagataccaggcgtttccccctggaagctccctcgtgcgctctcctgttccgaccctgccgcttaccggatacctgtccgcctttctcccttcgggaagcgtggcgctttctcatagctcacgctgtaggtatctcagttcggtgtaggtcgttcgctccaagctgggctgtgtgcacgaaccccccgttcagcccgaccgctgcgccttatccggtaactatcgtcttgagtccaacccggtaagacacgacttatcgccactggcagcagccactggtaacaggattagcagagcgaggtatgtaggcggtgctacagagttcttgaagtggtggcctaactacggctacactagaagaacagtatttggtatctgcgctctgctgaagccagttaccttcggaaaaagagttggtagctcttgatccggcaaacaaaccaccgctggtagcggtggtttttttgtttgcaagcagcagattacgcgcagaaaaaaaggatctcaagaagatcctttgatcttttctacggggtctgacgctcagtggaacgaaaactcacgttaagggattttggtcatgagattatcaaaaaggatcttcacctagatccttttaaattaaaaatgaagttttaaatcaatctaaagtatatatgagtaaacttggtctgacagttaccaatgcttaatcagtgaggcacctatctcagcgatctgtctatttcgttcatccatagttgcctgactccccgtcgtgtagataactacgatacgggagggcttaccatctggccccagtgctgcaatgataccgcgagacccacgctcaccggctccagatttatcagcaataaaccagccagccggaagggccgagcgcagaagtggtcctgcaactttatccgcctccatccagtctattaattgttgccgggaagctagagtaagtagttcgccagttaatagtttgcgcaacgttgttgccattgctacaggcatcgtggtgtcacgctcgtcgtttggtatggcttcattcagctccggttcccaacgatcaaggcgagttacatgatcccccatgttgtgcaaaaaagcggttagctccttcggtcctccgatcgttgtcagaagtaagttggccgcagtgttatcactcatggttatggcagcactgcataattctcttactgtcatgccatccgtaagatgcttttctgtgactggtgagtactcaaccaagtcattctgagaatagtgtatgcggcgaccgagttgctcttgcccggcgtcaatacgggataataccgcgccacatagcagaactttaaaagtgctcatcattggaaaacgttcttcggggcgaaaactctcaaggatcttaccgctgttgagatccagttcgatgtaacccactcgtgcacccaactgatcttcagcatcttttactttcaccagcgtttctgggtgagcaaaaacaggaaggcaaaatgccgcaaaaaagggaataagggcgacacggaaatgttgaatactcatactcttcctttttcaatattattgaagcatttatcagggttattgtctcatgagcggatacatatttgaatgtatttagaaaaataaacaaataggggttccgcgcacatttccccgaaaagtgccacctgacgtctaagaaaccattattatcatgacattaacctataaaaataggcgtatcacgaggccctttcgtctcgcgcgtttcggtgatgacggtgaaaacctctgacacatgcagctcccggagacggtcacagcttgtctgtaagcggatgccgggagcagacaagcccgtcagggcgcgtcagcgggtgttggcgggtgtcggggctggcttaactatgcggcatcagagcagattgtactgagagtgcaccatatgcggtgtgaaataccgcacagatgcgtaaggagaaaataccgcatcaggcgccattcgccattcaggctgcgcaactgttgggaagggcgatcggtgcgggcctcttcgctattacgccagctggcgaaagggggatgtgctgcaaggcgattaagttgggtaacgccagggttttcccagtcacgacgttgtaaaacgacggccagtgaattcgagctc

SEQ ID NO: 3206 - DNA, 5574 bp, synthetic construct
  source 1..5574: mol_type = other DNA; note = 3' Replaced GTT
taatacgactcactatagggagaccctcgaccgtcgattgtccactggtcaacaatagatgacttacaactaatcggaaggtgcagagactcgacgggagctaccctaacgtcaagacgagggtaaagagagagtccaattctcaaagccaataggcagtagcgaaagctgcaagagaatgaaaatccgttgaccttaaacggtcgtgtgggttcaagtccctccacccccacgccggaaacgcaatagccgaaaaacaaaaaacaaaaaaattaaaacagcctgtgggttgatcccacccacaggcccattgggcgctagcactctggtatcacggtacctttgtgcgcctgttttataccccctcccccaactgtaacttagaagtaacacacaccgatcaacagtcagcgtggcacaccagccacgttttgatcaagcacttctgttaccccggactgagtatcaatagactgctcacgcggttgaaggagaaagcgttcgttatccggccaactacttcgaaaaacctagtaacaccgtggaagttgcagagtgtttcgctcagcactaccccagtgtagatcaggtcgatgagtcaccgcattccccacgggcgaccgtggcggtggctgcgttggcggcctgcccatggggaaacccatgggacgctctaatacagacatggtgcgaagagtctattgagctagttggtagtcctccggcccctgaatgcggctaatcctaactgcggagcacacaccctcaagccagagggcagtgtgtcgtaacgggcaactctgcagcggaaccgactactttgggtgtccgtgtttcattttattcctatactggctgcttatggtgacaattgagagatcgttaccatatagctattggattggccatccggtgactaatagagctattatatatccctttgttgggtttataccacttagcttgaaagaggttaaaacattacaattcattgttaagttgaatacagcaaaatggaagatgccaagaacatcaagaagggccctgctccattctaccctctggaagatggaacagccggcgagcagctgcacaaggccatgaagagatatgccctggtgcctggcacaatcgccttcacagatgcccacatcgaggtggacatcacctacgccgagtacttcgagatgtctgtgcggctggccgaagctatgaagcgctacggcctgaacaccaaccaccggatcgtcgtgtgcagcgagaacagcctgcagttcttcatgcctgtgctgggcgccctgttcatcggagttgctgtggcccctgccaacgacatctacaacgagcgcgagctgctgaacagcatgggcatctctcagcccaccgtggtgttcgtgtccaagaagggactgcagaaaatcctgaacgtgcagaagaagctgcccatcatccagaaaatcatcatcatggacagcaagaccgactaccagggcttccagagcatgtacaccttcgtgaccagccatctgccacctggcttcaacgagtacgacttcgtgcccgagagcttcgaccgggacaagacaatcgccctgatcatgaacagcagcggctctaccggactgcccaaaggtgttgccctgcctcatagaactgcctgcgtgcggtttagccacgccagagatcccatcttcggcaaccagatcatccccgacacagccatcctgagcgtggtgccttttcaccacggcttcggcatgttcaccacactgggctacctgatctgcggcttcagagtggtgctgatgtaccgcttcgaggaagaactgttcctgcggagcctgcaggactacaagatccagtctgctctgctggtgcctactctgttcagcttctttgccaagagcaccctgatcgataagtacgacctgagcaacctgcacgagatcgcctctggcggagcccctctgtctaaagaagtgggagaagccgtcgccaagcggttccatctgcctggcatcagacaaggctatggcctgaccgagacaaccagcgccattctgattacccctgagggcgacgataagcctggcgctgtgggaaaagtggtgccattcttcgaggccaaggtggtggatctggacaccggcaaaacactgggcgttaaccagaggggcgagctgtgtgttagaggccctatgatcatgagcggctacgtgaacaaccccgaggccacaaacgctctgatcgacaaggatggatggctgcacagcggcgacattgcctactgggacgaagatgagcacttcttcatcgtggaccggctgaagtccctgatcaagtacaagggctaccaggtggccccagccgagctggaatctattctgctgcaacaccccaacatcttcgatgccggcgttgcaggactgcccgatgatgatgctggcgaactgccagctgctgtggtggtgctggaacacggcaagaccatgaccgagaaagaaatcgtggactacgtggccagccaagtgaccaccgccaagaaactgagaggcggcgtggtgtttgtggacgaggtgccaaaaggcctgacaggcaagctggacgcccggaagatcagagagatcctgattaaggccaagaaaggcggcaagatcgccgtgtaatagctaactagaaaaaacaaaaaacaaaacggctattatgcgttaccggcgagacgctacggacttaaataattgagccttaaagaagaaattctttaagtggatgctctcaaactcagggaaacctaaatctagttatagacaaggcaatcctgagccaagccgaagtagtaattagtaagttgaccagtggacaatcgacggataacagcatatctagatatcggatcccgggcccgtcgactgcagaggcctgcatgcaagcttggcgtaatcatggtcatagctgtttcctgtgtgaaattgttatccgctcacaattccacacaacatacgagccggaagcataaagtgtaaagcctggggtgcctaatgagtgagctaactcacattaattgcgttgcgctcactgcccgctttccagtcgggaaacctgtcgtgccagctgcattaatgaatcggccaacgcgcggggagaggcggtttgcgtattgggcgctcttccgcttcctcgctcactgactcgctgcgctcggtcgttcggctgcggcgagcggtatcagctcactcaaaggcggtaatacggttatccacagaatcaggggataacgcaggaaagaacatgtgagcaaaaggccagcaaaaggccaggaaccgtaaaaaggccgcgttgctggcgtttttccataggctccgcccccctgacgagcatcacaaaaatcgacgctcaagtcagaggtggcgaaacccgacaggactataaagataccaggcgtttccccctggaagctccctcgtgcgctctcctgttccgaccctgccgcttaccggatacctgtccgcctttctcccttcgggaagcgtggcgctttctcatagctcacgctgtaggtatctcagttcggtgtaggtcgttcgctccaagctgggctgtgtgcacgaaccccccgttcagcccgaccgctgcgccttatccggtaactatcgtcttgagtccaacccggtaagacacgacttatcgccactggcagcagccactggtaacaggattagcagagcgaggtatgtaggcggtgctacagagttcttgaagtggtggcctaactacggctacactagaagaacagtatttggtatctgcgctctgctgaagccagttaccttcggaaaaagagttggtagctcttgatccggcaaacaaaccaccgctggtagcggtggtttttttgtttgcaagcagcagattacgcgcagaaaaaaaggatctcaagaagatcctttgatcttttctacggggtctgacgctcagtggaacgaaaactcacgttaagggattttggtcatgagattatcaaaaaggatcttcacctagatccttttaaattaaaaatgaagttttaaatcaatctaaagtatatatgagtaaacttggtctgacagttaccaatgcttaatcagtgaggcacctatctcagcgatctgtctatttcgttcatccatagttgcctgactccccgtcgtgtagataactacgatacgggagggcttaccatctggccccagtgctgcaatgataccgcgagacccacgctcaccggctccagatttatcagcaataaaccagccagccggaagggccgagcgcagaagtggtcctgcaactttatccgcctccatccagtctattaattgttgccgggaagctagagtaagtagttcgccagttaatagtttgcgcaacgttgttgccattgctacaggcatcgtggtgtcacgctcgtcgtttggtatggcttcattcagctccggttcccaacgatcaaggcgagttacatgatcccccatgttgtgcaaaaaagcggttagctccttcggtcctccgatcgttgtcagaagtaagttggccgcagtgttatcactcatggttatggcagcactgcataattctcttactgtcatgccatccgtaagatgcttttctgtgactggtgagtactcaaccaagtcattctgagaatagtgtatgcggcgaccgagttgctcttgcccggcgtcaatacgggataataccgcgccacatagcagaactttaaaagtgctcatcattggaaaacgttcttcggggcgaaaactctcaaggatcttaccgctgttgagatccagttcgatgtaacccactcgtgcacccaactgatcttcagcatcttttactttcaccagcgtttctgggtgagcaaaaacaggaaggcaaaatgccgcaaaaaagggaataagggcgacacggaaatgttgaatactcatactcttcctttttcaatattattgaagcatttatcagggttattgtctcatgagcggatacatatttgaatgtatttagaaaaataaacaaataggggttccgcgcacatttccccgaaaagtgccacctgacgtctaagaaaccattattatcatgacattaacctataaaaataggcgtatcacgaggccctttcgtctcgcgcgtttcggtgatgacggtgaaaacctctgacacatgcagctcccggagacggtcacagcttgtctgtaagcggatgccgggagcagacaagcccgtcagggcgcgtcagcgggtgttggcgggtgtcggggctggcttaactatgcggcatcagagcagattgtactgagagtgcaccatatgcggtgtgaaataccgcacagatgcgtaaggagaaaataccgcatcaggcgccattcgccattcaggctgcgcaactgttgggaagggcgatcggtgcgggcctcttcgctattacgccagctggcgaaagggggatgtgctgcaaggcgattaagttgggtaacgccagggttttcccagtcacgacgttgtaaaacgacggccagtgaattcgagctc

SEQ ID NO: 3207 - DNA, 5560 bp, synthetic construct
  source 1..5560: mol_type = other DNA; note = 3' Removed overhang (extraneous 10nt after P2 HA from plasmid synthesis)
taatacgactcactatagggagaccctcgaccgtcgattgtccactggtcaacaatagatgacttacaactaatcggaaggtgcagagactcgacgggagctaccctaacgtcaagacgagggtaaagagagagtccaattctcaaagccaataggcagtagcgaaagctgcaagagaatgaaaatccgttgaccttaaacggtcgtgtgggttcaagtccctccacccccacgccggaaacgcaatagccgaaaaacaaaaaacaaaaaaattaaaacagcctgtgggttgatcccacccacaggcccattgggcgctagcactctggtatcacggtacctttgtgcgcctgttttataccccctcccccaactgtaacttagaagtaacacacaccgatcaacagtcagcgtggcacaccagccacgttttgatcaagcacttctgttaccccggactgagtatcaatagactgctcacgcggttgaaggagaaagcgttcgttatccggccaactacttcgaaaaacctagtaacaccgtggaagttgcagagtgtttcgctcagcactaccccagtgtagatcaggtcgatgagtcaccgcattccccacgggcgaccgtggcggtggctgcgttggcggcctgcccatggggaaacccatgggacgctctaatacagacatggtgcgaagagtctattgagctagttggtagtcctccggcccctgaatgcggctaatcctaactgcggagcacacaccctcaagccagagggcagtgtgtcgtaacgggcaactctgcagcggaaccgactactttgggtgtccgtgtttcattttattcctatactggctgcttatggtgacaattgagagatcgttaccatatagctattggattggccatccggtgactaatagagctattatatatccctttgttgggtttataccacttagcttgaaagaggttaaaacattacaattcattgttaagttgaatacagcaaaatggaagatgccaagaacatcaagaagggccctgctccattctaccctctggaagatggaacagccggcgagcagctgcacaaggccatgaagagatatgccctggtgcctggcacaatcgccttcacagatgcccacatcgaggtggacatcacctacgccgagtacttcgagatgtctgtgcggctggccgaagctatgaagcgctacggcctgaacaccaaccaccggatcgtcgtgtgcagcgagaacagcctgcagttcttcatgcctgtgctgggcgccctgttcatcggagttgctgtggcccctgccaacgacatctacaacgagcgcgagctgctgaacagcatgggcatctctcagcccaccgtggtgttcgtgtccaagaagggactgcagaaaatcctgaacgtgcagaagaagctgcccatcatccagaaaatcatcatcatggacagcaagaccgactaccagggcttccagagcatgtacaccttcgtgaccagccatctgccacctggcttcaacgagtacgacttcgtgcccgagagcttcgaccgggacaagacaatcgccctgatcatgaacagcagcggctctaccggactgcccaaaggtgttgccctgcctcatagaactgcctgcgtgcggtttagccacgccagagatcccatcttcggcaaccagatcatccccgacacagccatcctgagcgtggtgccttttcaccacggcttcggcatgttcaccacactgggctacctgatctgcggcttcagagtggtgctgatgtaccgcttcgaggaagaactgttcctgcggagcctgcaggactacaagatccagtctgctctgctggtgcctactctgttcagcttctttgccaagagcaccctgatcgataagtacgacctgagcaacctgcacgagatcgcctctggcggagcccctctgtctaaagaagtgggagaagccgtcgccaagcggttccatctgcctggcatcagacaaggctatggcctgaccgagacaaccagcgccattctgattacccctgagggcgacgataagcctggcgctgtgggaaaagtggtgccattcttcgaggccaaggtggtggatctggacaccggcaaaacactgggcgttaaccagaggggcgagctgtgtgttagaggccctatgatcatgagcggctacgtgaacaaccccgaggccacaaacgctctgatcgacaaggatggatggctgcacagcggcgacattgcctactgggacgaagatgagcacttcttcatcgtggaccggctgaagtccctgatcaagtacaagggctaccaggtggccccagccgagctggaatctattctgctgcaacaccccaacatcttcgatgccggcgttgcaggactgcccgatgatgatgctggcgaactgccagctgctgtggtggtgctggaacacggcaagaccatgaccgagaaagaaatcgtggactacgtggccagccaagtgaccaccgccaagaaactgagaggcggcgtggtgtttgtggacgaggtgccaaaaggcctgacaggcaagctggacgcccggaagatcagagagatcctgattaaggccaagaaaggcggcaagatcgccgtgtaatagctaactagaaaaaacaaaaaacaaaacggctattatgcgttaccggcgagacgctacggacttaaataattgagccttaaagaagaaattctttaagtggatgctctcaaactcagggaaacctaaatctagttatagacaaggcaatcctgagccaagccgaagtagtaattagtaagaccagtggacaatcgacggtctagatatcggatcccgggcccgtcgactgcagaggcctgcatgcaagcttggcgtaatcatggtcatagctgtttcctgtgtgaaattgttatccgctcacaattccacacaacatacgagccggaagcataaagtgtaaagcctggggtgcctaatgagtgagctaactcacattaattgcgttgcgctcactgcccgctttccagtcgggaaacctgtcgtgccagctgcattaatgaatcggccaacgcgcggggagaggcggtttgcgtattgggcgctcttccgcttcctcgctcactgactcgctgcgctcggtcgttcggctgcggcgagcggtatcagctcactcaaaggcggtaatacggttatccacagaatcaggggataacgcaggaaagaacatgtgagcaaaaggccagcaaaaggccaggaaccgtaaaaaggccgcgttgctggcgtttttccataggctccgcccccctgacgagcatcacaaaaatcgacgctcaagtcagaggtggcgaaacccgacaggactataaagataccaggcgtttccccctggaagctccctcgtgcgctctcctgttccgaccctgccgcttaccggatacctgtccgcctttctcccttcgggaagcgtggcgctttctcatagctcacgctgtaggtatctcagttcggtgtaggtcgttcgctccaagctgggctgtgtgcacgaaccccccgttcagcccgaccgctgcgccttatccggtaactatcgtcttgagtccaacccggtaagacacgacttatcgccactggcagcagccactggtaacaggattagcagagcgaggtatgtaggcggtgctacagagttcttgaagtggtggcctaactacggctacactagaagaacagtatttggtatctgcgctctgctgaagccagttaccttcggaaaaagagttggtagctcttgatccggcaaacaaaccaccgctggtagcggtggtttttttgtttgcaagcagcagattacgcgcagaaaaaaaggatctcaagaagatcctttgatcttttctacggggtctgacgctcagtggaacgaaaactcacgttaagggattttggtcatgagattatcaaaaaggatcttcacctagatccttttaaattaaaaatgaagttttaaatcaatctaaagtatatatgagtaaacttggtctgacagttaccaatgcttaatcagtgaggcacctatctcagcgatctgtctatttcgttcatccatagttgcctgactccccgtcgtgtagataactacgatacgggagggcttaccatctggccccagtgctgcaatgataccgcgagacccacgctcaccggctccagatttatcagcaataaaccagccagccggaagggccgagcgcagaagtggtcctgcaactttatccgcctccatccagtctattaattgttgccgggaagctagagtaagtagttcgccagttaatagtttgcgcaacgttgttgccattgctacaggcatcgtggtgtcacgctcgtcgtttggtatggcttcattcagctccggttcccaacgatcaaggcgagttacatgatcccccatgttgtgcaaaaaagcggttagctccttcggtcctccgatcgttgtcagaagtaagttggccgcagtgttatcactcatggttatggcagcactgcataattctcttactgtcatgccatccgtaagatgcttttctgtgactggtgagtactcaaccaagtcattctgagaatagtgtatgcggcgaccgagttgctcttgcccggcgtcaatacgggataataccgcgccacatagcagaactttaaaagtgctcatcattggaaaacgttcttcggggcgaaaactctcaaggatcttaccgctgttgagatccagttcgatgtaacccactcgtgcacccaactgatcttcagcatcttttactttcaccagcgtttctgggtgagcaaaaacaggaaggcaaaatgccgcaaaaaagggaataagggcgacacggaaatgttgaatactcatactcttcctttttcaatattattgaagcatttatcagggttattgtctcatgagcggatacatatttgaatgtatttagaaaaataaacaaataggggttccgcgcacatttccccgaaaagtgccacctgacgtctaagaaaccattattatcatgacattaacctataaaaataggcgtatcacgaggccctttcgtctcgcgcgtttcggtgatgacggtgaaaacctctgacacatgcagctcccggagacggtcacagcttgtctgtaagcggatgccgggagcagacaagcccgtcagggcgcgtcagcgggtgttggcgggtgtcggggctggcttaactatgcggcatcagagcagattgtactgagagtgcaccatatgcggtgtgaaataccgcacagatgcgtaaggagaaaataccgcatcaggcgccattcgccattcaggctgcgcaactgttgggaagggcgatcggtgcgggcctcttcgctattacgccagctggcgaaagggggatgtgctgcaaggcgattaagttgggtaacgccagggttttcccagtcacgacgttgtaaaacgacggccagtgaattcgagctc

SEQ ID NO: 3208 - DNA, 5556 bp, synthetic construct
  source 1..5556: mol_type = other DNA; note = 3' 7nt exon del, replaced GTT, removed overhang
taatacgactcactatagggagaccctcgaccgtcgattgtccactggtcaacaatagatgacttacaactaatcggaaggtgcagagactcgacgggagctaccctaacgtcaagacgagggtaaagagagagtccaattctcaaagccaataggcagtagcgaaagctgcaagagaatgaaaatccgttgaccttaaacggtcgtgtgggttcaagtccctccacccccacgccggaaacgcaatagccgaaaaacaaaaaacaaaaaaattaaaacagcctgtgggttgatcccacccacaggcccattgggcgctagcactctggtatcacggtacctttgtgcgcctgttttataccccctcccccaactgtaacttagaagtaacacacaccgatcaacagtcagcgtggcacaccagccacgttttgatcaagcacttctgttaccccggactgagtatcaatagactgctcacgcggttgaaggagaaagcgttcgttatccggccaactacttcgaaaaacctagtaacaccgtggaagttgcagagtgtttcgctcagcactaccccagtgtagatcaggtcgatgagtcaccgcattccccacgggcgaccgtggcggtggctgcgttggcggcctgcccatggggaaacccatgggacgctctaatacagacatggtgcgaagagtctattgagctagttggtagtcctccggcccctgaatgcggctaatcctaactgcggagcacacaccctcaagccagagggcagtgtgtcgtaacgggcaactctgcagcggaaccgactactttgggtgtccgtgtttcattttattcctatactggctgcttatggtgacaattgagagatcgttaccatatagctattggattggccatccggtgactaatagagctattatatatccctttgttgggtttataccacttagcttgaaagaggttaaaacattacaattcattgttaagttgaatacagcaaaatggaagatgccaagaacatcaagaagggccctgctccattctaccctctggaagatggaacagccggcgagcagctgcacaaggccatgaagagatatgccctggtgcctggcacaatcgccttcacagatgcccacatcgaggtggacatcacctacgccgagtacttcgagatgtctgtgcggctggccgaagctatgaagcgctacggcctgaacaccaaccaccggatcgtcgtgtgcagcgagaacagcctgcagttcttcatgcctgtgctgggcgccctgttcatcggagttgctgtggcccctgccaacgacatctacaacgagcgcgagctgctgaacagcatgggcatctctcagcccaccgtggtgttcgtgtccaagaagggactgcagaaaatcctgaacgtgcagaagaagctgcccatcatccagaaaatcatcatcatggacagcaagaccgactaccagggcttccagagcatgtacaccttcgtgaccagccatctgccacctggcttcaacgagtacgacttcgtgcccgagagcttcgaccgggacaagacaatcgccctgatcatgaacagcagcggctctaccggactgcccaaaggtgttgccctgcctcatagaactgcctgcgtgcggtttagccacgccagagatcccatcttcggcaaccagatcatccccgacacagccatcctgagcgtggtgccttttcaccacggcttcggcatgttcaccacactgggctacctgatctgcggcttcagagtggtgctgatgtaccgcttcgaggaagaactgttcctgcggagcctgcaggactacaagatccagtctgctctgctggtgcctactctgttcagcttctttgccaagagcaccctgatcgataagtacgacctgagcaacctgcacgagatcgcctctggcggagcccctctgtctaaagaagtgggagaagccgtcgccaagcggttccatctgcctggcatcagacaaggctatggcctgaccgagacaaccagcgccattctgattacccctgagggcgacgataagcctggcgctgtgggaaaagtggtgccattcttcgaggccaaggtggtggatctggacaccggcaaaacactgggcgttaaccagaggggcgagctgtgtgttagaggccctatgatcatgagcggctacgtgaacaaccccgaggccacaaacgctctgatcgacaaggatggatggctgcacagcggcgacattgcctactgggacgaagatgagcacttcttcatcgtggaccggctgaagtccctgatcaagtacaagggctaccaggtggccccagccgagctggaatctattctgctgcaacaccccaacatcttcgatgccggcgttgcaggactgcccgatgatgatgctggcgaactgccagctgctgtggtggtgctggaacacggcaagaccatgaccgagaaagaaatcgtggactacgtggccagccaagtgaccaccgccaagaaactgagaggcggcgtggtgtttgtggacgaggtgccaaaaggcctgacaggcaagctggacgcccggaagatcagagagatcctgattaaggccaagaaaggcggcaagatcgccgtgtaatagctaactagaaaaaacaaaaaacaaaacggctattatgcgttaccggcgacggacttaaataattgagccttaaagaagaaattctttaagtggatgctctcaaactcagggaaacctaaatctagttatagacaaggcaatcctgagccaagccgaagtagtaattagtaagttgaccagtggacaatcgacggtctagatatcggatcccgggcccgtcgactgcagaggcctgcatgcaagcttggcgtaatcatggtcatagctgtttcctgtgtgaaattgttatccgctcacaattccacacaacatacgagccggaagcataaagtgtaaagcctggggtgcctaatgagtgagctaactcacattaattgcgttgcgctcactgcccgctttccagtcgggaaacctgtcgtgccagctgcattaatgaatcggccaacgcgcggggagaggcggtttgcgtattgggcgctcttccgcttcctcgctcactgactcgctgcgctcggtcgttcggctgcggcgagcggtatcagctcactcaaaggcggtaatacggttatccacagaatcaggggataacgcaggaaagaacatgtgagcaaaaggccagcaaaaggccaggaaccgtaaaaaggccgcgttgctggcgtttttccataggctccgcccccctgacgagcatcacaaaaatcgacgctcaagtcagaggtggcgaaacccgacaggactataaagataccaggcgtttccccctggaagctccctcgtgcgctctcctgttccgaccctgccgcttaccggatacctgtccgcctttctcccttcgggaagcgtggcgctttctcatagctcacgctgtaggtatctcagttcggtgtaggtcgttcgctccaagctgggctgtgtgcacgaaccccccgttcagcccgaccgctgcgccttatccggtaactatcgtcttgagtccaacccggtaagacacgacttatcgccactggcagcagccactggtaacaggattagcagagcgaggtatgtaggcggtgctacagagttcttgaagtggtggcctaactacggctacactagaagaacagtatttggtatctgcgctctgctgaagccagttaccttcggaaaaagagttggtagctcttgatccggcaaacaaaccaccgctggtagcggtggtttttttgtttgcaagcagcagattacgcgcagaaaaaaaggatctcaagaagatcctttgatcttttctacggggtctgacgctcagtggaacgaaaactcacgttaagggattttggtcatgagattatcaaaaaggatcttcacctagatccttttaaattaaaaatgaagttttaaatcaatctaaagtatatatgagtaaacttggtctgacagttaccaatgcttaatcagtgaggcacctatctcagcgatctgtctatttcgttcatccatagttgcctgactccccgtcgtgtagataactacgatacgggagggcttaccatctggccccagtgctgcaatgataccgcgagacccacgctcaccggctccagatttatcagcaataaaccagccagccggaagggccgagcgcagaagtggtcctgcaactttatccgcctccatccagtctattaattgttgccgggaagctagagtaagtagttcgccagttaatagtttgcgcaacgttgttgccattgctacaggcatcgtggtgtcacgctcgtcgtttggtatggcttcattcagctccggttcccaacgatcaaggcgagttacatgatcccccatgttgtgcaaaaaagcggttagctccttcggtcctccgatcgttgtcagaagtaagttggccgcagtgttatcactcatggttatggcagcactgcataattctcttactgtcatgccatccgtaagatgcttttctgtgactggtgagtactcaaccaagtcattctgagaatagtgtatgcggcgaccgagttgctcttgcccggcgtcaatacgggataataccgcgccacatagcagaactttaaaagtgctcatcattggaaaacgttcttcggggcgaaaactctcaaggatcttaccgctgttgagatccagttcgatgtaacccactcgtgcacccaactgatcttcagcatcttttactttcaccagcgtttctgggtgagcaaaaacaggaaggcaaaatgccgcaaaaaagggaataagggcgacacggaaatgttgaatactcatactcttcctttttcaatattattgaagcatttatcagggttattgtctcatgagcggatacatatttgaatgtatttagaaaaataaacaaataggggttccgcgcacatttccccgaaaagtgccacctgacgtctaagaaaccattattatcatgacattaacctataaaaataggcgtatcacgaggccctttcgtctcgcgcgtttcggtgatgacggtgaaaacctctgacacatgcagctcccggagacggtcacagcttgtctgtaagcggatgccgggagcagacaagcccgtcagggcgcgtcagcgggtgttggcgggtgtcggggctggcttaactatgcggcatcagagcagattgtactgagagtgcaccatatgcggtgtgaaataccgcacagatgcgtaaggagaaaataccgcatcaggcgccattcgccattcaggctgcgcaactgttgggaagggcgatcggtgcgggcctcttcgctattacgccagctggcgaaagggggatgtgctgcaaggcgattaagttgggtaacgccagggttttcccagtcacgacgttgtaaaacgacggccagtgaattcgagctc

SEQ ID NO: 3209 - DNA, 5514 bp, synthetic construct
  source 1..5514: mol_type = other DNA; note = Complete exon min/GTT/overhang del
taatacgactcactatagggagaccctcgaccgtcgattgtccactggtcaacaatagatgacttacaactaatcggaaggtgcagagactcgacgggagctaccctaacgtcaagacgagggtaaagagagagtccaattctcaaagccaataggcagtagcgaaagctgcaagagaatgaaaatccgtcgccggaaacgcaatagccgaaaaacaaaaaacaaaaaaattaaaacagcctgtgggttgatcccacccacaggcccattgggcgctagcactctggtatcacggtacctttgtgcgcctgttttataccccctcccccaactgtaacttagaagtaacacacaccgatcaacagtcagcgtggcacaccagccacgttttgatcaagcacttctgttaccccggactgagtatcaatagactgctcacgcggttgaaggagaaagcgttcgttatccggccaactacttcgaaaaacctagtaacaccgtggaagttgcagagtgtttcgctcagcactaccccagtgtagatcaggtcgatgagtcaccgcattccccacgggcgaccgtggcggtggctgcgttggcggcctgcccatggggaaacccatgggacgctctaatacagacatggtgcgaagagtctattgagctagttggtagtcctccggcccctgaatgcggctaatcctaactgcggagcacacaccctcaagccagagggcagtgtgtcgtaacgggcaactctgcagcggaaccgactactttgggtgtccgtgtttcattttattcctatactggctgcttatggtgacaattgagagatcgttaccatatagctattggattggccatccggtgactaatagagctattatatatccctttgttgggtttataccacttagcttgaaagaggttaaaacattacaattcattgttaagttgaatacagcaaaatggaagatgccaagaacatcaagaagggccctgctccattctaccctctggaagatggaacagccggcgagcagctgcacaaggccatgaagagatatgccctggtgcctggcacaatcgccttcacagatgcccacatcgaggtggacatcacctacgccgagtacttcgagatgtctgtgcggctggccgaagctatgaagcgctacggcctgaacaccaaccaccggatcgtcgtgtgcagcgagaacagcctgcagttcttcatgcctgtgctgggcgccctgttcatcggagttgctgtggcccctgccaacgacatctacaacgagcgcgagctgctgaacagcatgggcatctctcagcccaccgtggtgttcgtgtccaagaagggactgcagaaaatcctgaacgtgcagaagaagctgcccatcatccagaaaatcatcatcatggacagcaagaccgactaccagggcttccagagcatgtacaccttcgtgaccagccatctgccacctggcttcaacgagtacgacttcgtgcccgagagcttcgaccgggacaagacaatcgccctgatcatgaacagcagcggctctaccggactgcccaaaggtgttgccctgcctcatagaactgcctgcgtgcggtttagccacgccagagatcccatcttcggcaaccagatcatccccgacacagccatcctgagcgtggtgccttttcaccacggcttcggcatgttcaccacactgggctacctgatctgcggcttcagagtggtgctgatgtaccgcttcgaggaagaactgttcctgcggagcctgcaggactacaagatccagtctgctctgctggtgcctactctgttcagcttctttgccaagagcaccctgatcgataagtacgacctgagcaacctgcacgagatcgcctctggcggagcccctctgtctaaagaagtgggagaagccgtcgccaagcggttccatctgcctggcatcagacaaggctatggcctgaccgagacaaccagcgccattctgattacccctgagggcgacgataagcctggcgctgtgggaaaagtggtgccattcttcgaggccaaggtggtggatctggacaccggcaaaacactgggcgttaaccagaggggcgagctgtgtgttagaggccctatgatcatgagcggctacgtgaacaaccccgaggccacaaacgctctgatcgacaaggatggatggctgcacagcggcgacattgcctactgggacgaagatgagcacttcttcatcgtggaccggctgaagtccctgatcaagtacaagggctaccaggtggccccagccgagctggaatctattctgctgcaacaccccaacatcttcgatgccggcgttgcaggactgcccgatgatgatgctggcgaactgccagctgctgtggtggtgctggaacacggcaagaccatgaccgagaaagaaatcgtggactacgtggccagccaagtgaccaccgccaagaaactgagaggcggcgtggtgtttgtggacgaggtgccaaaaggcctgacaggcaagctggacgcccggaagatcagagagatcctgattaaggccaagaaaggcggcaagatcgccgtgtaatagctaactagaaaaaacaaaaaacaaaacggctattatgcgttaccggcgacggacttaaataattgagccttaaagaagaaattctttaagtggatgctctcaaactcagggaaacctaaatctagttatagacaaggcaatcctgagccaagccgaagtagtaattagtaagttgaccagtggacaatcgacggtctagatatcggatcccgggcccgtcgactgcagaggcctgcatgcaagcttggcgtaatcatggtcatagctgtttcctgtgtgaaattgttatccgctcacaattccacacaacatacgagccggaagcataaagtgtaaagcctggggtgcctaatgagtgagctaactcacattaattgcgttgcgctcactgcccgctttccagtcgggaaacctgtcgtgccagctgcattaatgaatcggccaacgcgcggggagaggcggtttgcgtattgggcgctcttccgcttcctcgctcactgactcgctgcgctcggtcgttcggctgcggcgagcggtatcagctcactcaaaggcggtaatacggttatccacagaatcaggggataacgcaggaaagaacatgtgagcaaaaggccagcaaaaggccaggaaccgtaaaaaggccgcgttgctggcgtttttccataggctccgcccccctgacgagcatcacaaaaatcgacgctcaagtcagaggtggcgaaacccgacaggactataaagataccaggcgtttccccctggaagctccctcgtgcgctctcctgttccgaccctgccgcttaccggatacctgtccgcctttctcccttcgggaagcgtggcgctttctcatagctcacgctgtaggtatctcagttcggtgtaggtcgttcgctccaagctgggctgtgtgcacgaaccccccgttcagcccgaccgctgcgccttatccggtaactatcgtcttgagtccaacccggtaagacacgacttatcgccactggcagcagccactggtaacaggattagcagagcgaggtatgtaggcggtgctacagagttcttgaagtggtggcctaactacggctacactagaagaacagtatttggtatctgcgctctgctgaagccagttaccttcggaaaaagagttggtagctcttgatccggcaaacaaaccaccgctggtagcggtggtttttttgtttgcaagcagcagattacgcgcagaaaaaaaggatctcaagaagatcctttgatcttttctacggggtctgacgctcagtggaacgaaaactcacgttaagggattttggtcatgagattatcaaaaaggatcttcacctagatccttttaaattaaaaatgaagttttaaatcaatctaaagtatatatgagtaaacttggtctgacagttaccaatgcttaatcagtgaggcacctatctcagcgatctgtctatttcgttcatccatagttgcctgactccccgtcgtgtagataactacgatacgggagggcttaccatctggccccagtgctgcaatgataccgcgagacccacgctcaccggctccagatttatcagcaataaaccagccagccggaagggccgagcgcagaagtggtcctgcaactttatccgcctccatccagtctattaattgttgccgggaagctagagtaagtagttcgccagttaatagtttgcgcaacgttgttgccattgctacaggcatcgtggtgtcacgctcgtcgtttggtatggcttcattcagctccggttcccaacgatcaaggcgagttacatgatcccccatgttgtgcaaaaaagcggttagctccttcggtcctccgatcgttgtcagaagtaagttggccgcagtgttatcactcatggttatggcagcactgcataattctcttactgtcatgccatccgtaagatgcttttctgtgactggtgagtactcaaccaagtcattctgagaatagtgtatgcggcgaccgagttgctcttgcccggcgtcaatacgggataataccgcgccacatagcagaactttaaaagtgctcatcattggaaaacgttcttcggggcgaaaactctcaaggatcttaccgctgttgagatccagttcgatgtaacccactcgtgcacccaactgatcttcagcatcttttactttcaccagcgtttctgggtgagcaaaaacaggaaggcaaaatgccgcaaaaaagggaataagggcgacacggaaatgttgaatactcatactcttcctttttcaatattattgaagcatttatcagggttattgtctcatgagcggatacatatttgaatgtatttagaaaaataaacaaataggggttccgcgcacatttccccgaaaagtgccacctgacgtctaagaaaccattattatcatgacattaacctataaaaataggcgtatcacgaggccctttcgtctcgcgcgtttcggtgatgacggtgaaaacctctgacacatgcagctcccggagacggtcacagcttgtctgtaagcggatgccgggagcagacaagcccgtcagggcgcgtcagcgggtgttggcgggtgtcggggctggcttaactatgcggcatcagagcagattgtactgagagtgcaccatatgcggtgtgaaataccgcacagatgcgtaaggagaaaataccgcatcaggcgccattcgccattcaggctgcgcaactgttgggaagggcgatcggtgcgggcctcttcgctattacgccagctggcgaaagggggatgtgctgcaaggcgattaagttgggtaacgccagggttttcccagtcacgacgttgtaaaacgacggccagtgaattcgagctc

SEQ ID NO: 3210 - DNA, 5499 bp, synthetic construct
  source 1..5499: mol_type = other DNA; note = 5' HA replaced with 5pA (total 8A)
taatacgactcactatagggagaccctcgaaaaaaaacaatagatgacttacaactaatcggaaggtgcagagactcgacgggagctaccctaacgtcaagacgagggtaaagagagagtccaattctcaaagccaataggcagtagcgaaagctgcaagagaatgaaaatccgtcgccggaaacgcaatagccgaaaaacaaaaaacaaaaaaattaaaacagcctgtgggttgatcccacccacaggcccattgggcgctagcactctggtatcacggtacctttgtgcgcctgttttataccccctcccccaactgtaacttagaagtaacacacaccgatcaacagtcagcgtggcacaccagccacgttttgatcaagcacttctgttaccccggactgagtatcaatagactgctcacgcggttgaaggagaaagcgttcgttatccggccaactacttcgaaaaacctagtaacaccgtggaagttgcagagtgtttcgctcagcactaccccagtgtagatcaggtcgatgagtcaccgcattccccacgggcgaccgtggcggtggctgcgttggcggcctgcccatggggaaacccatgggacgctctaatacagacatggtgcgaagagtctattgagctagttggtagtcctccggcccctgaatgcggctaatcctaactgcggagcacacaccctcaagccagagggcagtgtgtcgtaacgggcaactctgcagcggaaccgactactttgggtgtccgtgtttcattttattcctatactggctgcttatggtgacaattgagagatcgttaccatatagctattggattggccatccggtgactaatagagctattatatatccctttgttgggtttataccacttagcttgaaagaggttaaaacattacaattcattgttaagttgaatacagcaaaatggaagatgccaagaacatcaagaagggccctgctccattctaccctctggaagatggaacagccggcgagcagctgcacaaggccatgaagagatatgccctggtgcctggcacaatcgccttcacagatgcccacatcgaggtggacatcacctacgccgagtacttcgagatgtctgtgcggctggccgaagctatgaagcgctacggcctgaacaccaaccaccggatcgtcgtgtgcagcgagaacagcctgcagttcttcatgcctgtgctgggcgccctgttcatcggagttgctgtggcccctgccaacgacatctacaacgagcgcgagctgctgaacagcatgggcatctctcagcccaccgtggtgttcgtgtccaagaagggactgcagaaaatcctgaacgtgcagaagaagctgcccatcatccagaaaatcatcatcatggacagcaagaccgactaccagggcttccagagcatgtacaccttcgtgaccagccatctgccacctggcttcaacgagtacgacttcgtgcccgagagcttcgaccgggacaagacaatcgccctgatcatgaacagcagcggctctaccggactgcccaaaggtgttgccctgcctcatagaactgcctgcgtgcggtttagccacgccagagatcccatcttcggcaaccagatcatccccgacacagccatcctgagcgtggtgccttttcaccacggcttcggcatgttcaccacactgggctacctgatctgcggcttcagagtggtgctgatgtaccgcttcgaggaagaactgttcctgcggagcctgcaggactacaagatccagtctgctctgctggtgcctactctgttcagcttctttgccaagagcaccctgatcgataagtacgacctgagcaacctgcacgagatcgcctctggcggagcccctctgtctaaagaagtgggagaagccgtcgccaagcggttccatctgcctggcatcagacaaggctatggcctgaccgagacaaccagcgccattctgattacccctgagggcgacgataagcctggcgctgtgggaaaagtggtgccattcttcgaggccaaggtggtggatctggacaccggcaaaacactgggcgttaaccagaggggcgagctgtgtgttagaggccctatgatcatgagcggctacgtgaacaaccccgaggccacaaacgctctgatcgacaaggatggatggctgcacagcggcgacattgcctactgggacgaagatgagcacttcttcatcgtggaccggctgaagtccctgatcaagtacaagggctaccaggtggccccagccgagctggaatctattctgctgcaacaccccaacatcttcgatgccggcgttgcaggactgcccgatgatgatgctggcgaactgccagctgctgtggtggtgctggaacacggcaagaccatgaccgagaaagaaatcgtggactacgtggccagccaagtgaccaccgccaagaaactgagaggcggcgtggtgtttgtggacgaggtgccaaaaggcctgacaggcaagctggacgcccggaagatcagagagatcctgattaaggccaagaaaggcggcaagatcgccgtgtaatagctaactagaaaaaacaaaaaacaaaacggctattatgcgttaccggcgacggacttaaataattgagccttaaagaagaaattctttaagtggatgctctcaaactcagggaaacctaaatctagttatagacaaggcaatcctgagccaagccgaagtagtaattagtaagttgaccagtggacaatcgacggtctagatatcggatcccgggcccgtcgactgcagaggcctgcatgcaagcttggcgtaatcatggtcatagctgtttcctgtgtgaaattgttatccgctcacaattccacacaacatacgagccggaagcataaagtgtaaagcctggggtgcctaatgagtgagctaactcacattaattgcgttgcgctcactgcccgctttccagtcgggaaacctgtcgtgccagctgcattaatgaatcggccaacgcgcggggagaggcggtttgcgtattgggcgctcttccgcttcctcgctcactgactcgctgcgctcggtcgttcggctgcggcgagcggtatcagctcactcaaaggcggtaatacggttatccacagaatcaggggataacgcaggaaagaacatgtgagcaaaaggccagcaaaaggccaggaaccgtaaaaaggccgcgttgctggcgtttttccataggctccgcccccctgacgagcatcacaaaaatcgacgctcaagtcagaggtggcgaaacccgacaggactataaagataccaggcgtttccccctggaagctccctcgtgcgctctcctgttccgaccctgccgcttaccggatacctgtccgcctttctcccttcgggaagcgtggcgctttctcatagctcacgctgtaggtatctcagttcggtgtaggtcgttcgctccaagctgggctgtgtgcacgaaccccccgttcagcccgaccgctgcgccttatccggtaactatcgtcttgagtccaacccggtaagacacgacttatcgccactggcagcagccactggtaacaggattagcagagcgaggtatgtaggcggtgctacagagttcttgaagtggtggcctaactacggctacactagaagaacagtatttggtatctgcgctctgctgaagccagttaccttcggaaaaagagttggtagctcttgatccggcaaacaaaccaccgctggtagcggtggtttttttgtttgcaagcagcagattacgcgcagaaaaaaaggatctcaagaagatcctttgatcttttctacggggtctgacgctcagtggaacgaaaactcacgttaagggattttggtcatgagattatcaaaaaggatcttcacctagatccttttaaattaaaaatgaagttttaaatcaatctaaagtatatatgagtaaacttggtctgacagttaccaatgcttaatcagtgaggcacctatctcagcgatctgtctatttcgttcatccatagttgcctgactccccgtcgtgtagataactacgatacgggagggcttaccatctggccccagtgctgcaatgataccgcgagacccacgctcaccggctccagatttatcagcaataaaccagccagccggaagggccgagcgcagaagtggtcctgcaactttatccgcctccatccagtctattaattgttgccgggaagctagagtaagtagttcgccagttaatagtttgcgcaacgttgttgccattgctacaggcatcgtggtgtcacgctcgtcgtttggtatggcttcattcagctccggttcccaacgatcaaggcgagttacatgatcccccatgttgtgcaaaaaagcggttagctccttcggtcctccgatcgttgtcagaagtaagttggccgcagtgttatcactcatggttatggcagcactgcataattctcttactgtcatgccatccgtaagatgcttttctgtgactggtgagtactcaaccaagtcattctgagaatagtgtatgcggcgaccgagttgctcttgcccggcgtcaatacgggataataccgcgccacatagcagaactttaaaagtgctcatcattggaaaacgttcttcggggcgaaaactctcaaggatcttaccgctgttgagatccagttcgatgtaacccactcgtgcacccaactgatcttcagcatcttttactttcaccagcgtttctgggtgagcaaaaacaggaaggcaaaatgccgcaaaaaagggaataagggcgacacggaaatgttgaatactcatactcttcctttttcaatattattgaagcatttatcagggttattgtctcatgagcggatacatatttgaatgtatttagaaaaataaacaaataggggttccgcgcacatttccccgaaaagtgccacctgacgtctaagaaaccattattatcatgacattaacctataaaaataggcgtatcacgaggccctttcgtctcgcgcgtttcggtgatgacggtgaaaacctctgacacatgcagctcccggagacggtcacagcttgtctgtaagcggatgccgggagcagacaagcccgtcagggcgcgtcagcgggtgttggcgggtgtcggggctggcttaactatgcggcatcagagcagattgtactgagagtgcaccatatgcggtgtgaaataccgcacagatgcgtaaggagaaaataccgcatcaggcgccattcgccattcaggctgcgcaactgttgggaagggcgatcggtgcgggcctcttcgctattacgccagctggcgaaagggggatgtgctgcaaggcgattaagttgggtaacgccagggttttcccagtcacgacgttgtaaaacgacggccagtgaattcgagctc

SEQ ID NO: 3211 - DNA, 5494 bp, synthetic construct
  source 1..5494: mol_type = other DNA; note = 5' no HA
taatacgactcactatagggagaccctcgaaacaatagatgacttacaactaatcggaaggtgcagagactcgacgggagctaccctaacgtcaagacgagggtaaagagagagtccaattctcaaagccaataggcagtagcgaaagctgcaagagaatgaaaatccgtcgccggaaacgcaatagccgaaaaacaaaaaacaaaaaaattaaaacagcctgtgggttgatcccacccacaggcccattgggcgctagcactctggtatcacggtacctttgtgcgcctgttttataccccctcccccaactgtaacttagaagtaacacacaccgatcaacagtcagcgtggcacaccagccacgttttgatcaagcacttctgttaccccggactgagtatcaatagactgctcacgcggttgaaggagaaagcgttcgttatccggccaactacttcgaaaaacctagtaacaccgtggaagttgcagagtgtttcgctcagcactaccccagtgtagatcaggtcgatgagtcaccgcattccccacgggcgaccgtggcggtggctgcgttggcggcctgcccatggggaaacccatgggacgctctaatacagacatggtgcgaagagtctattgagctagttggtagtcctccggcccctgaatgcggctaatcctaactgcggagcacacaccctcaagccagagggcagtgtgtcgtaacgggcaactctgcagcggaaccgactactttgggtgtccgtgtttcattttattcctatactggctgcttatggtgacaattgagagatcgttaccatatagctattggattggccatccggtgactaatagagctattatatatccctttgttgggtttataccacttagcttgaaagaggttaaaacattacaattcattgttaagttgaatacagcaaaatggaagatgccaagaacatcaagaagggccctgctccattctaccctctggaagatggaacagccggcgagcagctgcacaaggccatgaagagatatgccctggtgcctggcacaatcgccttcacagatgcccacatcgaggtggacatcacctacgccgagtacttcgagatgtctgtgcggctggccgaagctatgaagcgctacggcctgaacaccaaccaccggatcgtcgtgtgcagcgagaacagcctgcagttcttcatgcctgtgctgggcgccctgttcatcggagttgctgtggcccctgccaacgacatctacaacgagcgcgagctgctgaacagcatgggcatctctcagcccaccgtggtgttcgtgtccaagaagggactgcagaaaatcctgaacgtgcagaagaagctgcccatcatccagaaaatcatcatcatggacagcaagaccgactaccagggcttccagagcatgtacaccttcgtgaccagccatctgccacctggcttcaacgagtacgacttcgtgcccgagagcttcgaccgggacaagacaatcgccctgatcatgaacagcagcggctctaccggactgcccaaaggtgttgccctgcctcatagaactgcctgcgtgcggtttagccacgccagagatcccatcttcggcaaccagatcatccccgacacagccatcctgagcgtggtgccttttcaccacggcttcggcatgttcaccacactgggctacctgatctgcggcttcagagtggtgctgatgtaccgcttcgaggaagaactgttcctgcggagcctgcaggactacaagatccagtctgctctgctggtgcctactctgttcagcttctttgccaagagcaccctgatcgataagtacgacctgagcaacctgcacgagatcgcctctggcggagcccctctgtctaaagaagtgggagaagccgtcgccaagcggttccatctgcctggcatcagacaaggctatggcctgaccgagacaaccagcgccattctgattacccctgagggcgacgataagcctggcgctgtgggaaaagtggtgccattcttcgaggccaaggtggtggatctggacaccggcaaaacactgggcgttaaccagaggggcgagctgtgtgttagaggccctatgatcatgagcggctacgtgaacaaccccgaggccacaaacgctctgatcgacaaggatggatggctgcacagcggcgacattgcctactgggacgaagatgagcacttcttcatcgtggaccggctgaagtccctgatcaagtacaagggctaccaggtggccccagccgagctggaatctattctgctgcaacaccccaacatcttcgatgccggcgttgcaggactgcccgatgatgatgctggcgaactgccagctgctgtggtggtgctggaacacggcaagaccatgaccgagaaagaaatcgtggactacgtggccagccaagtgaccaccgccaagaaactgagaggcggcgtggtgtttgtggacgaggtgccaaaaggcctgacaggcaagctggacgcccggaagatcagagagatcctgattaaggccaagaaaggcggcaagatcgccgtgtaatagctaactagaaaaaacaaaaaacaaaacggctattatgcgttaccggcgacggacttaaataattgagccttaaagaagaaattctttaagtggatgctctcaaactcagggaaacctaaatctagttatagacaaggcaatcctgagccaagccgaagtagtaattagtaagttgaccagtggacaatcgacggtctagatatcggatcccgggcccgtcgactgcagaggcctgcatgcaagcttggcgtaatcatggtcatagctgtttcctgtgtgaaattgttatccgctcacaattccacacaacatacgagccggaagcataaagtgtaaagcctggggtgcctaatgagtgagctaactcacattaattgcgttgcgctcactgcccgctttccagtcgggaaacctgtcgtgccagctgcattaatgaatcggccaacgcgcggggagaggcggtttgcgtattgggcgctcttccgcttcctcgctcactgactcgctgcgctcggtcgttcggctgcggcgagcggtatcagctcactcaaaggcggtaatacggttatccacagaatcaggggataacgcaggaaagaacatgtgagcaaaaggccagcaaaaggccaggaaccgtaaaaaggccgcgttgctggcgtttttccataggctccgcccccctgacgagcatcacaaaaatcgacgctcaagtcagaggtggcgaaacccgacaggactataaagataccaggcgtttccccctggaagctccctcgtgcgctctcctgttccgaccctgccgcttaccggatacctgtccgcctttctcccttcgggaagcgtggcgctttctcatagctcacgctgtaggtatctcagttcggtgtaggtcgttcgctccaagctgggctgtgtgcacgaaccccccgttcagcccgaccgctgcgccttatccggtaactatcgtcttgagtccaacccggtaagacacgacttatcgccactggcagcagccactggtaacaggattagcagagcgaggtatgtaggcggtgctacagagttcttgaagtggtggcctaactacggctacactagaagaacagtatttggtatctgcgctctgctgaagccagttaccttcggaaaaagagttggtagctcttgatccggcaaacaaaccaccgctggtagcggtggtttttttgtttgcaagcagcagattacgcgcagaaaaaaaggatctcaagaagatcctttgatcttttctacggggtctgacgctcagtggaacgaaaactcacgttaagggattttggtcatgagattatcaaaaaggatcttcacctagatccttttaaattaaaaatgaagttttaaatcaatctaaagtatatatgagtaaacttggtctgacagttaccaatgcttaatcagtgaggcacctatctcagcgatctgtctatttcgttcatccatagttgcctgactccccgtcgtgtagataactacgatacgggagggcttaccatctggccccagtgctgcaatgataccgcgagacccacgctcaccggctccagatttatcagcaataaaccagccagccggaagggccgagcgcagaagtggtcctgcaactttatccgcctccatccagtctattaattgttgccgggaagctagagtaagtagttcgccagttaatagtttgcgcaacgttgttgccattgctacaggcatcgtggtgtcacgctcgtcgtttggtatggcttcattcagctccggttcccaacgatcaaggcgagttacatgatcccccatgttgtgcaaaaaagcggttagctccttcggtcctccgatcgttgtcagaagtaagttggccgcagtgttatcactcatggttatggcagcactgcataattctcttactgtcatgccatccgtaagatgcttttctgtgactggtgagtactcaaccaagtcattctgagaatagtgtatgcggcgaccgagttgctcttgcccggcgtcaatacgggataataccgcgccacatagcagaactttaaaagtgctcatcattggaaaacgttcttcggggcgaaaactctcaaggatcttaccgctgttgagatccagttcgatgtaacccactcgtgcacccaactgatcttcagcatcttttactttcaccagcgtttctgggtgagcaaaaacaggaaggcaaaatgccgcaaaaaagggaataagggcgacacggaaatgttgaatactcatactcttcctttttcaatattattgaagcatttatcagggttattgtctcatgagcggatacatatttgaatgtatttagaaaaataaacaaataggggttccgcgcacatttccccgaaaagtgccacctgacgtctaagaaaccattattatcatgacattaacctataaaaataggcgtatcacgaggccctttcgtctcgcgcgtttcggtgatgacggtgaaaacctctgacacatgcagctcccggagacggtcacagcttgtctgtaagcggatgccgggagcagacaagcccgtcagggcgcgtcagcgggtgttggcgggtgtcggggctggcttaactatgcggcatcagagcagattgtactgagagtgcaccatatgcggtgtgaaataccgcacagatgcgtaaggagaaaataccgcatcaggcgccattcgccattcaggctgcgcaactgttgggaagggcgatcggtgcgggcctcttcgctattacgccagctggcgaaagggggatgtgctgcaaggcgattaagttgggtaacgccagggttttcccagtcacgacgttgtaaaacgacggccagtgaattcgagctc

SEQ ID NO: 3212 - DNA, 5514 bp, synthetic construct
  source 1..5514: mol_type = other DNA; note = 5' HA replaced with AC spacer
taatacgactcactatagggagaccctcgaacaaaaacaccacaaacaccaacaatagatgacttacaactaatcggaaggtgcagagactcgacgggagctaccctaacgtcaagacgagggtaaagagagagtccaattctcaaagccaataggcagtagcgaaagctgcaagagaatgaaaatccgtcgccggaaacgcaatagccgaaaaacaaaaaacaaaaaaattaaaacagcctgtgggttgatcccacccacaggcccattgggcgctagcactctggtatcacggtacctttgtgcgcctgttttataccccctcccccaactgtaacttagaagtaacacacaccgatcaacagtcagcgtggcacaccagccacgttttgatcaagcacttctgttaccccggactgagtatcaatagactgctcacgcggttgaaggagaaagcgttcgttatccggccaactacttcgaaaaacctagtaacaccgtggaagttgcagagtgtttcgctcagcactaccccagtgtagatcaggtcgatgagtcaccgcattccccacgggcgaccgtggcggtggctgcgttggcggcctgcccatggggaaacccatgggacgctctaatacagacatggtgcgaagagtctattgagctagttggtagtcctccggcccctgaatgcggctaatcctaactgcggagcacacaccctcaagccagagggcagtgtgtcgtaacgggcaactctgcagcggaaccgactactttgggtgtccgtgtttcattttattcctatactggctgcttatggtgacaattgagagatcgttaccatatagctattggattggccatccggtgactaatagagctattatatatccctttgttgggtttataccacttagcttgaaagaggttaaaacattacaattcattgttaagttgaatacagcaaaatggaagatgccaagaacatcaagaagggccctgctccattctaccctctggaagatggaacagccggcgagcagctgcacaaggccatgaagagatatgccctggtgcctggcacaatcgccttcacagatgcccacatcgaggtggacatcacctacgccgagtacttcgagatgtctgtgcggctggccgaagctatgaagcgctacggcctgaacaccaaccaccggatcgtcgtgtgcagcgagaacagcctgcagttcttcatgcctgtgctgggcgccctgttcatcggagttgctgtggcccctgccaacgacatctacaacgagcgcgagctgctgaacagcatgggcatctctcagcccaccgtggtgttcgtgtccaagaagggactgcagaaaatcctgaacgtgcagaagaagctgcccatcatccagaaaatcatcatcatggacagcaagaccgactaccagggcttccagagcatgtacaccttcgtgaccagccatctgccacctggcttcaacgagtacgacttcgtgcccgagagcttcgaccgggacaagacaatcgccctgatcatgaacagcagcggctctaccggactgcccaaaggtgttgccctgcctcatagaactgcctgcgtgcggtttagccacgccagagatcccatcttcggcaaccagatcatccccgacacagccatcctgagcgtggtgccttttcaccacggcttcggcatgttcaccacactgggctacctgatctgcggcttcagagtggtgctgatgtaccgcttcgaggaagaactgttcctgcggagcctgcaggactacaagatccagtctgctctgctggtgcctactctgttcagcttctttgccaagagcaccctgatcgataagtacgacctgagcaacctgcacgagatcgcctctggcggagcccctctgtctaaagaagtgggagaagccgtcgccaagcggttccatctgcctggcatcagacaaggctatggcctgaccgagacaaccagcgccattctgattacccctgagggcgacgataagcctggcgctgtgggaaaagtggtgccattcttcgaggccaaggtggtggatctggacaccggcaaaacactgggcgttaaccagaggggcgagctgtgtgttagaggccctatgatcatgagcggctacgtgaacaaccccgaggccacaaacgctctgatcgacaaggatggatggctgcacagcggcgacattgcctactgggacgaagatgagcacttcttcatcgtggaccggctgaagtccctgatcaagtacaagggctaccaggtggccccagccgagctggaatctattctgctgcaacaccccaacatcttcgatgccggcgttgcaggactgcccgatgatgatgctggcgaactgccagctgctgtggtggtgctggaacacggcaagaccatgaccgagaaagaaatcgtggactacgtggccagccaagtgaccaccgccaagaaactgagaggcggcgtggtgtttgtggacgaggtgccaaaaggcctgacaggcaagctggacgcccggaagatcagagagatcctgattaaggccaagaaaggcggcaagatcgccgtgtaatagctaactagaaaaaacaaaaaacaaaacggctattatgcgttaccggcgacggacttaaataattgagccttaaagaagaaattctttaagtggatgctctcaaactcagggaaacctaaatctagttatagacaaggcaatcctgagccaagccgaagtagtaattagtaagttgaccagtggacaatcgacggtctagatatcggatcccgggcccgtcgactgcagaggcctgcatgcaagcttggcgtaatcatggtcatagctgtttcctgtgtgaaattgttatccgctcacaattccacacaacatacgagccggaagcataaagtgtaaagcctggggtgcctaatgagtgagctaactcacattaattgcgttgcgctcactgcccgctttccagtcgggaaacctgtcgtgccagctgcattaatgaatcggccaacgcgcggggagaggcggtttgcgtattgggcgctcttccgcttcctcgctcactgactcgctgcgctcggtcgttcggctgcggcgagcggtatcagctcactcaaaggcggtaatacggttatccacagaatcaggggataacgcaggaaagaacatgtgagcaaaaggccagcaaaaggccaggaaccgtaaaaaggccgcgttgctggcgtttttccataggctccgcccccctgacgagcatcacaaaaatcgacgctcaagtcagaggtggcgaaacccgacaggactataaagataccaggcgtttccccctggaagctccctcgtgcgctctcctgttccgaccctgccgcttaccggatacctgtccgcctttctcccttcgggaagcgtggcgctttctcatagctcacgctgtaggtatctcagttcggtgtaggtcgttcgctccaagctgggctgtgtgcacgaaccccccgttcagcccgaccgctgcgccttatccggtaactatcgtcttgagtccaacccggtaagacacgacttatcgccactggcagcagccactggtaacaggattagcagagcgaggtatgtaggcggtgctacagagttcttgaagtggtggcctaactacggctacactagaagaacagtatttggtatctgcgctctgctgaagccagttaccttcggaaaaagagttggtagctcttgatccggcaaacaaaccaccgctggtagcggtggtttttttgtttgcaagcagcagattacgcgcagaaaaaaaggatctcaagaagatcctttgatcttttctacggggtctgacgctcagtggaacgaaaactcacgttaagggattttggtcatgagattatcaaaaaggatcttcacctagatccttttaaattaaaaatgaagttttaaatcaatctaaagtatatatgagtaaacttggtctgacagttaccaatgcttaatcagtgaggcacctatctcagcgatctgtctatttcgttcatccatagttgcctgactccccgtcgtgtagataactacgatacgggagggcttaccatctggccccagtgctgcaatgataccgcgagacccacgctcaccggctccagatttatcagcaataaaccagccagccggaagggccgagcgcagaagtggtcctgcaactttatccgcctccatccagtctattaattgttgccgggaagctagagtaagtagttcgccagttaatagtttgcgcaacgttgttgccattgctacaggcatcgtggtgtcacgctcgtcgtttggtatggcttcattcagctccggttcccaacgatcaaggcgagttacatgatcccccatgttgtgcaaaaaagcggttagctccttcggtcctccgatcgttgtcagaagtaagttggccgcagtgttatcactcatggttatggcagcactgcataattctcttactgtcatgccatccgtaagatgcttttctgtgactggtgagtactcaaccaagtcattctgagaatagtgtatgcggcgaccgagttgctcttgcccggcgtcaatacgggataataccgcgccacatagcagaactttaaaagtgctcatcattggaaaacgttcttcggggcgaaaactctcaaggatcttaccgctgttgagatccagttcgatgtaacccactcgtgcacccaactgatcttcagcatcttttactttcaccagcgtttctgggtgagcaaaaacaggaaggcaaaatgccgcaaaaaagggaataagggcgacacggaaatgttgaatactcatactcttcctttttcaatattattgaagcatttatcagggttattgtctcatgagcggatacatatttgaatgtatttagaaaaataaacaaataggggttccgcgcacatttccccgaaaagtgccacctgacgtctaagaaaccattattatcatgacattaacctataaaaataggcgtatcacgaggccctttcgtctcgcgcgtttcggtgatgacggtgaaaacctctgacacatgcagctcccggagacggtcacagcttgtctgtaagcggatgccgggagcagacaagcccgtcagggcgcgtcagcgggtgttggcgggtgtcggggctggcttaactatgcggcatcagagcagattgtactgagagtgcaccatatgcggtgtgaaataccgcacagatgcgtaaggagaaaataccgcatcaggcgccattcgccattcaggctgcgcaactgttgggaagggcgatcggtgcgggcctcttcgctattacgccagctggcgaaagggggatgtgctgcaaggcgattaagttgggtaacgccagggttttcccagtcacgacgttgtaaaacgacggccagtgaattcgagctc

SEQ ID NO: 3213 - DNA, 5511 bp, synthetic construct
  source 1..5511: mol_type = other DNA; note = 5' HA replaced with 10AC/8pA spacer
taatacgactcactatagggagaccctcgaaaaaaaacacaaacaccaacaatagatgacttacaactaatcggaaggtgcagagactcgacgggagctaccctaacgtcaagacgagggtaaagagagagtccaattctcaaagccaataggcagtagcgaaagctgcaagagaatgaaaatccgtcgccggaaacgcaatagccgaaaaacaaaaaacaaaaaaattaaaacagcctgtgggttgatcccacccacaggcccattgggcgctagcactctggtatcacggtacctttgtgcgcctgttttataccccctcccccaactgtaacttagaagtaacacacaccgatcaacagtcagcgtggcacaccagccacgttttgatcaagcacttctgttaccccggactgagtatcaatagactgctcacgcggttgaaggagaaagcgttcgttatccggccaactacttcgaaaaacctagtaacaccgtggaagttgcagagtgtttcgctcagcactaccccagtgtagatcaggtcgatgagtcaccgcattccccacgggcgaccgtggcggtggctgcgttggcggcctgcccatggggaaacccatgggacgctctaatacagacatggtgcgaagagtctattgagctagttggtagtcctccggcccctgaatgcggctaatcctaactgcggagcacacaccctcaagccagagggcagtgtgtcgtaacgggcaactctgcagcggaaccgactactttgggtgtccgtgtttcattttattcctatactggctgcttatggtgacaattgagagatcgttaccatatagctattggattggccatccggtgactaatagagctattatatatccctttgttgggtttataccacttagcttgaaagaggttaaaacattacaattcattgttaagttgaatacagcaaaatggaagatgccaagaacatcaagaagggccctgctccattctaccctctggaagatggaacagccggcgagcagctgcacaaggccatgaagagatatgccctggtgcctggcacaatcgccttcacagatgcccacatcgaggtggacatcacctacgccgagtacttcgagatgtctgtgcggctggccgaagctatgaagcgctacggcctgaacaccaaccaccggatcgtcgtgtgcagcgagaacagcctgcagttcttcatgcctgtgctgggcgccctgttcatcggagttgctgtggcccctgccaacgacatctacaacgagcgcgagctgctgaacagcatgggcatctctcagcccaccgtggtgttcgtgtccaagaagggactgcagaaaatcctgaacgtgcagaagaagctgcccatcatccagaaaatcatcatcatggacagcaagaccgactaccagggcttccagagcatgtacaccttcgtgaccagccatctgccacctggcttcaacgagtacgacttcgtgcccgagagcttcgaccgggacaagacaatcgccctgatcatgaacagcagcggctctaccggactgcccaaaggtgttgccctgcctcatagaactgcctgcgtgcggtttagccacgccagagatcccatcttcggcaaccagatcatccccgacacagccatcctgagcgtggtgccttttcaccacggcttcggcatgttcaccacactgggctacctgatctgcggcttcagagtggtgctgatgtaccgcttcgaggaagaactgttcctgcggagcctgcaggactacaagatccagtctgctctgctggtgcctactctgttcagcttctttgccaagagcaccctgatcgataagtacgacctgagcaacctgcacgagatcgcctctggcggagcccctctgtctaaagaagtgggagaagccgtcgccaagcggttccatctgcctggcatcagacaaggctatggcctgaccgagacaaccagcgccattctgattacccctgagggcgacgataagcctggcgctgtgggaaaagtggtgccattcttcgaggccaaggtggtggatctggacaccggcaaaacactgggcgttaaccagaggggcgagctgtgtgttagaggccctatgatcatgagcggctacgtgaacaaccccgaggccacaaacgctctgatcgacaaggatggatggctgcacagcggcgacattgcctactgggacgaagatgagcacttcttcatcgtggaccggctgaagtccctgatcaagtacaagggctaccaggtggccccagccgagctggaatctattctgctgcaacaccccaacatcttcgatgccggcgttgcaggactgcccgatgatgatgctggcgaactgccagctgctgtggtggtgctggaacacggcaagaccatgaccgagaaagaaatcgtggactacgtggccagccaagtgaccaccgccaagaaactgagaggcggcgtggtgtttgtggacgaggtgccaaaaggcctgacaggcaagctggacgcccggaagatcagagagatcctgattaaggccaagaaaggcggcaagatcgccgtgtaatagctaactagaaaaaacaaaaaacaaaacggctattatgcgttaccggcgacggacttaaataattgagccttaaagaagaaattctttaagtggatgctctcaaactcagggaaacctaaatctagttatagacaaggcaatcctgagccaagccgaagtagtaattagtaagttgaccagtggacaatcgacggtctagatatcggatcccgggcccgtcgactgcagaggcctgcatgcaagcttggcgtaatcatggtcatagctgtttcctgtgtgaaattgttatccgctcacaattccacacaacatacgagccggaagcataaagtgtaaagcctggggtgcctaatgagtgagctaactcacattaattgcgttgcgctcactgcccgctttccagtcgggaaacctgtcgtgccagctgcattaatgaatcggccaacgcgcggggagaggcggtttgcgtattgggcgctcttccgcttcctcgctcactgactcgctgcgctcggtcgttcggctgcggcgagcggtatcagctcactcaaaggcggtaatacggttatccacagaatcaggggataacgcaggaaagaacatgtgagcaaaaggccagcaaaaggccaggaaccgtaaaaaggccgcgttgctggcgtttttccataggctccgcccccctgacgagcatcacaaaaatcgacgctcaagtcagaggtggcgaaacccgacaggactataaagataccaggcgtttccccctggaagctccctcgtgcgctctcctgttccgaccctgccgcttaccggatacctgtccgcctttctcccttcgggaagcgtggcgctttctcatagctcacgctgtaggtatctcagttcggtgtaggtcgttcgctccaagctgggctgtgtgcacgaaccccccgttcagcccgaccgctgcgccttatccggtaactatcgtcttgagtccaacccggtaagacacgacttatcgccactggcagcagccactggtaacaggattagcagagcgaggtatgtaggcggtgctacagagttcttgaagtggtggcctaactacggctacactagaagaacagtatttggtatctgcgctctgctgaagccagttaccttcggaaaaagagttggtagctcttgatccggcaaacaaaccaccgctggtagcggtggtttttttgtttgcaagcagcagattacgcgcagaaaaaaaggatctcaagaagatcctttgatcttttctacggggtctgacgctcagtggaacgaaaactcacgttaagggattttggtcatgagattatcaaaaaggatcttcacctagatccttttaaattaaaaatgaagttttaaatcaatctaaagtatatatgagtaaacttggtctgacagttaccaatgcttaatcagtgaggcacctatctcagcgatctgtctatttcgttcatccatagttgcctgactccccgtcgtgtagataactacgatacgggagggcttaccatctggccccagtgctgcaatgataccgcgagacccacgctcaccggctccagatttatcagcaataaaccagccagccggaagggccgagcgcagaagtggtcctgcaactttatccgcctccatccagtctattaattgttgccgggaagctagagtaagtagttcgccagttaatagtttgcgcaacgttgttgccattgctacaggcatcgtggtgtcacgctcgtcgtttggtatggcttcattcagctccggttcccaacgatcaaggcgagttacatgatcccccatgttgtgcaaaaaagcggttagctccttcggtcctccgatcgttgtcagaagtaagttggccgcagtgttatcactcatggttatggcagcactgcataattctcttactgtcatgccatccgtaagatgcttttctgtgactggtgagtactcaaccaagtcattctgagaatagtgtatgcggcgaccgagttgctcttgcccggcgtcaatacgggataataccgcgccacatagcagaactttaaaagtgctcatcattggaaaacgttcttcggggcgaaaactctcaaggatcttaccgctgttgagatccagttcgatgtaacccactcgtgcacccaactgatcttcagcatcttttactttcaccagcgtttctgggtgagcaaaaacaggaaggcaaaatgccgcaaaaaagggaataagggcgacacggaaatgttgaatactcatactcttcctttttcaatattattgaagcatttatcagggttattgtctcatgagcggatacatatttgaatgtatttagaaaaataaacaaataggggttccgcgcacatttccccgaaaagtgccacctgacgtctaagaaaccattattatcatgacattaacctataaaaataggcgtatcacgaggccctttcgtctcgcgcgtttcggtgatgacggtgaaaacctctgacacatgcagctcccggagacggtcacagcttgtctgtaagcggatgccgggagcagacaagcccgtcagggcgcgtcagcgggtgttggcgggtgtcggggctggcttaactatgcggcatcagagcagattgtactgagagtgcaccatatgcggtgtgaaataccgcacagatgcgtaaggagaaaataccgcatcaggcgccattcgccattcaggctgcgcaactgttgggaagggcgatcggtgcgggcctcttcgctattacgccagctggcgaaagggggatgtgctgcaaggcgattaagttgggtaacgccagggttttcccagtcacgacgttgtaaaacgacggccagtgaattcgagctc

SEQ ID NO: 3214 - DNA, 5502 bp, synthetic construct
  source 1..5502: mol_type = other DNA; note = 3' HA replaced with 5pA (total 8A)
taatacgactcactatagggagaccctcgaccgtcgattgtccactggtcaacaatagatgacttacaactaatcggaaggtgcagagactcgacgggagctaccctaacgtcaagacgagggtaaagagagagtccaattctcaaagccaataggcagtagcgaaagctgcaagagaatgaaaatccgtcgccggaaacgcaatagccgaaaaacaaaaaacaaaaaaattaaaacagcctgtgggttgatcccacccacaggcccattgggcgctagcactctggtatcacggtacctttgtgcgcctgttttataccccctcccccaactgtaacttagaagtaacacacaccgatcaacagtcagcgtggcacaccagccacgttttgatcaagcacttctgttaccccggactgagtatcaatagactgctcacgcggttgaaggagaaagcgttcgttatccggccaactacttcgaaaaacctagtaacaccgtggaagttgcagagtgtttcgctcagcactaccccagtgtagatcaggtcgatgagtcaccgcattccccacgggcgaccgtggcggtggctgcgttggcggcctgcccatggggaaacccatgggacgctctaatacagacatggtgcgaagagtctattgagctagttggtagtcctccggcccctgaatgcggctaatcctaactgcggagcacacaccctcaagccagagggcagtgtgtcgtaacgggcaactctgcagcggaaccgactactttgggtgtccgtgtttcattttattcctatactggctgcttatggtgacaattgagagatcgttaccatatagctattggattggccatccggtgactaatagagctattatatatccctttgttgggtttataccacttagcttgaaagaggttaaaacattacaattcattgttaagttgaatacagcaaaatggaagatgccaagaacatcaagaagggccctgctccattctaccctctggaagatggaacagccggcgagcagctgcacaaggccatgaagagatatgccctggtgcctggcacaatcgccttcacagatgcccacatcgaggtggacatcacctacgccgagtacttcgagatgtctgtgcggctggccgaagctatgaagcgctacggcctgaacaccaaccaccggatcgtcgtgtgcagcgagaacagcctgcagttcttcatgcctgtgctgggcgccctgttcatcggagttgctgtggcccctgccaacgacatctacaacgagcgcgagctgctgaacagcatgggcatctctcagcccaccgtggtgttcgtgtccaagaagggactgcagaaaatcctgaacgtgcagaagaagctgcccatcatccagaaaatcatcatcatggacagcaagaccgactaccagggcttccagagcatgtacaccttcgtgaccagccatctgccacctggcttcaacgagtacgacttcgtgcccgagagcttcgaccgggacaagacaatcgccctgatcatgaacagcagcggctctaccggactgcccaaaggtgttgccctgcctcatagaactgcctgcgtgcggtttagccacgccagagatcccatcttcggcaaccagatcatccccgacacagccatcctgagcgtggtgccttttcaccacggcttcggcatgttcaccacactgggctacctgatctgcggcttcagagtggtgctgatgtaccgcttcgaggaagaactgttcctgcggagcctgcaggactacaagatccagtctgctctgctggtgcctactctgttcagcttctttgccaagagcaccctgatcgataagtacgacctgagcaacctgcacgagatcgcctctggcggagcccctctgtctaaagaagtgggagaagccgtcgccaagcggttccatctgcctggcatcagacaaggctatggcctgaccgagacaaccagcgccattctgattacccctgagggcgacgataagcctggcgctgtgggaaaagtggtgccattcttcgaggccaaggtggtggatctggacaccggcaaaacactgggcgttaaccagaggggcgagctgtgtgttagaggccctatgatcatgagcggctacgtgaacaaccccgaggccacaaacgctctgatcgacaaggatggatggctgcacagcggcgacattgcctactgggacgaagatgagcacttcttcatcgtggaccggctgaagtccctgatcaagtacaagggctaccaggtggccccagccgagctggaatctattctgctgcaacaccccaacatcttcgatgccggcgttgcaggactgcccgatgatgatgctggcgaactgccagctgctgtggtggtgctggaacacggcaagaccatgaccgagaaagaaatcgtggactacgtggccagccaagtgaccaccgccaagaaactgagaggcggcgtggtgtttgtggacgaggtgccaaaaggcctgacaggcaagctggacgcccggaagatcagagagatcctgattaaggccaagaaaggcggcaagatcgccgtgtaatagctaactagaaaaaacaaaaaacaaaacggctattatgcgttaccggcgacggacttaaataattgagccttaaagaagaaattctttaagtggatgctctcaaactcagggaaacctaaatctagttatagacaaggcaatcctgagccaagccgaagtagtaattagtaagttaaaaaaaatctagatatcggatcccgggcccgtcgactgcagaggcctgcatgcaagcttggcgtaatcatggtcatagctgtttcctgtgtgaaattgttatccgctcacaattccacacaacatacgagccggaagcataaagtgtaaagcctggggtgcctaatgagtgagctaactcacattaattgcgttgcgctcactgcccgctttccagtcgggaaacctgtcgtgccagctgcattaatgaatcggccaacgcgcggggagaggcggtttgcgtattgggcgctcttccgcttcctcgctcactgactcgctgcgctcggtcgttcggctgcggcgagcggtatcagctcactcaaaggcggtaatacggttatccacagaatcaggggataacgcaggaaagaacatgtgagcaaaaggccagcaaaaggccaggaaccgtaaaaaggccgcgttgctggcgtttttccataggctccgcccccctgacgagcatcacaaaaatcgacgctcaagtcagaggtggcgaaacccgacaggactataaagataccaggcgtttccccctggaagctccctcgtgcgctctcctgttccgaccctgccgcttaccggatacctgtccgcctttctcccttcgggaagcgtggcgctttctcatagctcacgctgtaggtatctcagttcggtgtaggtcgttcgctccaagctgggctgtgtgcacgaaccccccgttcagcccgaccgctgcgccttatccggtaactatcgtcttgagtccaacccggtaagacacgacttatcgccactggcagcagccactggtaacaggattagcagagcgaggtatgtaggcggtgctacagagttcttgaagtggtggcctaactacggctacactagaagaacagtatttggtatctgcgctctgctgaagccagttaccttcggaaaaagagttggtagctcttgatccggcaaacaaaccaccgctggtagcggtggtttttttgtttgcaagcagcagattacgcgcagaaaaaaaggatctcaagaagatcctttgatcttttctacggggtctgacgctcagtggaacgaaaactcacgttaagggattttggtcatgagattatcaaaaaggatcttcacctagatccttttaaattaaaaatgaagttttaaatcaatctaaagtatatatgagtaaacttggtctgacagttaccaatgcttaatcagtgaggcacctatctcagcgatctgtctatttcgttcatccatagttgcctgactccccgtcgtgtagataactacgatacgggagggcttaccatctggccccagtgctgcaatgataccgcgagacccacgctcaccggctccagatttatcagcaataaaccagccagccggaagggccgagcgcagaagtggtcctgcaactttatccgcctccatccagtctattaattgttgccgggaagctagagtaagtagttcgccagttaatagtttgcgcaacgttgttgccattgctacaggcatcgtggtgtcacgctcgtcgtttggtatggcttcattcagctccggttcccaacgatcaaggcgagttacatgatcccccatgttgtgcaaaaaagcggttagctccttcggtcctccgatcgttgtcagaagtaagttggccgcagtgttatcactcatggttatggcagcactgcataattctcttactgtcatgccatccgtaagatgcttttctgtgactggtgagtactcaaccaagtcattctgagaatagtgtatgcggcgaccgagttgctcttgcccggcgtcaatacgggataataccgcgccacatagcagaactttaaaagtgctcatcattggaaaacgttcttcggggcgaaaactctcaaggatcttaccgctgttgagatccagttcgatgtaacccactcgtgcacccaactgatcttcagcatcttttactttcaccagcgtttctgggtgagcaaaaacaggaaggcaaaatgccgcaaaaaagggaataagggcgacacggaaatgttgaatactcatactcttcctttttcaatattattgaagcatttatcagggttattgtctcatgagcggatacatatttgaatgtatttagaaaaataaacaaataggggttccgcgcacatttccccgaaaagtgccacctgacgtctaagaaaccattattatcatgacattaacctataaaaataggcgtatcacgaggccctttcgtctcgcgcgtttcggtgatgacggtgaaaacctctgacacatgcagctcccggagacggtcacagcttgtctgtaagcggatgccgggagcagacaagcccgtcagggcgcgtcagcgggtgttggcgggtgtcggggctggcttaactatgcggcatcagagcagattgtactgagagtgcaccatatgcggtgtgaaataccgcacagatgcgtaaggagaaaataccgcatcaggcgccattcgccattcaggctgcgcaactgttgggaagggcgatcggtgcgggcctcttcgctattacgccagctggcgaaagggggatgtgctgcaaggcgattaagttgggtaacgccagggttttcccagtcacgacgttgtaaaacgacggccagtgaattcgagctc

SEQ ID NO: 3215 - DNA, 5494 bp, synthetic construct
  source 1..5494: mol_type = other DNA; note = 3' no HA
taatacgactcactatagggagaccctcgaccgtcgattgtccactggtcaacaatagatgacttacaactaatcggaaggtgcagagactcgacgggagctaccctaacgtcaagacgagggtaaagagagagtccaattctcaaagccaataggcagtagcgaaagctgcaagagaatgaaaatccgtcgccggaaacgcaatagccgaaaaacaaaaaacaaaaaaattaaaacagcctgtgggttgatcccacccacaggcccattgggcgctagcactctggtatcacggtacctttgtgcgcctgttttataccccctcccccaactgtaacttagaagtaacacacaccgatcaacagtcagcgtggcacaccagccacgttttgatcaagcacttctgttaccccggactgagtatcaatagactgctcacgcggttgaaggagaaagcgttcgttatccggccaactacttcgaaaaacctagtaacaccgtggaagttgcagagtgtttcgctcagcactaccccagtgtagatcaggtcgatgagtcaccgcattccccacgggcgaccgtggcggtggctgcgttggcggcctgcccatggggaaacccatgggacgctctaatacagacatggtgcgaagagtctattgagctagttggtagtcctccggcccctgaatgcggctaatcctaactgcggagcacacaccctcaagccagagggcagtgtgtcgtaacgggcaactctgcagcggaaccgactactttgggtgtccgtgtttcattttattcctatactggctgcttatggtgacaattgagagatcgttaccatatagctattggattggccatccggtgactaatagagctattatatatccctttgttgggtttataccacttagcttgaaagaggttaaaacattacaattcattgttaagttgaatacagcaaaatggaagatgccaagaacatcaagaagggccctgctccattctaccctctggaagatggaacagccggcgagcagctgcacaaggccatgaagagatatgccctggtgcctggcacaatcgccttcacagatgcccacatcgaggtggacatcacctacgccgagtacttcgagatgtctgtgcggctggccgaagctatgaagcgctacggcctgaacaccaaccaccggatcgtcgtgtgcagcgagaacagcctgcagttcttcatgcctgtgctgggcgccctgttcatcggagttgctgtggcccctgccaacgacatctacaacgagcgcgagctgctgaacagcatgggcatctctcagcccaccgtggtgttcgtgtccaagaagggactgcagaaaatcctgaacgtgcagaagaagctgcccatcatccagaaaatcatcatcatggacagcaagaccgactaccagggcttccagagcatgtacaccttcgtgaccagccatctgccacctggcttcaacgagtacgacttcgtgcccgagagcttcgaccgggacaagacaatcgccctgatcatgaacagcagcggctctaccggactgcccaaaggtgttgccctgcctcatagaactgcctgcgtgcggtttagccacgccagagatcccatcttcggcaaccagatcatccccgacacagccatcctgagcgtggtgccttttcaccacggcttcggcatgttcaccacactgggctacctgatctgcggcttcagagtggtgctgatgtaccgcttcgaggaagaactgttcctgcggagcctgcaggactacaagatccagtctgctctgctggtgcctactctgttcagcttctttgccaagagcaccctgatcgataagtacgacctgagcaacctgcacgagatcgcctctggcggagcccctctgtctaaagaagtgggagaagccgtcgccaagcggttccatctgcctggcatcagacaaggctatggcctgaccgagacaaccagcgccattctgattacccctgagggcgacgataagcctggcgctgtgggaaaagtggtgccattcttcgaggccaaggtggtggatctggacaccggcaaaacactgggcgttaaccagaggggcgagctgtgtgttagaggccctatgatcatgagcggctacgtgaacaaccccgaggccacaaacgctctgatcgacaaggatggatggctgcacagcggcgacattgcctactgggacgaagatgagcacttcttcatcgtggaccggctgaagtccctgatcaagtacaagggctaccaggtggccccagccgagctggaatctattctgctgcaacaccccaacatcttcgatgccggcgttgcaggactgcccgatgatgatgctggcgaactgccagctgctgtggtggtgctggaacacggcaagaccatgaccgagaaagaaatcgtggactacgtggccagccaagtgaccaccgccaagaaactgagaggcggcgtggtgtttgtggacgaggtgccaaaaggcctgacaggcaagctggacgcccggaagatcagagagatcctgattaaggccaagaaaggcggcaagatcgccgtgtaatagctaactagaaaaaacaaaaaacaaaacggctattatgcgttaccggcgacggacttaaataattgagccttaaagaagaaattctttaagtggatgctctcaaactcagggaaacctaaatctagttatagacaaggcaatcctgagccaagccgaagtagtaattagtaagtttctagatatcggatcccgggcccgtcgactgcagaggcctgcatgcaagcttggcgtaatcatggtcatagctgtttcctgtgtgaaattgttatccgctcacaattccacacaacatacgagccggaagcataaagtgtaaagcctggggtgcctaatgagtgagctaactcacattaattgcgttgcgctcactgcccgctttccagtcgggaaacctgtcgtgccagctgcattaatgaatcggccaacgcgcggggagaggcggtttgcgtattgggcgctcttccgcttcctcgctcactgactcgctgcgctcggtcgttcggctgcggcgagcggtatcagctcactcaaaggcggtaatacggttatccacagaatcaggggataacgcaggaaagaacatgtgagcaaaaggccagcaaaaggccaggaaccgtaaaaaggccgcgttgctggcgtttttccataggctccgcccccctgacgagcatcacaaaaatcgacgctcaagtcagaggtggcgaaacccgacaggactataaagataccaggcgtttccccctggaagctccctcgtgcgctctcctgttccgaccctgccgcttaccggatacctgtccgcctttctcccttcgggaagcgtggcgctttctcatagctcacgctgtaggtatctcagttcggtgtaggtcgttcgctccaagctgggctgtgtgcacgaaccccccgttcagcccgaccgctgcgccttatccggtaactatcgtcttgagtccaacccggtaagacacgacttatcgccactggcagcagccactggtaacaggattagcagagcgaggtatgtaggcggtgctacagagttcttgaagtggtggcctaactacggctacactagaagaacagtatttggtatctgcgctctgctgaagccagttaccttcggaaaaagagttggtagctcttgatccggcaaacaaaccaccgctggtagcggtggtttttttgtttgcaagcagcagattacgcgcagaaaaaaaggatctcaagaagatcctttgatcttttctacggggtctgacgctcagtggaacgaaaactcacgttaagggattttggtcatgagattatcaaaaaggatcttcacctagatccttttaaattaaaaatgaagttttaaatcaatctaaagtatatatgagtaaacttggtctgacagttaccaatgcttaatcagtgaggcacctatctcagcgatctgtctatttcgttcatccatagttgcctgactccccgtcgtgtagataactacgatacgggagggcttaccatctggccccagtgctgcaatgataccgcgagacccacgctcaccggctccagatttatcagcaataaaccagccagccggaagggccgagcgcagaagtggtcctgcaactttatccgcctccatccagtctattaattgttgccgggaagctagagtaagtagttcgccagttaatagtttgcgcaacgttgttgccattgctacaggcatcgtggtgtcacgctcgtcgtttggtatggcttcattcagctccggttcccaacgatcaaggcgagttacatgatcccccatgttgtgcaaaaaagcggttagctccttcggtcctccgatcgttgtcagaagtaagttggccgcagtgttatcactcatggttatggcagcactgcataattctcttactgtcatgccatccgtaagatgcttttctgtgactggtgagtactcaaccaagtcattctgagaatagtgtatgcggcgaccgagttgctcttgcccggcgtcaatacgggataataccgcgccacatagcagaactttaaaagtgctcatcattggaaaacgttcttcggggcgaaaactctcaaggatcttaccgctgttgagatccagttcgatgtaacccactcgtgcacccaactgatcttcagcatcttttactttcaccagcgtttctgggtgagcaaaaacaggaaggcaaaatgccgcaaaaaagggaataagggcgacacggaaatgttgaatactcatactcttcctttttcaatattattgaagcatttatcagggttattgtctcatgagcggatacatatttgaatgtatttagaaaaataaacaaataggggttccgcgcacatttccccgaaaagtgccacctgacgtctaagaaaccattattatcatgacattaacctataaaaataggcgtatcacgaggccctttcgtctcgcgcgtttcggtgatgacggtgaaaacctctgacacatgcagctcccggagacggtcacagcttgtctgtaagcggatgccgggagcagacaagcccgtcagggcgcgtcagcgggtgttggcgggtgtcggggctggcttaactatgcggcatcagagcagattgtactgagagtgcaccatatgcggtgtgaaataccgcacagatgcgtaaggagaaaataccgcatcaggcgccattcgccattcaggctgcgcaactgttgggaagggcgatcggtgcgggcctcttcgctattacgccagctggcgaaagggggatgtgctgcaaggcgattaagttgggtaacgccagggttttcccagtcacgacgttgtaaaacgacggccagtgaattcgagctc

SEQ ID NO: 3216 - DNA, 5520 bp, synthetic construct
  source 1..5520: mol_type = other DNA; note = 3' HA replaced with AC spacer
taatacgactcactatagggagaccctcgaccgtcgattgtccactggtcaacaatagatgacttacaactaatcggaaggtgcagagactcgacgggagctaccctaacgtcaagacgagggtaaagagagagtccaattctcaaagccaataggcagtagcgaaagctgcaagagaatgaaaatccgtcgccggaaacgcaatagccgaaaaacaaaaaacaaaaaaattaaaacagcctgtgggttgatcccacccacaggcccattgggcgctagcactctggtatcacggtacctttgtgcgcctgttttataccccctcccccaactgtaacttagaagtaacacacaccgatcaacagtcagcgtggcacaccagccacgttttgatcaagcacttctgttaccccggactgagtatcaatagactgctcacgcggttgaaggagaaagcgttcgttatccggccaactacttcgaaaaacctagtaacaccgtggaagttgcagagtgtttcgctcagcactaccccagtgtagatcaggtcgatgagtcaccgcattccccacgggcgaccgtggcggtggctgcgttggcggcctgcccatggggaaacccatgggacgctctaatacagacatggtgcgaagagtctattgagctagttggtagtcctccggcccctgaatgcggctaatcctaactgcggagcacacaccctcaagccagagggcagtgtgtcgtaacgggcaactctgcagcggaaccgactactttgggtgtccgtgtttcattttattcctatactggctgcttatggtgacaattgagagatcgttaccatatagctattggattggccatccggtgactaatagagctattatatatccctttgttgggtttataccacttagcttgaaagaggttaaaacattacaattcattgttaagttgaatacagcaaaatggaagatgccaagaacatcaagaagggccctgctccattctaccctctggaagatggaacagccggcgagcagctgcacaaggccatgaagagatatgccctggtgcctggcacaatcgccttcacagatgcccacatcgaggtggacatcacctacgccgagtacttcgagatgtctgtgcggctggccgaagctatgaagcgctacggcctgaacaccaaccaccggatcgtcgtgtgcagcgagaacagcctgcagttcttcatgcctgtgctgggcgccctgttcatcggagttgctgtggcccctgccaacgacatctacaacgagcgcgagctgctgaacagcatgggcatctctcagcccaccgtggtgttcgtgtccaagaagggactgcagaaaatcctgaacgtgcagaagaagctgcccatcatccagaaaatcatcatcatggacagcaagaccgactaccagggcttccagagcatgtacaccttcgtgaccagccatctgccacctggcttcaacgagtacgacttcgtgcccgagagcttcgaccgggacaagacaatcgccctgatcatgaacagcagcggctctaccggactgcccaaaggtgttgccctgcctcatagaactgcctgcgtgcggtttagccacgccagagatcccatcttcggcaaccagatcatccccgacacagccatcctgagcgtggtgccttttcaccacggcttcggcatgttcaccacactgggctacctgatctgcggcttcagagtggtgctgatgtaccgcttcgaggaagaactgttcctgcggagcctgcaggactacaagatccagtctgctctgctggtgcctactctgttcagcttctttgccaagagcaccctgatcgataagtacgacctgagcaacctgcacgagatcgcctctggcggagcccctctgtctaaagaagtgggagaagccgtcgccaagcggttccatctgcctggcatcagacaaggctatggcctgaccgagacaaccagcgccattctgattacccctgagggcgacgataagcctggcgctgtgggaaaagtggtgccattcttcgaggccaaggtggtggatctggacaccggcaaaacactgggcgttaaccagaggggcgagctgtgtgttagaggccctatgatcatgagcggctacgtgaacaaccccgaggccacaaacgctctgatcgacaaggatggatggctgcacagcggcgacattgcctactgggacgaagatgagcacttcttcatcgtggaccggctgaagtccctgatcaagtacaagggctaccaggtggccccagccgagctggaatctattctgctgcaacaccccaacatcttcgatgccggcgttgcaggactgcccgatgatgatgctggcgaactgccagctgctgtggtggtgctggaacacggcaagaccatgaccgagaaagaaatcgtggactacgtggccagccaagtgaccaccgccaagaaactgagaggcggcgtggtgtttgtggacgaggtgccaaaaggcctgacaggcaagctggacgcccggaagatcagagagatcctgattaaggccaagaaaggcggcaagatcgccgtgtaatagctaactagaaaaaacaaaaaacaaaacggctattatgcgttaccggcgacggacttaaataattgagccttaaagaagaaattctttaagtggatgctctcaaactcagggaaacctaaatctagttatagacaaggcaatcctgagccaagccgaagtagtaattagtaagttaaaaacaaccaaaacacccaaaaaactctagatatcggatcccgggcccgtcgactgcagaggcctgcatgcaagcttggcgtaatcatggtcatagctgtttcctgtgtgaaattgttatccgctcacaattccacacaacatacgagccggaagcataaagtgtaaagcctggggtgcctaatgagtgagctaactcacattaattgcgttgcgctcactgcccgctttccagtcgggaaacctgtcgtgccagctgcattaatgaatcggccaacgcgcggggagaggcggtttgcgtattgggcgctcttccgcttcctcgctcactgactcgctgcgctcggtcgttcggctgcggcgagcggtatcagctcactcaaaggcggtaatacggttatccacagaatcaggggataacgcaggaaagaacatgtgagcaaaaggccagcaaaaggccaggaaccgtaaaaaggccgcgttgctggcgtttttccataggctccgcccccctgacgagcatcacaaaaatcgacgctcaagtcagaggtggcgaaacccgacaggactataaagataccaggcgtttccccctggaagctccctcgtgcgctctcctgttccgaccctgccgcttaccggatacctgtccgcctttctcccttcgggaagcgtggcgctttctcatagctcacgctgtaggtatctcagttcggtgtaggtcgttcgctccaagctgggctgtgtgcacgaaccccccgttcagcccgaccgctgcgccttatccggtaactatcgtcttgagtccaacccggtaagacacgacttatcgccactggcagcagccactggtaacaggattagcagagcgaggtatgtaggcggtgctacagagttcttgaagtggtggcctaactacggctacactagaagaacagtatttggtatctgcgctctgctgaagccagttaccttcggaaaaagagttggtagctcttgatccggcaaacaaaccaccgctggtagcggtggtttttttgtttgcaagcagcagattacgcgcagaaaaaaaggatctcaagaagatcctttgatcttttctacggggtctgacgctcagtggaacgaaaactcacgttaagggattttggtcatgagattatcaaaaaggatcttcacctagatccttttaaattaaaaatgaagttttaaatcaatctaaagtatatatgagtaaacttggtctgacagttaccaatgcttaatcagtgaggcacctatctcagcgatctgtctatttcgttcatccatagttgcctgactccccgtcgtgtagataactacgatacgggagggcttaccatctggccccagtgctgcaatgataccgcgagacccacgctcaccggctccagatttatcagcaataaaccagccagccggaagggccgagcgcagaagtggtcctgcaactttatccgcctccatccagtctattaattgttgccgggaagctagagtaagtagttcgccagttaatagtttgcgcaacgttgttgccattgctacaggcatcgtggtgtcacgctcgtcgtttggtatggcttcattcagctccggttcccaacgatcaaggcgagttacatgatcccccatgttgtgcaaaaaagcggttagctccttcggtcctccgatcgttgtcagaagtaagttggccgcagtgttatcactcatggttatggcagcactgcataattctcttactgtcatgccatccgtaagatgcttttctgtgactggtgagtactcaaccaagtcattctgagaatagtgtatgcggcgaccgagttgctcttgcccggcgtcaatacgggataataccgcgccacatagcagaactttaaaagtgctcatcattggaaaacgttcttcggggcgaaaactctcaaggatcttaccgctgttgagatccagttcgatgtaacccactcgtgcacccaactgatcttcagcatcttttactttcaccagcgtttctgggtgagcaaaaacaggaaggcaaaatgccgcaaaaaagggaataagggcgacacggaaatgttgaatactcatactcttcctttttcaatattattgaagcatttatcagggttattgtctcatgagcggatacatatttgaatgtatttagaaaaataaacaaataggggttccgcgcacatttccccgaaaagtgccacctgacgtctaagaaaccattattatcatgacattaacctataaaaataggcgtatcacgaggccctttcgtctcgcgcgtttcggtgatgacggtgaaaacctctgacacatgcagctcccggagacggtcacagcttgtctgtaagcggatgccgggagcagacaagcccgtcagggcgcgtcagcgggtgttggcgggtgtcggggctggcttaactatgcggcatcagagcagattgtactgagagtgcaccatatgcggtgtgaaataccgcacagatgcgtaaggagaaaataccgcatcaggcgccattcgccattcaggctgcgcaactgttgggaagggcgatcggtgcgggcctcttcgctattacgccagctggcgaaagggggatgtgctgcaaggcgattaagttgggtaacgccagggttttcccagtcacgacgttgtaaaacgacggccagtgaattcgagctc

SEQ ID NO: 3217 - DNA, 5512 bp, synthetic construct
  source 1..5512: mol_type = other DNA; note = 3' HA replaced with 10AC/8pA spacer
taatacgactcactatagggagaccctcgaccgtcgattgtccactggtcaacaatagatgacttacaactaatcggaaggtgcagagactcgacgggagctaccctaacgtcaagacgagggtaaagagagagtccaattctcaaagccaataggcagtagcgaaagctgcaagagaatgaaaatccgtcgccggaaacgcaatagccgaaaaacaaaaaacaaaaaaattaaaacagcctgtgggttgatcccacccacaggcccattgggcgctagcactctggtatcacggtacctttgtgcgcctgttttataccccctcccccaactgtaacttagaagtaacacacaccgatcaacagtcagcgtggcacaccagccacgttttgatcaagcacttctgttaccccggactgagtatcaatagactgctcacgcggttgaaggagaaagcgttcgttatccggccaactacttcgaaaaacctagtaacaccgtggaagttgcagagtgtttcgctcagcactaccccagtgtagatcaggtcgatgagtcaccgcattccccacgggcgaccgtggcggtggctgcgttggcggcctgcccatggggaaacccatgggacgctctaatacagacatggtgcgaagagtctattgagctagttggtagtcctccggcccctgaatgcggctaatcctaactgcggagcacacaccctcaagccagagggcagtgtgtcgtaacgggcaactctgcagcggaaccgactactttgggtgtccgtgtttcattttattcctatactggctgcttatggtgacaattgagagatcgttaccatatagctattggattggccatccggtgactaatagagctattatatatccctttgttgggtttataccacttagcttgaaagaggttaaaacattacaattcattgttaagttgaatacagcaaaatggaagatgccaagaacatcaagaagggccctgctccattctaccctctggaagatggaacagccggcgagcagctgcacaaggccatgaagagatatgccctggtgcctggcacaatcgccttcacagatgcccacatcgaggtggacatcacctacgccgagtacttcgagatgtctgtgcggctggccgaagctatgaagcgctacggcctgaacaccaaccaccggatcgtcgtgtgcagcgagaacagcctgcagttcttcatgcctgtgctgggcgccctgttcatcggagttgctgtggcccctgccaacgacatctacaacgagcgcgagctgctgaacagcatgggcatctctcagcccaccgtggtgttcgtgtccaagaagggactgcagaaaatcctgaacgtgcagaagaagctgcccatcatccagaaaatcatcatcatggacagcaagaccgactaccagggcttccagagcatgtacaccttcgtgaccagccatctgccacctggcttcaacgagtacgacttcgtgcccgagagcttcgaccgggacaagacaatcgccctgatcatgaacagcagcggctctaccggactgcccaaaggtgttgccctgcctcatagaactgcctgcgtgcggtttagccacgccagagatcccatcttcggcaaccagatcatccccgacacagccatcctgagcgtggtgccttttcaccacggcttcggcatgttcaccacactgggctacctgatctgcggcttcagagtggtgctgatgtaccgcttcgaggaagaactgttcctgcggagcctgcaggactacaagatccagtctgctctgctggtgcctactctgttcagcttctttgccaagagcaccctgatcgataagtacgacctgagcaacctgcacgagatcgcctctggcggagcccctctgtctaaagaagtgggagaagccgtcgccaagcggttccatctgcctggcatcagacaaggctatggcctgaccgagacaaccagcgccattctgattacccctgagggcgacgataagcctggcgctgtgggaaaagtggtgccattcttcgaggccaaggtggtggatctggacaccggcaaaacactgggcgttaaccagaggggcgagctgtgtgttagaggccctatgatcatgagcggctacgtgaacaaccccgaggccacaaacgctctgatcgacaaggatggatggctgcacagcggcgacattgcctactgggacgaagatgagcacttcttcatcgtggaccggctgaagtccctgatcaagtacaagggctaccaggtggccccagccgagctggaatctattctgctgcaacaccccaacatcttcgatgccggcgttgcaggactgcccgatgatgatgctggcgaactgccagctgctgtggtggtgctggaacacggcaagaccatgaccgagaaagaaatcgtggactacgtggccagccaagtgaccaccgccaagaaactgagaggcggcgtggtgtttgtggacgaggtgccaaaaggcctgacaggcaagctggacgcccggaagatcagagagatcctgattaaggccaagaaaggcggcaagatcgccgtgtaatagctaactagaaaaaacaaaaaacaaaacggctattatgcgttaccggcgacggacttaaataattgagccttaaagaagaaattctttaagtggatgctctcaaactcagggaaacctaaatctagttatagacaaggcaatcctgagccaagccgaagtagtaattagtaagttaaaaacaaccaaaaaaaatctagatatcggatcccgggcccgtcgactgcagaggcctgcatgcaagcttggcgtaatcatggtcatagctgtttcctgtgtgaaattgttatccgctcacaattccacacaacatacgagccggaagcataaagtgtaaagcctggggtgcctaatgagtgagctaactcacattaattgcgttgcgctcactgcccgctttccagtcgggaaacctgtcgtgccagctgcattaatgaatcggccaacgcgcggggagaggcggtttgcgtattgggcgctcttccgcttcctcgctcactgactcgctgcgctcggtcgttcggctgcggcgagcggtatcagctcactcaaaggcggtaatacggttatccacagaatcaggggataacgcaggaaagaacatgtgagcaaaaggccagcaaaaggccaggaaccgtaaaaaggccgcgttgctggcgtttttccataggctccgcccccctgacgagcatcacaaaaatcgacgctcaagtcagaggtggcgaaacccgacaggactataaagataccaggcgtttccccctggaagctccctcgtgcgctctcctgttccgaccctgccgcttaccggatacctgtccgcctttctcccttcgggaagcgtggcgctttctcatagctcacgctgtaggtatctcagttcggtgtaggtcgttcgctccaagctgggctgtgtgcacgaaccccccgttcagcccgaccgctgcgccttatccggtaactatcgtcttgagtccaacccggtaagacacgacttatcgccactggcagcagccactggtaacaggattagcagagcgaggtatgtaggcggtgctacagagttcttgaagtggtggcctaactacggctacactagaagaacagtatttggtatctgcgctctgctgaagccagttaccttcggaaaaagagttggtagctcttgatccggcaaacaaaccaccgctggtagcggtggtttttttgtttgcaagcagcagattacgcgcagaaaaaaaggatctcaagaagatcctttgatcttttctacggggtctgacgctcagtggaacgaaaactcacgttaagggattttggtcatgagattatcaaaaaggatcttcacctagatccttttaaattaaaaatgaagttttaaatcaatctaaagtatatatgagtaaacttggtctgacagttaccaatgcttaatcagtgaggcacctatctcagcgatctgtctatttcgttcatccatagttgcctgactccccgtcgtgtagataactacgatacgggagggcttaccatctggccccagtgctgcaatgataccgcgagacccacgctcaccggctccagatttatcagcaataaaccagccagccggaagggccgagcgcagaagtggtcctgcaactttatccgcctccatccagtctattaattgttgccgggaagctagagtaagtagttcgccagttaatagtttgcgcaacgttgttgccattgctacaggcatcgtggtgtcacgctcgtcgtttggtatggcttcattcagctccggttcccaacgatcaaggcgagttacatgatcccccatgttgtgcaaaaaagcggttagctccttcggtcctccgatcgttgtcagaagtaagttggccgcagtgttatcactcatggttatggcagcactgcataattctcttactgtcatgccatccgtaagatgcttttctgtgactggtgagtactcaaccaagtcattctgagaatagtgtatgcggcgaccgagttgctcttgcccggcgtcaatacgggataataccgcgccacatagcagaactttaaaagtgctcatcattggaaaacgttcttcggggcgaaaactctcaaggatcttaccgctgttgagatccagttcgatgtaacccactcgtgcacccaactgatcttcagcatcttttactttcaccagcgtttctgggtgagcaaaaacaggaaggcaaaatgccgcaaaaaagggaataagggcgacacggaaatgttgaatactcatactcttcctttttcaatattattgaagcatttatcagggttattgtctcatgagcggatacatatttgaatgtatttagaaaaataaacaaataggggttccgcgcacatttccccgaaaagtgccacctgacgtctaagaaaccattattatcatgacattaacctataaaaataggcgtatcacgaggccctttcgtctcgcgcgtttcggtgatgacggtgaaaacctctgacacatgcagctcccggagacggtcacagcttgtctgtaagcggatgccgggagcagacaagcccgtcagggcgcgtcagcgggtgttggcgggtgtcggggctggcttaactatgcggcatcagagcagattgtactgagagtgcaccatatgcggtgtgaaataccgcacagatgcgtaaggagaaaataccgcatcaggcgccattcgccattcaggctgcgcaactgttgggaagggcgatcggtgcgggcctcttcgctattacgccagctggcgaaagggggatgtgctgcaaggcgattaagttgggtaacgccagggttttcccagtcacgacgttgtaaaacgacggccagtgaattcgagctc

SEQ ID NO: 3218 - DNA, 5509 bp, synthetic construct
  source 1..5509: mol_type = other DNA; note = Double IH min
taatacgactcactatagggagaccctcgaccgtcgattgtccactggtcaacaatagatgacttacaactaatcggaaggtgcagagactcgacgggagctaccctaacgtcaagacgagggtaaagagagagtccaattctcaaagccaataggcagtagcgaaagctgcaagagaatgaaaatccgtggctcgcagcaaacaccaaacaaaacaaacacaaaccaacaaaaattaaaacagcctgtgggttgatcccacccacaggcccattgggcgctagcactctggtatcacggtacctttgtgcgcctgttttataccccctcccccaactgtaacttagaagtaacacacaccgatcaacagtcagcgtggcacaccagccacgttttgatcaagcacttctgttaccccggactgagtatcaatagactgctcacgcggttgaaggagaaagcgttcgttatccggccaactacttcgaaaaacctagtaacaccgtggaagttgcagagtgtttcgctcagcactaccccagtgtagatcaggtcgatgagtcaccgcattccccacgggcgaccgtggcggtggctgcgttggcggcctgcccatggggaaacccatgggacgctctaatacagacatggtgcgaagagtctattgagctagttggtagtcctccggcccctgaatgcggctaatcctaactgcggagcacacaccctcaagccagagggcagtgtgtcgtaacgggcaactctgcagcggaaccgactactttgggtgtccgtgtttcattttattcctatactggctgcttatggtgacaattgagagatcgttaccatatagctattggattggccatccggtgactaatagagctattatatatccctttgttgggtttataccacttagcttgaaagaggttaaaacattacaattcattgttaagttgaatacagcaaaatggaagatgccaagaacatcaagaagggccctgctccattctaccctctggaagatggaacagccggcgagcagctgcacaaggccatgaagagatatgccctggtgcctggcacaatcgccttcacagatgcccacatcgaggtggacatcacctacgccgagtacttcgagatgtctgtgcggctggccgaagctatgaagcgctacggcctgaacaccaaccaccggatcgtcgtgtgcagcgagaacagcctgcagttcttcatgcctgtgctgggcgccctgttcatcggagttgctgtggcccctgccaacgacatctacaacgagcgcgagctgctgaacagcatgggcatctctcagcccaccgtggtgttcgtgtccaagaagggactgcagaaaatcctgaacgtgcagaagaagctgcccatcatccagaaaatcatcatcatggacagcaagaccgactaccagggcttccagagcatgtacaccttcgtgaccagccatctgccacctggcttcaacgagtacgacttcgtgcccgagagcttcgaccgggacaagacaatcgccctgatcatgaacagcagcggctctaccggactgcccaaaggtgttgccctgcctcatagaactgcctgcgtgcggtttagccacgccagagatcccatcttcggcaaccagatcatccccgacacagccatcctgagcgtggtgccttttcaccacggcttcggcatgttcaccacactgggctacctgatctgcggcttcagagtggtgctgatgtaccgcttcgaggaagaactgttcctgcggagcctgcaggactacaagatccagtctgctctgctggtgcctactctgttcagcttctttgccaagagcaccctgatcgataagtacgacctgagcaacctgcacgagatcgcctctggcggagcccctctgtctaaagaagtgggagaagccgtcgccaagcggttccatctgcctggcatcagacaaggctatggcctgaccgagacaaccagcgccattctgattacccctgagggcgacgataagcctggcgctgtgggaaaagtggtgccattcttcgaggccaaggtggtggatctggacaccggcaaaacactgggcgttaaccagaggggcgagctgtgtgttagaggccctatgatcatgagcggctacgtgaacaaccccgaggccacaaacgctctgatcgacaaggatggatggctgcacagcggcgacattgcctactgggacgaagatgagcacttcttcatcgtggaccggctgaagtccctgatcaagtacaagggctaccaggtggccccagccgagctggaatctattctgctgcaacaccccaacatcttcgatgccggcgttgcaggactgcccgatgatgatgctggcgaactgccagctgctgtggtggtgctggaacacggcaagaccatgaccgagaaagaaatcgtggactacgtggccagccaagtgaccaccgccaagaaactgagaggcggcgtggtgtttgtggacgaggtgccaaaaggcctgacaggcaagctggacgcccggaagatcagagagatcctgattaaggccaagaaaggcggcaagatcgccgtgtaatagctaactagacaaaacaccaaacaaacaagctgcgagccacggacttaaataattgagccttaaagaagaaattctttaagtggatgctctcaaactcagggaaacctaaatctagttatagacaaggcaatcctgagccaagccgaagtagtaattagtaagttgaccagtggacaatcgacggtctagatatcggatcccgggcccgtcgactgcagaggcctgcatgcaagcttggcgtaatcatggtcatagctgtttcctgtgtgaaattgttatccgctcacaattccacacaacatacgagccggaagcataaagtgtaaagcctggggtgcctaatgagtgagctaactcacattaattgcgttgcgctcactgcccgctttccagtcgggaaacctgtcgtgccagctgcattaatgaatcggccaacgcgcggggagaggcggtttgcgtattgggcgctcttccgcttcctcgctcactgactcgctgcgctcggtcgttcggctgcggcgagcggtatcagctcactcaaaggcggtaatacggttatccacagaatcaggggataacgcaggaaagaacatgtgagcaaaaggccagcaaaaggccaggaaccgtaaaaaggccgcgttgctggcgtttttccataggctccgcccccctgacgagcatcacaaaaatcgacgctcaagtcagaggtggcgaaacccgacaggactataaagataccaggcgtttccccctggaagctccctcgtgcgctctcctgttccgaccctgccgcttaccggatacctgtccgcctttctcccttcgggaagcgtggcgctttctcatagctcacgctgtaggtatctcagttcggtgtaggtcgttcgctccaagctgggctgtgtgcacgaaccccccgttcagcccgaccgctgcgccttatccggtaactatcgtcttgagtccaacccggtaagacacgacttatcgccactggcagcagccactggtaacaggattagcagagcgaggtatgtaggcggtgctacagagttcttgaagtggtggcctaactacggctacactagaagaacagtatttggtatctgcgctctgctgaagccagttaccttcggaaaaagagttggtagctcttgatccggcaaacaaaccaccgctggtagcggtggtttttttgtttgcaagcagcagattacgcgcagaaaaaaaggatctcaagaagatcctttgatcttttctacggggtctgacgctcagtggaacgaaaactcacgttaagggattttggtcatgagattatcaaaaaggatcttcacctagatccttttaaattaaaaatgaagttttaaatcaatctaaagtatatatgagtaaacttggtctgacagttaccaatgcttaatcagtgaggcacctatctcagcgatctgtctatttcgttcatccatagttgcctgactccccgtcgtgtagataactacgatacgggagggcttaccatctggccccagtgctgcaatgataccgcgagacccacgctcaccggctccagatttatcagcaataaaccagccagccggaagggccgagcgcagaagtggtcctgcaactttatccgcctccatccagtctattaattgttgccgggaagctagagtaagtagttcgccagttaatagtttgcgcaacgttgttgccattgctacaggcatcgtggtgtcacgctcgtcgtttggtatggcttcattcagctccggttcccaacgatcaaggcgagttacatgatcccccatgttgtgcaaaaaagcggttagctccttcggtcctccgatcgttgtcagaagtaagttggccgcagtgttatcactcatggttatggcagcactgcataattctcttactgtcatgccatccgtaagatgcttttctgtgactggtgagtactcaaccaagtcattctgagaatagtgtatgcggcgaccgagttgctcttgcccggcgtcaatacgggataataccgcgccacatagcagaactttaaaagtgctcatcattggaaaacgttcttcggggcgaaaactctcaaggatcttaccgctgttgagatccagttcgatgtaacccactcgtgcacccaactgatcttcagcatcttttactttcaccagcgtttctgggtgagcaaaaacaggaaggcaaaatgccgcaaaaaagggaataagggcgacacggaaatgttgaatactcatactcttcctttttcaatattattgaagcatttatcagggttattgtctcatgagcggatacatatttgaatgtatttagaaaaataaacaaataggggttccgcgcacatttccccgaaaagtgccacctgacgtctaagaaaccattattatcatgacattaacctataaaaataggcgtatcacgaggccctttcgtctcgcgcgtttcggtgatgacggtgaaaacctctgacacatgcagctcccggagacggtcacagcttgtctgtaagcggatgccgggagcagacaagcccgtcagggcgcgtcagcgggtgttggcgggtgtcggggctggcttaactatgcggcatcagagcagattgtactgagagtgcaccatatgcggtgtgaaataccgcacagatgcgtaaggagaaaataccgcatcaggcgccattcgccattcaggctgcgcaactgttgggaagggcgatcggtgcgggcctcttcgctattacgccagctggcgaaagggggatgtgctgcaaggcgattaagttgggtaacgccagggttttcccagtcacgacgttgtaaaacgacggccagtgaattcgagctc

SEQ ID NO: 3219 - DNA, 5489 bp, synthetic construct
  source 1..5489: mol_type = other DNA; note = Double IH del
taatacgactcactatagggagaccctcgaccgtcgattgtccactggtcaacaatagatgacttacaactaatcggaaggtgcagagactcgacgggagctaccctaacgtcaagacgagggtaaagagagagtccaattctcaaagccaataggcagtagcgaaagctgcaagagaatgaaaatccgtaaacaccaaacaaaacaaacacaaaccaacaaaaattaaaacagcctgtgggttgatcccacccacaggcccattgggcgctagcactctggtatcacggtacctttgtgcgcctgttttataccccctcccccaactgtaacttagaagtaacacacaccgatcaacagtcagcgtggcacaccagccacgttttgatcaagcacttctgttaccccggactgagtatcaatagactgctcacgcggttgaaggagaaagcgttcgttatccggccaactacttcgaaaaacctagtaacaccgtggaagttgcagagtgtttcgctcagcactaccccagtgtagatcaggtcgatgagtcaccgcattccccacgggcgaccgtggcggtggctgcgttggcggcctgcccatggggaaacccatgggacgctctaatacagacatggtgcgaagagtctattgagctagttggtagtcctccggcccctgaatgcggctaatcctaactgcggagcacacaccctcaagccagagggcagtgtgtcgtaacgggcaactctgcagcggaaccgactactttgggtgtccgtgtttcattttattcctatactggctgcttatggtgacaattgagagatcgttaccatatagctattggattggccatccggtgactaatagagctattatatatccctttgttgggtttataccacttagcttgaaagaggttaaaacattacaattcattgttaagttgaatacagcaaaatggaagatgccaagaacatcaagaagggccctgctccattctaccctctggaagatggaacagccggcgagcagctgcacaaggccatgaagagatatgccctggtgcctggcacaatcgccttcacagatgcccacatcgaggtggacatcacctacgccgagtacttcgagatgtctgtgcggctggccgaagctatgaagcgctacggcctgaacaccaaccaccggatcgtcgtgtgcagcgagaacagcctgcagttcttcatgcctgtgctgggcgccctgttcatcggagttgctgtggcccctgccaacgacatctacaacgagcgcgagctgctgaacagcatgggcatctctcagcccaccgtggtgttcgtgtccaagaagggactgcagaaaatcctgaacgtgcagaagaagctgcccatcatccagaaaatcatcatcatggacagcaagaccgactaccagggcttccagagcatgtacaccttcgtgaccagccatctgccacctggcttcaacgagtacgacttcgtgcccgagagcttcgaccgggacaagacaatcgccctgatcatgaacagcagcggctctaccggactgcccaaaggtgttgccctgcctcatagaactgcctgcgtgcggtttagccacgccagagatcccatcttcggcaaccagatcatccccgacacagccatcctgagcgtggtgccttttcaccacggcttcggcatgttcaccacactgggctacctgatctgcggcttcagagtggtgctgatgtaccgcttcgaggaagaactgttcctgcggagcctgcaggactacaagatccagtctgctctgctggtgcctactctgttcagcttctttgccaagagcaccctgatcgataagtacgacctgagcaacctgcacgagatcgcctctggcggagcccctctgtctaaagaagtgggagaagccgtcgccaagcggttccatctgcctggcatcagacaaggctatggcctgaccgagacaaccagcgccattctgattacccctgagggcgacgataagcctggcgctgtgggaaaagtggtgccattcttcgaggccaaggtggtggatctggacaccggcaaaacactgggcgttaaccagaggggcgagctgtgtgttagaggccctatgatcatgagcggctacgtgaacaaccccgaggccacaaacgctctgatcgacaaggatggatggctgcacagcggcgacattgcctactgggacgaagatgagcacttcttcatcgtggaccggctgaagtccctgatcaagtacaagggctaccaggtggccccagccgagctggaatctattctgctgcaacaccccaacatcttcgatgccggcgttgcaggactgcccgatgatgatgctggcgaactgccagctgctgtggtggtgctggaacacggcaagaccatgaccgagaaagaaatcgtggactacgtggccagccaagtgaccaccgccaagaaactgagaggcggcgtggtgtttgtggacgaggtgccaaaaggcctgacaggcaagctggacgcccggaagatcagagagatcctgattaaggccaagaaaggcggcaagatcgccgtgtaatagctaactagacaaaacaccaaacaaacaaacggacttaaataattgagccttaaagaagaaattctttaagtggatgctctcaaactcagggaaacctaaatctagttatagacaaggcaatcctgagccaagccgaagtagtaattagtaagttgaccagtggacaatcgacggtctagatatcggatcccgggcccgtcgactgcagaggcctgcatgcaagcttggcgtaatcatggtcatagctgtttcctgtgtgaaattgttatccgctcacaattccacacaacatacgagccggaagcataaagtgtaaagcctggggtgcctaatgagtgagctaactcacattaattgcgttgcgctcactgcccgctttccagtcgggaaacctgtcgtgccagctgcattaatgaatcggccaacgcgcggggagaggcggtttgcgtattgggcgctcttccgcttcctcgctcactgactcgctgcgctcggtcgttcggctgcggcgagcggtatcagctcactcaaaggcggtaatacggttatccacagaatcaggggataacgcaggaaagaacatgtgagcaaaaggccagcaaaaggccaggaaccgtaaaaaggccgcgttgctggcgtttttccataggctccgcccccctgacgagcatcacaaaaatcgacgctcaagtcagaggtggcgaaacccgacaggactataaagataccaggcgtttccccctggaagctccctcgtgcgctctcctgttccgaccctgccgcttaccggatacctgtccgcctttctcccttcgggaagcgtggcgctttctcatagctcacgctgtaggtatctcagttcggtgtaggtcgttcgctccaagctgggctgtgtgcacgaaccccccgttcagcccgaccgctgcgccttatccggtaactatcgtcttgagtccaacccggtaagacacgacttatcgccactggcagcagccactggtaacaggattagcagagcgaggtatgtaggcggtgctacagagttcttgaagtggtggcctaactacggctacactagaagaacagtatttggtatctgcgctctgctgaagccagttaccttcggaaaaagagttggtagctcttgatccggcaaacaaaccaccgctggtagcggtggtttttttgtttgcaagcagcagattacgcgcagaaaaaaaggatctcaagaagatcctttgatcttttctacggggtctgacgctcagtggaacgaaaactcacgttaagggattttggtcatgagattatcaaaaaggatcttcacctagatccttttaaattaaaaatgaagttttaaatcaatctaaagtatatatgagtaaacttggtctgacagttaccaatgcttaatcagtgaggcacctatctcagcgatctgtctatttcgttcatccatagttgcctgactccccgtcgtgtagataactacgatacgggagggcttaccatctggccccagtgctgcaatgataccgcgagacccacgctcaccggctccagatttatcagcaataaaccagccagccggaagggccgagcgcagaagtggtcctgcaactttatccgcctccatccagtctattaattgttgccgggaagctagagtaagtagttcgccagttaatagtttgcgcaacgttgttgccattgctacaggcatcgtggtgtcacgctcgtcgtttggtatggcttcattcagctccggttcccaacgatcaaggcgagttacatgatcccccatgttgtgcaaaaaagcggttagctccttcggtcctccgatcgttgtcagaagtaagttggccgcagtgttatcactcatggttatggcagcactgcataattctcttactgtcatgccatccgtaagatgcttttctgtgactggtgagtactcaaccaagtcattctgagaatagtgtatgcggcgaccgagttgctcttgcccggcgtcaatacgggataataccgcgccacatagcagaactttaaaagtgctcatcattggaaaacgttcttcggggcgaaaactctcaaggatcttaccgctgttgagatccagttcgatgtaacccactcgtgcacccaactgatcttcagcatcttttactttcaccagcgtttctgggtgagcaaaaacaggaaggcaaaatgccgcaaaaaagggaataagggcgacacggaaatgttgaatactcatactcttcctttttcaatattattgaagcatttatcagggttattgtctcatgagcggatacatatttgaatgtatttagaaaaataaacaaataggggttccgcgcacatttccccgaaaagtgccacctgacgtctaagaaaccattattatcatgacattaacctataaaaataggcgtatcacgaggccctttcgtctcgcgcgtttcggtgatgacggtgaaaacctctgacacatgcagctcccggagacggtcacagcttgtctgtaagcggatgccgggagcagacaagcccgtcagggcgcgtcagcgggtgttggcgggtgtcggggctggcttaactatgcggcatcagagcagattgtactgagagtgcaccatatgcggtgtgaaataccgcacagatgcgtaaggagaaaataccgcatcaggcgccattcgccattcaggctgcgcaactgttgggaagggcgatcggtgcgggcctcttcgctattacgccagctggcgaaagggggatgtgctgcaaggcgattaagttgggtaacgccagggttttcccagtcacgacgttgtaaaacgacggccagtgaattcgagctc

SEQ ID NO: 3220 - DNA, 5484 bp, synthetic construct
  source 1..5484: mol_type = other DNA; note = IH/HA full deletion
taatacgactcactatagggagaccctcgaaaaaaaacacaaacaccaacaatagatgacttacaactaatcggaaggtgcagagactcgacgggagctaccctaacgtcaagacgagggtaaagagagagtccaattctcaaagccaataggcagtagcgaaagctgcaagagaatgaaaatccgtaaacaccaaacaaaacaaacacaaaccaacaaaaattaaaacagcctgtgggttgatcccacccacaggcccattgggcgctagcactctggtatcacggtacctttgtgcgcctgttttataccccctcccccaactgtaacttagaagtaacacacaccgatcaacagtcagcgtggcacaccagccacgttttgatcaagcacttctgttaccccggactgagtatcaatagactgctcacgcggttgaaggagaaagcgttcgttatccggccaactacttcgaaaaacctagtaacaccgtggaagttgcagagtgtttcgctcagcactaccccagtgtagatcaggtcgatgagtcaccgcattccccacgggcgaccgtggcggtggctgcgttggcggcctgcccatggggaaacccatgggacgctctaatacagacatggtgcgaagagtctattgagctagttggtagtcctccggcccctgaatgcggctaatcctaactgcggagcacacaccctcaagccagagggcagtgtgtcgtaacgggcaactctgcagcggaaccgactactttgggtgtccgtgtttcattttattcctatactggctgcttatggtgacaattgagagatcgttaccatatagctattggattggccatccggtgactaatagagctattatatatccctttgttgggtttataccacttagcttgaaagaggttaaaacattacaattcattgttaagttgaatacagcaaaatggaagatgccaagaacatcaagaagggccctgctccattctaccctctggaagatggaacagccggcgagcagctgcacaaggccatgaagagatatgccctggtgcctggcacaatcgccttcacagatgcccacatcgaggtggacatcacctacgccgagtacttcgagatgtctgtgcggctggccgaagctatgaagcgctacggcctgaacaccaaccaccggatcgtcgtgtgcagcgagaacagcctgcagttcttcatgcctgtgctgggcgccctgttcatcggagttgctgtggcccctgccaacgacatctacaacgagcgcgagctgctgaacagcatgggcatctctcagcccaccgtggtgttcgtgtccaagaagggactgcagaaaatcctgaacgtgcagaagaagctgcccatcatccagaaaatcatcatcatggacagcaagaccgactaccagggcttccagagcatgtacaccttcgtgaccagccatctgccacctggcttcaacgagtacgacttcgtgcccgagagcttcgaccgggacaagacaatcgccctgatcatgaacagcagcggctctaccggactgcccaaaggtgttgccctgcctcatagaactgcctgcgtgcggtttagccacgccagagatcccatcttcggcaaccagatcatccccgacacagccatcctgagcgtggtgccttttcaccacggcttcggcatgttcaccacactgggctacctgatctgcggcttcagagtggtgctgatgtaccgcttcgaggaagaactgttcctgcggagcctgcaggactacaagatccagtctgctctgctggtgcctactctgttcagcttctttgccaagagcaccctgatcgataagtacgacctgagcaacctgcacgagatcgcctctggcggagcccctctgtctaaagaagtgggagaagccgtcgccaagcggttccatctgcctggcatcagacaaggctatggcctgaccgagacaaccagcgccattctgattacccctgagggcgacgataagcctggcgctgtgggaaaagtggtgccattcttcgaggccaaggtggtggatctggacaccggcaaaacactgggcgttaaccagaggggcgagctgtgtgttagaggccctatgatcatgagcggctacgtgaacaaccccgaggccacaaacgctctgatcgacaaggatggatggctgcacagcggcgacattgcctactgggacgaagatgagcacttcttcatcgtggaccggctgaagtccctgatcaagtacaagggctaccaggtggccccagccgagctggaatctattctgctgcaacaccccaacatcttcgatgccggcgttgcaggactgcccgatgatgatgctggcgaactgccagctgctgtggtggtgctggaacacggcaagaccatgaccgagaaagaaatcgtggactacgtggccagccaagtgaccaccgccaagaaactgagaggcggcgtggtgtttgtggacgaggtgccaaaaggcctgacaggcaagctggacgcccggaagatcagagagatcctgattaaggccaagaaaggcggcaagatcgccgtgtaatagctaactagacaaaacaccaaacaaacaaacggacttaaataattgagccttaaagaagaaattctttaagtggatgctctcaaactcagggaaacctaaatctagttatagacaaggcaatcctgagccaagccgaagtagtaattagtaagttaaaaacaaccaaaaaaaatctagatatcggatcccgggcccgtcgactgcagaggcctgcatgcaagcttggcgtaatcatggtcatagctgtttcctgtgtgaaattgttatccgctcacaattccacacaacatacgagccggaagcataaagtgtaaagcctggggtgcctaatgagtgagctaactcacattaattgcgttgcgctcactgcccgctttccagtcgggaaacctgtcgtgccagctgcattaatgaatcggccaacgcgcggggagaggcggtttgcgtattgggcgctcttccgcttcctcgctcactgactcgctgcgctcggtcgttcggctgcggcgagcggtatcagctcactcaaaggcggtaatacggttatccacagaatcaggggataacgcaggaaagaacatgtgagcaaaaggccagcaaaaggccaggaaccgtaaaaaggccgcgttgctggcgtttttccataggctccgcccccctgacgagcatcacaaaaatcgacgctcaagtcagaggtggcgaaacccgacaggactataaagataccaggcgtttccccctggaagctccctcgtgcgctctcctgttccgaccctgccgcttaccggatacctgtccgcctttctcccttcgggaagcgtggcgctttctcatagctcacgctgtaggtatctcagttcggtgtaggtcgttcgctccaagctgggctgtgtgcacgaaccccccgttcagcccgaccgctgcgccttatccggtaactatcgtcttgagtccaacccggtaagacacgacttatcgccactggcagcagccactggtaacaggattagcagagcgaggtatgtaggcggtgctacagagttcttgaagtggtggcctaactacggctacactagaagaacagtatttggtatctgcgctctgctgaagccagttaccttcggaaaaagagttggtagctcttgatccggcaaacaaaccaccgctggtagcggtggtttttttgtttgcaagcagcagattacgcgcagaaaaaaaggatctcaagaagatcctttgatcttttctacggggtctgacgctcagtggaacgaaaactcacgttaagggattttggtcatgagattatcaaaaaggatcttcacctagatccttttaaattaaaaatgaagttttaaatcaatctaaagtatatatgagtaaacttggtctgacagttaccaatgcttaatcagtgaggcacctatctcagcgatctgtctatttcgttcatccatagttgcctgactccccgtcgtgtagataactacgatacgggagggcttaccatctggccccagtgctgcaatgataccgcgagacccacgctcaccggctccagatttatcagcaataaaccagccagccggaagggccgagcgcagaagtggtcctgcaactttatccgcctccatccagtctattaattgttgccgggaagctagagtaagtagttcgccagttaatagtttgcgcaacgttgttgccattgctacaggcatcgtggtgtcacgctcgtcgtttggtatggcttcattcagctccggttcccaacgatcaaggcgagttacatgatcccccatgttgtgcaaaaaagcggttagctccttcggtcctccgatcgttgtcagaagtaagttggccgcagtgttatcactcatggttatggcagcactgcataattctcttactgtcatgccatccgtaagatgcttttctgtgactggtgagtactcaaccaagtcattctgagaatagtgtatgcggcgaccgagttgctcttgcccggcgtcaatacgggataataccgcgccacatagcagaactttaaaagtgctcatcattggaaaacgttcttcggggcgaaaactctcaaggatcttaccgctgttgagatccagttcgatgtaacccactcgtgcacccaactgatcttcagcatcttttactttcaccagcgtttctgggtgagcaaaaacaggaaggcaaaatgccgcaaaaaagggaataagggcgacacggaaatgttgaatactcatactcttcctttttcaatattattgaagcatttatcagggttattgtctcatgagcggatacatatttgaatgtatttagaaaaataaacaaataggggttccgcgcacatttccccgaaaagtgccacctgacgtctaagaaaccattattatcatgacattaacctataaaaataggcgtatcacgaggccctttcgtctcgcgcgtttcggtgatgacggtgaaaacctctgacacatgcagctcccggagacggtcacagcttgtctgtaagcggatgccgggagcagacaagcccgtcagggcgcgtcagcgggtgttggcgggtgtcggggctggcttaactatgcggcatcagagcagattgtactgagagtgcaccatatgcggtgtgaaataccgcacagatgcgtaaggagaaaataccgcatcaggcgccattcgccattcaggctgcgcaactgttgggaagggcgatcggtgcgggcctcttcgctattacgccagctggcgaaagggggatgtgctgcaaggcgattaagttgggtaacgccagggttttcccagtcacgacgttgtaaaacgacggccagtgaattcgagctc

SEQ ID NO: 3221 - DNA, 5504 bp, synthetic construct
  source 1..5504: mol_type = other DNA; note = Double IH min
taatacgactcactatagggagaccctcgaaaaaaaacacaaacaccaacaatagatgacttacaactaatcggaaggtgcagagactcgacgggagctaccctaacgtcaagacgagggtaaagagagagtccaattctcaaagccaataggcagtagcgaaagctgcaagagaatgaaaatccgtggctcgcagcaaacaccaaacaaaacaaacacaaaccaacaaaaattaaaacagcctgtgggttgatcccacccacaggcccattgggcgctagcactctggtatcacggtacctttgtgcgcctgttttataccccctcccccaactgtaacttagaagtaacacacaccgatcaacagtcagcgtggcacaccagccacgttttgatcaagcacttctgttaccccggactgagtatcaatagactgctcacgcggttgaaggagaaagcgttcgttatccggccaactacttcgaaaaacctagtaacaccgtggaagttgcagagtgtttcgctcagcactaccccagtgtagatcaggtcgatgagtcaccgcattccccacgggcgaccgtggcggtggctgcgttggcggcctgcccatggggaaacccatgggacgctctaatacagacatggtgcgaagagtctattgagctagttggtagtcctccggcccctgaatgcggctaatcctaactgcggagcacacaccctcaagccagagggcagtgtgtcgtaacgggcaactctgcagcggaaccgactactttgggtgtccgtgtttcattttattcctatactggctgcttatggtgacaattgagagatcgttaccatatagctattggattggccatccggtgactaatagagctattatatatccctttgttgggtttataccacttagcttgaaagaggttaaaacattacaattcattgttaagttgaatacagcaaaatggaagatgccaagaacatcaagaagggccctgctccattctaccctctggaagatggaacagccggcgagcagctgcacaaggccatgaagagatatgccctggtgcctggcacaatcgccttcacagatgcccacatcgaggtggacatcacctacgccgagtacttcgagatgtctgtgcggctggccgaagctatgaagcgctacggcctgaacaccaaccaccggatcgtcgtgtgcagcgagaacagcctgcagttcttcatgcctgtgctgggcgccctgttcatcggagttgctgtggcccctgccaacgacatctacaacgagcgcgagctgctgaacagcatgggcatctctcagcccaccgtggtgttcgtgtccaagaagggactgcagaaaatcctgaacgtgcagaagaagctgcccatcatccagaaaatcatcatcatggacagcaagaccgactaccagggcttccagagcatgtacaccttcgtgaccagccatctgccacctggcttcaacgagtacgacttcgtgcccgagagcttcgaccgggacaagacaatcgccctgatcatgaacagcagcggctctaccggactgcccaaaggtgttgccctgcctcatagaactgcctgcgtgcggtttagccacgccagagatcccatcttcggcaaccagatcatccccgacacagccatcctgagcgtggtgccttttcaccacggcttcggcatgttcaccacactgggctacctgatctgcggcttcagagtggtgctgatgtaccgcttcgaggaagaactgttcctgcggagcctgcaggactacaagatccagtctgctctgctggtgcctactctgttcagcttctttgccaagagcaccctgatcgataagtacgacctgagcaacctgcacgagatcgcctctggcggagcccctctgtctaaagaagtgggagaagccgtcgccaagcggttccatctgcctggcatcagacaaggctatggcctgaccgagacaaccagcgccattctgattacccctgagggcgacgataagcctggcgctgtgggaaaagtggtgccattcttcgaggccaaggtggtggatctggacaccggcaaaacactgggcgttaaccagaggggcgagctgtgtgttagaggccctatgatcatgagcggctacgtgaacaaccccgaggccacaaacgctctgatcgacaaggatggatggctgcacagcggcgacattgcctactgggacgaagatgagcacttcttcatcgtggaccggctgaagtccctgatcaagtacaagggctaccaggtggccccagccgagctggaatctattctgctgcaacaccccaacatcttcgatgccggcgttgcaggactgcccgatgatgatgctggcgaactgccagctgctgtggtggtgctggaacacggcaagaccatgaccgagaaagaaatcgtggactacgtggccagccaagtgaccaccgccaagaaactgagaggcggcgtggtgtttgtggacgaggtgccaaaaggcctgacaggcaagctggacgcccggaagatcagagagatcctgattaaggccaagaaaggcggcaagatcgccgtgtaatagctaactagacaaaacaccaaacaaacaagctgcgagccacggacttaaataattgagccttaaagaagaaattctttaagtggatgctctcaaactcagggaaacctaaatctagttatagacaaggcaatcctgagccaagccgaagtagtaattagtaagttaaaaacaaccaaaaaaaatctagatatcggatcccgggcccgtcgactgcagaggcctgcatgcaagcttggcgtaatcatggtcatagctgtttcctgtgtgaaattgttatccgctcacaattccacacaacatacgagccggaagcataaagtgtaaagcctggggtgcctaatgagtgagctaactcacattaattgcgttgcgctcactgcccgctttccagtcgggaaacctgtcgtgccagctgcattaatgaatcggccaacgcgcggggagaggcggtttgcgtattgggcgctcttccgcttcctcgctcactgactcgctgcgctcggtcgttcggctgcggcgagcggtatcagctcactcaaaggcggtaatacggttatccacagaatcaggggataacgcaggaaagaacatgtgagcaaaaggccagcaaaaggccaggaaccgtaaaaaggccgcgttgctggcgtttttccataggctccgcccccctgacgagcatcacaaaaatcgacgctcaagtcagaggtggcgaaacccgacaggactataaagataccaggcgtttccccctggaagctccctcgtgcgctctcctgttccgaccctgccgcttaccggatacctgtccgcctttctcccttcgggaagcgtggcgctttctcatagctcacgctgtaggtatctcagttcggtgtaggtcgttcgctccaagctgggctgtgtgcacgaaccccccgttcagcccgaccgctgcgccttatccggtaactatcgtcttgagtccaacccggtaagacacgacttatcgccactggcagcagccactggtaacaggattagcagagcgaggtatgtaggcggtgctacagagttcttgaagtggtggcctaactacggctacactagaagaacagtatttggtatctgcgctctgctgaagccagttaccttcggaaaaagagttggtagctcttgatccggcaaacaaaccaccgctggtagcggtggtttttttgtttgcaagcagcagattacgcgcagaaaaaaaggatctcaagaagatcctttgatcttttctacggggtctgacgctcagtggaacgaaaactcacgttaagggattttggtcatgagattatcaaaaaggatcttcacctagatccttttaaattaaaaatgaagttttaaatcaatctaaagtatatatgagtaaacttggtctgacagttaccaatgcttaatcagtgaggcacctatctcagcgatctgtctatttcgttcatccatagttgcctgactccccgtcgtgtagataactacgatacgggagggcttaccatctggccccagtgctgcaatgataccgcgagacccacgctcaccggctccagatttatcagcaataaaccagccagccggaagggccgagcgcagaagtggtcctgcaactttatccgcctccatccagtctattaattgttgccgggaagctagagtaagtagttcgccagttaatagtttgcgcaacgttgttgccattgctacaggcatcgtggtgtcacgctcgtcgtttggtatggcttcattcagctccggttcccaacgatcaaggcgagttacatgatcccccatgttgtgcaaaaaagcggttagctccttcggtcctccgatcgttgtcagaagtaagttggccgcagtgttatcactcatggttatggcagcactgcataattctcttactgtcatgccatccgtaagatgcttttctgtgactggtgagtactcaaccaagtcattctgagaatagtgtatgcggcgaccgagttgctcttgcccggcgtcaatacgggataataccgcgccacatagcagaactttaaaagtgctcatcattggaaaacgttcttcggggcgaaaactctcaaggatcttaccgctgttgagatccagttcgatgtaacccactcgtgcacccaactgatcttcagcatcttttactttcaccagcgtttctgggtgagcaaaaacaggaaggcaaaatgccgcaaaaaagggaataagggcgacacggaaatgttgaatactcatactcttcctttttcaatattattgaagcatttatcagggttattgtctcatgagcggatacatatttgaatgtatttagaaaaataaacaaataggggttccgcgcacatttccccgaaaagtgccacctgacgtctaagaaaccattattatcatgacattaacctataaaaataggcgtatcacgaggccctttcgtctcgcgcgtttcggtgatgacggtgaaaacctctgacacatgcagctcccggagacggtcacagcttgtctgtaagcggatgccgggagcagacaagcccgtcagggcgcgtcagcgggtgttggcgggtgtcggggctggcttaactatgcggcatcagagcagattgtactgagagtgcaccatatgcggtgtgaaataccgcacagatgcgtaaggagaaaataccgcatcaggcgccattcgccattcaggctgcgcaactgttgggaagggcgatcggtgcgggcctcttcgctattacgccagctggcgaaagggggatgtgctgcaaggcgattaagttgggtaacgccagggttttcccagtcacgacgttgtaaaacgacggccagtgaattcgagctc

SEQ ID NO: 3222 - DNA, 2831 bp, synthetic construct
  source 1..2831: mol_type = other DNA; note = Ana1.1
taatacgactcactatagggagaccctcgaaaaaaaacacaaacacccggacttaaataattgagccttaaagaagaaattctttaagtggatgctctcaaactcagggaaacctaaatctagttatagacaaggcaatcctgagccaagccgaagtagtaattagtaagttaacaatagatgacttacaactaatcggaaggtgcagagactcgacgggagctaccctaacgtcaagacgagggtaaagagagagtccaattctcaaagccaataggcagtagcgaaagctgcaagagaatgaaaatccgtggctcgcagcaaacaccaaacaaaacaaacacaaaccaacaaaaattaaaacagcctgtgggttgatcccacccacaggcccattgggcgctagcactctggtatcacggtacctttgtgcgcctgttttataccccctcccccaactgtaacttagaagtaacacacaccgatcaacagtcagcgtggcacaccagccacgttttgatcaagcacttctgttaccccggactgagtatcaatagactgctcacgcggttgaaggagaaagcgttcgttatccggccaactacttcgaaaaacctagtaacaccgtggaagttgcagagtgtttcgctcagcactaccccagtgtagatcaggtcgatgagtcaccgcattccccacgggcgaccgtggcggtggctgcgttggcggcctgcccatggggaaacccatgggacgctctaatacagacatggtgcgaagagtctattgagctagttggtagtcctccggcccctgaatgcggctaatcctaactgcggagcacacaccctcaagccagagggcagtgtgtcgtaacgggcaactctgcagcggaaccgactactttgggtgtccgtgtttcattttattcctatactggctgcttatggtgacaattgagagatcgttaccatatagctattggattggccatccggtgactaatagagctattatatatccctttgttgggtttataccacttagcttgaaagaggttaaaacattacaattcattgttaagttgaatacagcaaaatggaagatgccaagaacatcaagaagggccctgctccattctaccctctggaagatggaacagccggcgagcagctgcacaaggccatgaagagatatgccctggtgcctggcacaatcgccttcacagatgcccacatcgaggtggacatcacctacgccgagtacttcgagatgtctgtgcggctggccgaagctatgaagcgctacggcctgaacaccaaccaccggatcgtcgtgtgcagcgagaacagcctgcagttcttcatgcctgtgctgggcgccctgttcatcggagttgctgtggcccctgccaacgacatctacaacgagcgcgagctgctgaacagcatgggcatctctcagcccaccgtggtgttcgtgtccaagaagggactgcagaaaatcctgaacgtgcagaagaagctgcccatcatccagaaaatcatcatcatggacagcaagaccgactaccagggcttccagagcatgtacaccttcgtgaccagccatctgccacctggcttcaacgagtacgacttcgtgcccgagagcttcgaccgggacaagacaatcgccctgatcatgaacagcagcggctctaccggactgcccaaaggtgttgccctgcctcatagaactgcctgcgtgcggtttagccacgccagagatcccatcttcggcaaccagatcatccccgacacagccatcctgagcgtggtgccttttcaccacggcttcggcatgttcaccacactgggctacctgatctgcggcttcagagtggtgctgatgtaccgcttcgaggaagaactgttcctgcggagcctgcaggactacaagatccagtctgctctgctggtgcctactctgttcagcttctttgccaagagcaccctgatcgataagtacgacctgagcaacctgcacgagatcgcctctggcggagcccctctgtctaaagaagtgggagaagccgtcgccaagcggttccatctgcctggcatcagacaaggctatggcctgaccgagacaaccagcgccattctgattacccctgagggcgacgataagcctggcgctgtgggaaaagtggtgccattcttcgaggccaaggtggtggatctggacaccggcaaaacactgggcgttaaccagaggggcgagctgtgtgttagaggccctatgatcatgagcggctacgtgaacaaccccgaggccacaaacgctctgatcgacaaggatggatggctgcacagcggcgacattgcctactgggacgaagatgagcacttcttcatcgtggaccggctgaagtccctgatcaagtacaagggctaccaggtggccccagccgagctggaatctattctgctgcaacaccccaacatcttcgatgccggcgttgcaggactgcccgatgatgatgctggcgaactgccagctgctgtggtggtgctggaacacggcaagaccatgaccgagaaagaaatcgtggactacgtggccagccaagtgaccaccgccaagaaactgagaggcggcgtggtgtttgtggacgaggtgccaaaaggcctgacaggcaagctggacgcccggaagatcagagagatcctgattaaggccaagaaaggcggcaagatcgccgtgtaatagctaactagacaaaacaccaaacaaacaagctgcgagccaaaaaacaaccaaaaaaaatctagatatcggatcccggg

SEQ ID NO: 3223 - DNA, 2831 bp, synthetic construct
  source 1..2831: mol_type = other DNA; note = Ana1.2
taatacgactcactatagggagaccctcgaaaaaaaacacaaacaccggacttaaataattgagccttaaagaagaaattctttaagtggatgctctcaaactcagggaaacctaaatctagttatagacaaggcaatcctgagccaagccgaagtagtaattagtaagttaacaatagatgacttacaactaatcggaaggtgcagagactcgacgggagctaccctaacgtcaagacgagggtaaagagagagtccaattctcaaagccaataggcagtagcgaaagctgcaagagaatgaaaatccgtggctcgcagcaaacaccaaacaaaacaaacacaaaccaacaaaaattaaaacagcctgtgggttgatcccacccacaggcccattgggcgctagcactctggtatcacggtacctttgtgcgcctgttttataccccctcccccaactgtaacttagaagtaacacacaccgatcaacagtcagcgtggcacaccagccacgttttgatcaagcacttctgttaccccggactgagtatcaatagactgctcacgcggttgaaggagaaagcgttcgttatccggccaactacttcgaaaaacctagtaacaccgtggaagttgcagagtgtttcgctcagcactaccccagtgtagatcaggtcgatgagtcaccgcattccccacgggcgaccgtggcggtggctgcgttggcggcctgcccatggggaaacccatgggacgctctaatacagacatggtgcgaagagtctattgagctagttggtagtcctccggcccctgaatgcggctaatcctaactgcggagcacacaccctcaagccagagggcagtgtgtcgtaacgggcaactctgcagcggaaccgactactttgggtgtccgtgtttcattttattcctatactggctgcttatggtgacaattgagagatcgttaccatatagctattggattggccatccggtgactaatagagctattatatatccctttgttgggtttataccacttagcttgaaagaggttaaaacattacaattcattgttaagttgaatacagcaaaatggaagatgccaagaacatcaagaagggccctgctccattctaccctctggaagatggaacagccggcgagcagctgcacaaggccatgaagagatatgccctggtgcctggcacaatcgccttcacagatgcccacatcgaggtggacatcacctacgccgagtacttcgagatgtctgtgcggctggccgaagctatgaagcgctacggcctgaacaccaaccaccggatcgtcgtgtgcagcgagaacagcctgcagttcttcatgcctgtgctgggcgccctgttcatcggagttgctgtggcccctgccaacgacatctacaacgagcgcgagctgctgaacagcatgggcatctctcagcccaccgtggtgttcgtgtccaagaagggactgcagaaaatcctgaacgtgcagaagaagctgcccatcatccagaaaatcatcatcatggacagcaagaccgactaccagggcttccagagcatgtacaccttcgtgaccagccatctgccacctggcttcaacgagtacgacttcgtgcccgagagcttcgaccgggacaagacaatcgccctgatcatgaacagcagcggctctaccggactgcccaaaggtgttgccctgcctcatagaactgcctgcgtgcggtttagccacgccagagatcccatcttcggcaaccagatcatccccgacacagccatcctgagcgtggtgccttttcaccacggcttcggcatgttcaccacactgggctacctgatctgcggcttcagagtggtgctgatgtaccgcttcgaggaagaactgttcctgcggagcctgcaggactacaagatccagtctgctctgctggtgcctactctgttcagcttctttgccaagagcaccctgatcgataagtacgacctgagcaacctgcacgagatcgcctctggcggagcccctctgtctaaagaagtgggagaagccgtcgccaagcggttccatctgcctggcatcagacaaggctatggcctgaccgagacaaccagcgccattctgattacccctgagggcgacgataagcctggcgctgtgggaaaagtggtgccattcttcgaggccaaggtggtggatctggacaccggcaaaacactgggcgttaaccagaggggcgagctgtgtgttagaggccctatgatcatgagcggctacgtgaacaaccccgaggccacaaacgctctgatcgacaaggatggatggctgcacagcggcgacattgcctactgggacgaagatgagcacttcttcatcgtggaccggctgaagtccctgatcaagtacaagggctaccaggtggccccagccgagctggaatctattctgctgcaacaccccaacatcttcgatgccggcgttgcaggactgcccgatgatgatgctggcgaactgccagctgctgtggtggtgctggaacacggcaagaccatgaccgagaaagaaatcgtggactacgtggccagccaagtgaccaccgccaagaaactgagaggcggcgtggtgtttgtggacgaggtgccaaaaggcctgacaggcaagctggacgcccggaagatcagagagatcctgattaaggccaagaaaggcggcaagatcgccgtgtaatagctaactagacaaaacaccaaacaaacaagctgcgagccacaaaaacaaccaaaaaaaatctagatatcggatcccggg

SEQ ID NO: 3224 - DNA, 2831 bp, synthetic construct
  source 1..2831: mol_type = other DNA; note = Ana1.3
taatacgactcactatagggagaccctcgaaaaaaaacacaaacaccgacttaaataattgagccttaaagaagaaattctttaagtggatgctctcaaactcagggaaacctaaatctagttatagacaaggcaatcctgagccaagccgaagtagtaattagtaagttaacaatagatgacttacaactaatcggaaggtgcagagactcgacgggagctaccctaacgtcaagacgagggtaaagagagagtccaattctcaaagccaataggcagtagcgaaagctgcaagagaatgaaaatccgtggctcgcagcaaacaccaaacaaaacaaacacaaaccaacaaaaattaaaacagcctgtgggttgatcccacccacaggcccattgggcgctagcactctggtatcacggtacctttgtgcgcctgttttataccccctcccccaactgtaacttagaagtaacacacaccgatcaacagtcagcgtggcacaccagccacgttttgatcaagcacttctgttaccccggactgagtatcaatagactgctcacgcggttgaaggagaaagcgttcgttatccggccaactacttcgaaaaacctagtaacaccgtggaagttgcagagtgtttcgctcagcactaccccagtgtagatcaggtcgatgagtcaccgcattccccacgggcgaccgtggcggtggctgcgttggcggcctgcccatggggaaacccatgggacgctctaatacagacatggtgcgaagagtctattgagctagttggtagtcctccggcccctgaatgcggctaatcctaactgcggagcacacaccctcaagccagagggcagtgtgtcgtaacgggcaactctgcagcggaaccgactactttgggtgtccgtgtttcattttattcctatactggctgcttatggtgacaattgagagatcgttaccatatagctattggattggccatccggtgactaatagagctattatatatccctttgttgggtttataccacttagcttgaaagaggttaaaacattacaattcattgttaagttgaatacagcaaaatggaagatgccaagaacatcaagaagggccctgctccattctaccctctggaagatggaacagccggcgagcagctgcacaaggccatgaagagatatgccctggtgcctggcacaatcgccttcacagatgcccacatcgaggtggacatcacctacgccgagtacttcgagatgtctgtgcggctggccgaagctatgaagcgctacggcctgaacaccaaccaccggatcgtcgtgtgcagcgagaacagcctgcagttcttcatgcctgtgctgggcgccctgttcatcggagttgctgtggcccctgccaacgacatctacaacgagcgcgagctgctgaacagcatgggcatctctcagcccaccgtggtgttcgtgtccaagaagggactgcagaaaatcctgaacgtgcagaagaagctgcccatcatccagaaaatcatcatcatggacagcaagaccgactaccagggcttccagagcatgtacaccttcgtgaccagccatctgccacctggcttcaacgagtacgacttcgtgcccgagagcttcgaccgggacaagacaatcgccctgatcatgaacagcagcggctctaccggactgcccaaaggtgttgccctgcctcatagaactgcctgcgtgcggtttagccacgccagagatcccatcttcggcaaccagatcatccccgacacagccatcctgagcgtggtgccttttcaccacggcttcggcatgttcaccacactgggctacctgatctgcggcttcagagtggtgctgatgtaccgcttcgaggaagaactgttcctgcggagcctgcaggactacaagatccagtctgctctgctggtgcctactctgttcagcttctttgccaagagcaccctgatcgataagtacgacctgagcaacctgcacgagatcgcctctggcggagcccctctgtctaaagaagtgggagaagccgtcgccaagcggttccatctgcctggcatcagacaaggctatggcctgaccgagacaaccagcgccattctgattacccctgagggcgacgataagcctggcgctgtgggaaaagtggtgccattcttcgaggccaaggtggtggatctggacaccggcaaaacactgggcgttaaccagaggggcgagctgtgtgttagaggccctatgatcatgagcggctacgtgaacaaccccgaggccacaaacgctctgatcgacaaggatggatggctgcacagcggcgacattgcctactgggacgaagatgagcacttcttcatcgtggaccggctgaagtccctgatcaagtacaagggctaccaggtggccccagccgagctggaatctattctgctgcaacaccccaacatcttcgatgccggcgttgcaggactgcccgatgatgatgctggcgaactgccagctgctgtggtggtgctggaacacggcaagaccatgaccgagaaagaaatcgtggactacgtggccagccaagtgaccaccgccaagaaactgagaggcggcgtggtgtttgtggacgaggtgccaaaaggcctgacaggcaagctggacgcccggaagatcagagagatcctgattaaggccaagaaaggcggcaagatcgccgtgtaatagctaactagacaaaacaccaaacaaacaagctgcgagccacgaaaaacaaccaaaaaaaatctagatatcggatcccggg

SEQ ID NO: 3225 - DNA, 2831 bp, synthetic construct
  source 1..2831: mol_type = other DNA; note = Ana1.4
taatacgactcactatagggagaccctcgaaaaaaaacacaaacaccacttaaataattgagccttaaagaagaaattctttaagtggatgctctcaaactcagggaaacctaaatctagttatagacaaggcaatcctgagccaagccgaagtagtaattagtaagttaacaatagatgacttacaactaatcggaaggtgcagagactcgacgggagctaccctaacgtcaagacgagggtaaagagagagtccaattctcaaagccaataggcagtagcgaaagctgcaagagaatgaaaatccgtggctcgcagcaaacaccaaacaaaacaaacacaaaccaacaaaaattaaaacagcctgtgggttgatcccacccacaggcccattgggcgctagcactctggtatcacggtacctttgtgcgcctgttttataccccctcccccaactgtaacttagaagtaacacacaccgatcaacagtcagcgtggcacaccagccacgttttgatcaagcacttctgttaccccggactgagtatcaatagactgctcacgcggttgaaggagaaagcgttcgttatccggccaactacttcgaaaaacctagtaacaccgtggaagttgcagagtgtttcgctcagcactaccccagtgtagatcaggtcgatgagtcaccgcattccccacgggcgaccgtggcggtggctgcgttggcggcctgcccatggggaaacccatgggacgctctaatacagacatggtgcgaagagtctattgagctagttggtagtcctccggcccctgaatgcggctaatcctaactgcggagcacacaccctcaagccagagggcagtgtgtcgtaacgggcaactctgcagcggaaccgactactttgggtgtccgtgtttcattttattcctatactggctgcttatggtgacaattgagagatcgttaccatatagctattggattggccatccggtgactaatagagctattatatatccctttgttgggtttataccacttagcttgaaagaggttaaaacattacaattcattgttaagttgaatacagcaaaatggaagatgccaagaacatcaagaagggccctgctccattctaccctctggaagatggaacagccggcgagcagctgcacaaggccatgaagagatatgccctggtgcctggcacaatcgccttcacagatgcccacatcgaggtggacatcacctacgccgagtacttcgagatgtctgtgcggctggccgaagctatgaagcgctacggcctgaacaccaaccaccggatcgtcgtgtgcagcgagaacagcctgcagttcttcatgcctgtgctgggcgccctgttcatcggagttgctgtggcccctgccaacgacatctacaacgagcgcgagctgctgaacagcatgggcatctctcagcccaccgtggtgttcgtgtccaagaagggactgcagaaaatcctgaacgtgcagaagaagctgcccatcatccagaaaatcatcatcatggacagcaagaccgactaccagggcttccagagcatgtacaccttcgtgaccagccatctgccacctggcttcaacgagtacgacttcgtgcccgagagcttcgaccgggacaagacaatcgccctgatcatgaacagcagcggctctaccggactgcccaaaggtgttgccctgcctcatagaactgcctgcgtgcggtttagccacgccagagatcccatcttcggcaaccagatcatccccgacacagccatcctgagcgtggtgccttttcaccacggcttcggcatgttcaccacactgggctacctgatctgcggcttcagagtggtgctgatgtaccgcttcgaggaagaactgttcctgcggagcctgcaggactacaagatccagtctgctctgctggtgcctactctgttcagcttctttgccaagagcaccctgatcgataagtacgacctgagcaacctgcacgagatcgcctctggcggagcccctctgtctaaagaagtgggagaagccgtcgccaagcggttccatctgcctggcatcagacaaggctatggcctgaccgagacaaccagcgccattctgattacccctgagggcgacgataagcctggcgctgtgggaaaagtggtgccattcttcgaggccaaggtggtggatctggacaccggcaaaacactgggcgttaaccagaggggcgagctgtgtgttagaggccctatgatcatgagcggctacgtgaacaaccccgaggccacaaacgctctgatcgacaaggatggatggctgcacagcggcgacattgcctactgggacgaagatgagcacttcttcatcgtggaccggctgaagtccctgatcaagtacaagggctaccaggtggccccagccgagctggaatctattctgctgcaacaccccaacatcttcgatgccggcgttgcaggactgcccgatgatgatgctggcgaactgccagctgctgtggtggtgctggaacacggcaagaccatgaccgagaaagaaatcgtggactacgtggccagccaagtgaccaccgccaagaaactgagaggcggcgtggtgtttgtggacgaggtgccaaaaggcctgacaggcaagctggacgcccggaagatcagagagatcctgattaaggccaagaaaggcggcaagatcgccgtgtaatagctaactagacaaaacaccaaacaaacaagctgcgagccacggaaaaacaaccaaaaaaaatctagatatcggatcccggg

SEQ ID NO: 3226 - DNA, 2831 bp, synthetic construct
  source 1..2831: mol_type = other DNA; note = Ana1.5
taatacgactcactatagggagaccctcgaaaaaaaacacaaacacccttaaataattgagccttaaagaagaaattctttaagtggatgctctcaaactcagggaaacctaaatctagttatagacaaggcaatcctgagccaagccgaagtagtaattagtaagttaacaatagatgacttacaactaatcggaaggtgcagagactcgacgggagctaccctaacgtcaagacgagggtaaagagagagtccaattctcaaagccaataggcagtagcgaaagctgcaagagaatgaaaatccgtggctcgcagcaaacaccaaacaaaacaaacacaaaccaacaaaaattaaaacagcctgtgggttgatcccacccacaggcccattgggcgctagcactctggtatcacggtacctttgtgcgcctgttttataccccctcccccaactgtaacttagaagtaacacacaccgatcaacagtcagcgtggcacaccagccacgttttgatcaagcacttctgttaccccggactgagtatcaatagactgctcacgcggttgaaggagaaagcgttcgttatccggccaactacttcgaaaaacctagtaacaccgtggaagttgcagagtgtttcgctcagcactaccccagtgtagatcaggtcgatgagtcaccgcattccccacgggcgaccgtggcggtggctgcgttggcggcctgcccatggggaaacccatgggacgctctaatacagacatggtgcgaagagtctattgagctagttggtagtcctccggcccctgaatgcggctaatcctaactgcggagcacacaccctcaagccagagggcagtgtgtcgtaacgggcaactctgcagcggaaccgactactttgggtgtccgtgtttcattttattcctatactggctgcttatggtgacaattgagagatcgttaccatatagctattggattggccatccggtgactaatagagctattatatatccctttgttgggtttataccacttagcttgaaagaggttaaaacattacaattcattgttaagttgaatacagcaaaatggaagatgccaagaacatcaagaagggccctgctccattctaccctctggaagatggaacagccggcgagcagctgcacaaggccatgaagagatatgccctggtgcctggcacaatcgccttcacagatgcccacatcgaggtggacatcacctacgccgagtacttcgagatgtctgtgcggctggccgaagctatgaagcgctacggcctgaacaccaaccaccggatcgtcgtgtgcagcgagaacagcctgcagttcttcatgcctgtgctgggcgccctgttcatcggagttgctgtggcccctgccaacgacatctacaacgagcgcgagctgctgaacagcatgggcatctctcagcccaccgtggtgttcgtgtccaagaagggactgcagaaaatcctgaacgtgcagaagaagctgcccatcatccagaaaatcatcatcatggacagcaagaccgactaccagggcttccagagcatgtacaccttcgtgaccagccatctgccacctggcttcaacgagtacgacttcgtgcccgagagcttcgaccgggacaagacaatcgccctgatcatgaacagcagcggctctaccggactgcccaaaggtgttgccctgcctcatagaactgcctgcgtgcggtttagccacgccagagatcccatcttcggcaaccagatcatccccgacacagccatcctgagcgtggtgccttttcaccacggcttcggcatgttcaccacactgggctacctgatctgcggcttcagagtggtgctgatgtaccgcttcgaggaagaactgttcctgcggagcctgcaggactacaagatccagtctgctctgctggtgcctactctgttcagcttctttgccaagagcaccctgatcgataagtacgacctgagcaacctgcacgagatcgcctctggcggagcccctctgtctaaagaagtgggagaagccgtcgccaagcggttccatctgcctggcatcagacaaggctatggcctgaccgagacaaccagcgccattctgattacccctgagggcgacgataagcctggcgctgtgggaaaagtggtgccattcttcgaggccaaggtggtggatctggacaccggcaaaacactgggcgttaaccagaggggcgagctgtgtgttagaggccctatgatcatgagcggctacgtgaacaaccccgaggccacaaacgctctgatcgacaaggatggatggctgcacagcggcgacattgcctactgggacgaagatgagcacttcttcatcgtggaccggctgaagtccctgatcaagtacaagggctaccaggtggccccagccgagctggaatctattctgctgcaacaccccaacatcttcgatgccggcgttgcaggactgcccgatgatgatgctggcgaactgccagctgctgtggtggtgctggaacacggcaagaccatgaccgagaaagaaatcgtggactacgtggccagccaagtgaccaccgccaagaaactgagaggcggcgtggtgtttgtggacgaggtgccaaaaggcctgacaggcaagctggacgcccggaagatcagagagatcctgattaaggccaagaaaggcggcaagatcgccgtgtaatagctaactagacaaaacaccaaacaaacaagctgcgagccacggaaaaaacaaccaaaaaaaatctagatatcggatcccggg

SEQ ID NO: 3227 - DNA, 2831 bp, synthetic construct
  source 1..2831: mol_type = other DNA; note = Ana1.6
taatacgactcactatagggagaccctcgaaaaaaaacacaaacaccttaaataattgagccttaaagaagaaattctttaagtggatgctctcaaactcagggaaacctaaatctagttatagacaaggcaatcctgagccaagccgaagtagtaattagtaagttaacaatagatgacttacaactaatcggaaggtgcagagactcgacgggagctaccctaacgtcaagacgagggtaaagagagagtccaattctcaaagccaataggcagtagcgaaagctgcaagagaatgaaaatccgtggctcgcagcaaacaccaaacaaaacaaacacaaaccaacaaaaattaaaacagcctgtgggttgatcccacccacaggcccattgggcgctagcactctggtatcacggtacctttgtgcgcctgttttataccccctcccccaactgtaacttagaagtaacacacaccgatcaacagtcagcgtggcacaccagccacgttttgatcaagcacttctgttaccccggactgagtatcaatagactgctcacgcggttgaaggagaaagcgttcgttatccggccaactacttcgaaaaacctagtaacaccgtggaagttgcagagtgtttcgctcagcactaccccagtgtagatcaggtcgatgagtcaccgcattccccacgggcgaccgtggcggtggctgcgttggcggcctgcccatggggaaacccatgggacgctctaatacagacatggtgcgaagagtctattgagctagttggtagtcctccggcccctgaatgcggctaatcctaactgcggagcacacaccctcaagccagagggcagtgtgtcgtaacgggcaactctgcagcggaaccgactactttgggtgtccgtgtttcattttattcctatactggctgcttatggtgacaattgagagatcgttaccatatagctattggattggccatccggtgactaatagagctattatatatccctttgttgggtttataccacttagcttgaaagaggttaaaacattacaattcattgttaagttgaatacagcaaaatggaagatgccaagaacatcaagaagggccctgctccattctaccctctggaagatggaacagccggcgagcagctgcacaaggccatgaagagatatgccctggtgcctggcacaatcgccttcacagatgcccacatcgaggtggacatcacctacgccgagtacttcgagatgtctgtgcggctggccgaagctatgaagcgctacggcctgaacaccaaccaccggatcgtcgtgtgcagcgagaacagcctgcagttcttcatgcctgtgctgggcgccctgttcatcggagttgctgtggcccctgccaacgacatctacaacgagcgcgagctgctgaacagcatgggcatctctcagcccaccgtggtgttcgtgtccaagaagggactgcagaaaatcctgaacgtgcagaagaagctgcccatcatccagaaaatcatcatcatggacagcaagaccgactaccagggcttccagagcatgtacaccttcgtgaccagccatctgccacctggcttcaacgagtacgacttcgtgcccgagagcttcgaccgggacaagacaatcgccctgatcatgaacagcagcggctctaccggactgcccaaaggtgttgccctgcctcatagaactgcctgcgtgcggtttagccacgccagagatcccatcttcggcaaccagatcatccccgacacagccatcctgagcgtggtgccttttcaccacggcttcggcatgttcaccacactgggctacctgatctgcggcttcagagtggtgctgatgtaccgcttcgaggaagaactgttcctgcggagcctgcaggactacaagatccagtctgctctgctggtgcctactctgttcagcttctttgccaagagcaccctgatcgataagtacgacctgagcaacctgcacgagatcgcctctggcggagcccctctgtctaaagaagtgggagaagccgtcgccaagcggttccatctgcctggcatcagacaaggctatggcctgaccgagacaaccagcgccattctgattacccctgagggcgacgataagcctggcgctgtgggaaaagtggtgccattcttcgaggccaaggtggtggatctggacaccggcaaaacactgggcgttaaccagaggggcgagctgtgtgttagaggccctatgatcatgagcggctacgtgaacaaccccgaggccacaaacgctctgatcgacaaggatggatggctgcacagcggcgacattgcctactgggacgaagatgagcacttcttcatcgtggaccggctgaagtccctgatcaagtacaagggctaccaggtggccccagccgagctggaatctattctgctgcaacaccccaacatcttcgatgccggcgttgcaggactgcccgatgatgatgctggcgaactgccagctgctgtggtggtgctggaacacggcaagaccatgaccgagaaagaaatcgtggactacgtggccagccaagtgaccaccgccaagaaactgagaggcggcgtggtgtttgtggacgaggtgccaaaaggcctgacaggcaagctggacgcccggaagatcagagagatcctgattaaggccaagaaaggcggcaagatcgccgtgtaatagctaactagacaaaacaccaaacaaacaagctgcgagccacggacaaaaacaaccaaaaaaaatctagatatcggatcccggg

SEQ ID NO: 3228 - DNA, 2831 bp, synthetic construct
  source 1..2831: mol_type = other DNA; note = Ana1.7
taatacgactcactatagggagaccctcgaaaaaaaacacaaacacctaaataattgagccttaaagaagaaattctttaagtggatgctctcaaactcagggaaacctaaatctagttatagacaaggcaatcctgagccaagccgaagtagtaattagtaagttaacaatagatgacttacaactaatcggaaggtgcagagactcgacgggagctaccctaacgtcaagacgagggtaaagagagagtccaattctcaaagccaataggcagtagcgaaagctgcaagagaatgaaaatccgtggctcgcagcaaacaccaaacaaaacaaacacaaaccaacaaaaattaaaacagcctgtgggttgatcccacccacaggcccattgggcgctagcactctggtatcacggtacctttgtgcgcctgttttataccccctcccccaactgtaacttagaagtaacacacaccgatcaacagtcagcgtggcacaccagccacgttttgatcaagcacttctgttaccccggactgagtatcaatagactgctcacgcggttgaaggagaaagcgttcgttatccggccaactacttcgaaaaacctagtaacaccgtggaagttgcagagtgtttcgctcagcactaccccagtgtagatcaggtcgatgagtcaccgcattccccacgggcgaccgtggcggtggctgcgttggcggcctgcccatggggaaacccatgggacgctctaatacagacatggtgcgaagagtctattgagctagttggtagtcctccggcccctgaatgcggctaatcctaactgcggagcacacaccctcaagccagagggcagtgtgtcgtaacgggcaactctgcagcggaaccgactactttgggtgtccgtgtttcattttattcctatactggctgcttatggtgacaattgagagatcgttaccatatagctattggattggccatccggtgactaatagagctattatatatccctttgttgggtttataccacttagcttgaaagaggttaaaacattacaattcattgttaagttgaatacagcaaaatggaagatgccaagaacatcaagaagggccctgctccattctaccctctggaagatggaacagccggcgagcagctgcacaaggccatgaagagatatgccctggtgcctggcacaatcgccttcacagatgcccacatcgaggtggacatcacctacgccgagtacttcgagatgtctgtgcggctggccgaagctatgaagcgctacggcctgaacaccaaccaccggatcgtcgtgtgcagcgagaacagcctgcagttcttcatgcctgtgctgggcgccctgttcatcggagttgctgtggcccctgccaacgacatctacaacgagcgcgagctgctgaacagcatgggcatctctcagcccaccgtggtgttcgtgtccaagaagggactgcagaaaatcctgaacgtgcagaagaagctgcccatcatccagaaaatcatcatcatggacagcaagaccgactaccagggcttccagagcatgtacaccttcgtgaccagccatctgccacctggcttcaacgagtacgacttcgtgcccgagagcttcgaccgggacaagacaatcgccctgatcatgaacagcagcggctctaccggactgcccaaaggtgttgccctgcctcatagaactgcctgcgtgcggtttagccacgccagagatcccatcttcggcaaccagatcatccccgacacagccatcctgagcgtggtgccttttcaccacggcttcggcatgttcaccacactgggctacctgatctgcggcttcagagtggtgctgatgtaccgcttcgaggaagaactgttcctgcggagcctgcaggactacaagatccagtctgctctgctggtgcctactctgttcagcttctttgccaagagcaccctgatcgataagtacgacctgagcaacctgcacgagatcgcctctggcggagcccctctgtctaaagaagtgggagaagccgtcgccaagcggttccatctgcctggcatcagacaaggctatggcctgaccgagacaaccagcgccattctgattacccctgagggcgacgataagcctggcgctgtgggaaaagtggtgccattcttcgaggccaaggtggtggatctggacaccggcaaaacactgggcgttaaccagaggggcgagctgtgtgttagaggccctatgatcatgagcggctacgtgaacaaccccgaggccacaaacgctctgatcgacaaggatggatggctgcacagcggcgacattgcctactgggacgaagatgagcacttcttcatcgtggaccggctgaagtccctgatcaagtacaagggctaccaggtggccccagccgagctggaatctattctgctgcaacaccccaacatcttcgatgccggcgttgcaggactgcccgatgatgatgctggcgaactgccagctgctgtggtggtgctggaacacggcaagaccatgaccgagaaagaaatcgtggactacgtggccagccaagtgaccaccgccaagaaactgagaggcggcgtggtgtttgtggacgaggtgccaaaaggcctgacaggcaagctggacgcccggaagatcagagagatcctgattaaggccaagaaaggcggcaagatcgccgtgtaatagctaactagacaaaacaccaaacaaacaagctgcgagccacggactaaaaacaaccaaaaaaaatctagatatcggatcccggg

SEQ ID NO: 3229 - DNA, 2831 bp, synthetic construct
  source 1..2831: mol_type = other DNA; note = Ana1.8 (P2 monotron)
taatacgactcactatagggagaccctcgaaaaaaaacacaaacaccaaataattgagccttaaagaagaaattctttaagtggatgctctcaaactcagggaaacctaaatctagttatagacaaggcaatcctgagccaagccgaagtagtaattagtaagttaacaatagatgacttacaactaatcggaaggtgcagagactcgacgggagctaccctaacgtcaagacgagggtaaagagagagtccaattctcaaagccaataggcagtagcgaaagctgcaagagaatgaaaatccgtggctcgcagcaaacaccaaacaaaacaaacacaaaccaacaaaaattaaaacagcctgtgggttgatcccacccacaggcccattgggcgctagcactctggtatcacggtacctttgtgcgcctgttttataccccctcccccaactgtaacttagaagtaacacacaccgatcaacagtcagcgtggcacaccagccacgttttgatcaagcacttctgttaccccggactgagtatcaatagactgctcacgcggttgaaggagaaagcgttcgttatccggccaactacttcgaaaaacctagtaacaccgtggaagttgcagagtgtttcgctcagcactaccccagtgtagatcaggtcgatgagtcaccgcattccccacgggcgaccgtggcggtggctgcgttggcggcctgcccatggggaaacccatgggacgctctaatacagacatggtgcgaagagtctattgagctagttggtagtcctccggcccctgaatgcggctaatcctaactgcggagcacacaccctcaagccagagggcagtgtgtcgtaacgggcaactctgcagcggaaccgactactttgggtgtccgtgtttcattttattcctatactggctgcttatggtgacaattgagagatcgttaccatatagctattggattggccatccggtgactaatagagctattatatatccctttgttgggtttataccacttagcttgaaagaggttaaaacattacaattcattgttaagttgaatacagcaaaatggaagatgccaagaacatcaagaagggccctgctccattctaccctctggaagatggaacagccggcgagcagctgcacaaggccatgaagagatatgccctggtgcctggcacaatcgccttcacagatgcccacatcgaggtggacatcacctacgccgagtacttcgagatgtctgtgcggctggccgaagctatgaagcgctacggcctgaacaccaaccaccggatcgtcgtgtgcagcgagaacagcctgcagttcttcatgcctgtgctgggcgccctgttcatcggagttgctgtggcccctgccaacgacatctacaacgagcgcgagctgctgaacagcatgggcatctctcagcccaccgtggtgttcgtgtccaagaagggactgcagaaaatcctgaacgtgcagaagaagctgcccatcatccagaaaatcatcatcatggacagcaagaccgactaccagggcttccagagcatgtacaccttcgtgaccagccatctgccacctggcttcaacgagtacgacttcgtgcccgagagcttcgaccgggacaagacaatcgccctgatcatgaacagcagcggctctaccggactgcccaaaggtgttgccctgcctcatagaactgcctgcgtgcggtttagccacgccagagatcccatcttcggcaaccagatcatccccgacacagccatcctgagcgtggtgccttttcaccacggcttcggcatgttcaccacactgggctacctgatctgcggcttcagagtggtgctgatgtaccgcttcgaggaagaactgttcctgcggagcctgcaggactacaagatccagtctgctctgctggtgcctactctgttcagcttctttgccaagagcaccctgatcgataagtacgacctgagcaacctgcacgagatcgcctctggcggagcccctctgtctaaagaagtgggagaagccgtcgccaagcggttccatctgcctggcatcagacaaggctatggcctgaccgagacaaccagcgccattctgattacccctgagggcgacgataagcctggcgctgtgggaaaagtggtgccattcttcgaggccaaggtggtggatctggacaccggcaaaacactgggcgttaaccagaggggcgagctgtgtgttagaggccctatgatcatgagcggctacgtgaacaaccccgaggccacaaacgctctgatcgacaaggatggatggctgcacagcggcgacattgcctactgggacgaagatgagcacttcttcatcgtggaccggctgaagtccctgatcaagtacaagggctaccaggtggccccagccgagctggaatctattctgctgcaacaccccaacatcttcgatgccggcgttgcaggactgcccgatgatgatgctggcgaactgccagctgctgtggtggtgctggaacacggcaagaccatgaccgagaaagaaatcgtggactacgtggccagccaagtgaccaccgccaagaaactgagaggcggcgtggtgtttgtggacgaggtgccaaaaggcctgacaggcaagctggacgcccggaagatcagagagatcctgattaaggccaagaaaggcggcaagatcgccgtgtaatagctaactagacaaaacaccaaacaaacaagctgcgagccacggacttaaaaacaaccaaaaaaaatctagatatcggatcccggg

SEQ ID NO: 3230 - DNA, 2831 bp, synthetic construct
  source 1..2831: mol_type = other DNA; note = Ana1.9
taatacgactcactatagggagaccctcgaaaaaaaacacaaacaccaataattgagccttaaagaagaaattctttaagtggatgctctcaaactcagggaaacctaaatctagttatagacaaggcaatcctgagccaagccgaagtagtaattagtaagttaacaatagatgacttacaactaatcggaaggtgcagagactcgacgggagctaccctaacgtcaagacgagggtaaagagagagtccaattctcaaagccaataggcagtagcgaaagctgcaagagaatgaaaatccgtggctcgcagcaaacaccaaacaaaacaaacacaaaccaacaaaaattaaaacagcctgtgggttgatcccacccacaggcccattgggcgctagcactctggtatcacggtacctttgtgcgcctgttttataccccctcccccaactgtaacttagaagtaacacacaccgatcaacagtcagcgtggcacaccagccacgttttgatcaagcacttctgttaccccggactgagtatcaatagactgctcacgcggttgaaggagaaagcgttcgttatccggccaactacttcgaaaaacctagtaacaccgtggaagttgcagagtgtttcgctcagcactaccccagtgtagatcaggtcgatgagtcaccgcattccccacgggcgaccgtggcggtggctgcgttggcggcctgcccatggggaaacccatgggacgctctaatacagacatggtgcgaagagtctattgagctagttggtagtcctccggcccctgaatgcggctaatcctaactgcggagcacacaccctcaagccagagggcagtgtgtcgtaacgggcaactctgcagcggaaccgactactttgggtgtccgtgtttcattttattcctatactggctgcttatggtgacaattgagagatcgttaccatatagctattggattggccatccggtgactaatagagctattatatatccctttgttgggtttataccacttagcttgaaagaggttaaaacattacaattcattgttaagttgaatacagcaaaatggaagatgccaagaacatcaagaagggccctgctccattctaccctctggaagatggaacagccggcgagcagctgcacaaggccatgaagagatatgccctggtgcctggcacaatcgccttcacagatgcccacatcgaggtggacatcacctacgccgagtacttcgagatgtctgtgcggctggccgaagctatgaagcgctacggcctgaacaccaaccaccggatcgtcgtgtgcagcgagaacagcctgcagttcttcatgcctgtgctgggcgccctgttcatcggagttgctgtggcccctgccaacgacatctacaacgagcgcgagctgctgaacagcatgggcatctctcagcccaccgtggtgttcgtgtccaagaagggactgcagaaaatcctgaacgtgcagaagaagctgcccatcatccagaaaatcatcatcatggacagcaagaccgactaccagggcttccagagcatgtacaccttcgtgaccagccatctgccacctggcttcaacgagtacgacttcgtgcccgagagcttcgaccgggacaagacaatcgccctgatcatgaacagcagcggctctaccggactgcccaaaggtgttgccctgcctcatagaactgcctgcgtgcggtttagccacgccagagatcccatcttcggcaaccagatcatccccgacacagccatcctgagcgtggtgccttttcaccacggcttcggcatgttcaccacactgggctacctgatctgcggcttcagagtggtgctgatgtaccgcttcgaggaagaactgttcctgcggagcctgcaggactacaagatccagtctgctctgctggtgcctactctgttcagcttctttgccaagagcaccctgatcgataagtacgacctgagcaacctgcacgagatcgcctctggcggagcccctctgtctaaagaagtgggagaagccgtcgccaagcggttccatctgcctggcatcagacaaggctatggcctgaccgagacaaccagcgccattctgattacccctgagggcgacgataagcctggcgctgtgggaaaagtggtgccattcttcgaggccaaggtggtggatctggacaccggcaaaacactgggcgttaaccagaggggcgagctgtgtgttagaggccctatgatcatgagcggctacgtgaacaaccccgaggccacaaacgctctgatcgacaaggatggatggctgcacagcggcgacattgcctactgggacgaagatgagcacttcttcatcgtggaccggctgaagtccctgatcaagtacaagggctaccaggtggccccagccgagctggaatctattctgctgcaacaccccaacatcttcgatgccggcgttgcaggactgcccgatgatgatgctggcgaactgccagctgctgtggtggtgctggaacacggcaagaccatgaccgagaaagaaatcgtggactacgtggccagccaagtgaccaccgccaagaaactgagaggcggcgtggtgtttgtggacgaggtgccaaaaggcctgacaggcaagctggacgcccggaagatcagagagatcctgattaaggccaagaaaggcggcaagatcgccgtgtaatagctaactagacaaaacaccaaacaaacaagctgcgagccacggacttaaaaaacaaccaaaaaaaatctagatatcggatcccggg

SEQ ID NO: 3231 - DNA, 2831 bp, synthetic construct
  source 1..2831: mol_type = other DNA; note = Ana1.10
taatacgactcactatagggagaccctcgaaaaaaaacacaaacaccataattgagccttaaagaagaaattctttaagtggatgctctcaaactcagggaaacctaaatctagttatagacaaggcaatcctgagccaagccgaagtagtaattagtaagttaacaatagatgacttacaactaatcggaaggtgcagagactcgacgggagctaccctaacgtcaagacgagggtaaagagagagtccaattctcaaagccaataggcagtagcgaaagctgcaagagaatgaaaatccgtggctcgcagcaaacaccaaacaaaacaaacacaaaccaacaaaaattaaaacagcctgtgggttgatcccacccacaggcccattgggcgctagcactctggtatcacggtacctttgtgcgcctgttttataccccctcccccaactgtaacttagaagtaacacacaccgatcaacagtcagcgtggcacaccagccacgttttgatcaagcacttctgttaccccggactgagtatcaatagactgctcacgcggttgaaggagaaagcgttcgttatccggccaactacttcgaaaaacctagtaacaccgtggaagttgcagagtgtttcgctcagcactaccccagtgtagatcaggtcgatgagtcaccgcattccccacgggcgaccgtggcggtggctgcgttggcggcctgcccatggggaaacccatgggacgctctaatacagacatggtgcgaagagtctattgagctagttggtagtcctccggcccctgaatgcggctaatcctaactgcggagcacacaccctcaagccagagggcagtgtgtcgtaacgggcaactctgcagcggaaccgactactttgggtgtccgtgtttcattttattcctatactggctgcttatggtgacaattgagagatcgttaccatatagctattggattggccatccggtgactaatagagctattatatatccctttgttgggtttataccacttagcttgaaagaggttaaaacattacaattcattgttaagttgaatacagcaaaatggaagatgccaagaacatcaagaagggccctgctccattctaccctctggaagatggaacagccggcgagcagctgcacaaggccatgaagagatatgccctggtgcctggcacaatcgccttcacagatgcccacatcgaggtggacatcacctacgccgagtacttcgagatgtctgtgcggctggccgaagctatgaagcgctacggcctgaacaccaaccaccggatcgtcgtgtgcagcgagaacagcctgcagttcttcatgcctgtgctgggcgccctgttcatcggagttgctgtggcccctgccaacgacatctacaacgagcgcgagctgctgaacagcatgggcatctctcagcccaccgtggtgttcgtgtccaagaagggactgcagaaaatcctgaacgtgcagaagaagctgcccatcatccagaaaatcatcatcatggacagcaagaccgactaccagggcttccagagcatgtacaccttcgtgaccagccatctgccacctggcttcaacgagtacgacttcgtgcccgagagcttcgaccgggacaagacaatcgccctgatcatgaacagcagcggctctaccggactgcccaaaggtgttgccctgcctcatagaactgcctgcgtgcggtttagccacgccagagatcccatcttcggcaaccagatcatccccgacacagccatcctgagcgtggtgccttttcaccacggcttcggcatgttcaccacactgggctacctgatctgcggcttcagagtggtgctgatgtaccgcttcgaggaagaactgttcctgcggagcctgcaggactacaagatccagtctgctctgctggtgcctactctgttcagcttctttgccaagagcaccctgatcgataagtacgacctgagcaacctgcacgagatcgcctctggcggagcccctctgtctaaagaagtgggagaagccgtcgccaagcggttccatctgcctggcatcagacaaggctatggcctgaccgagacaaccagcgccattctgattacccctgagggcgacgataagcctggcgctgtgggaaaagtggtgccattcttcgaggccaaggtggtggatctggacaccggcaaaacactgggcgttaaccagaggggcgagctgtgtgttagaggccctatgatcatgagcggctacgtgaacaaccccgaggccacaaacgctctgatcgacaaggatggatggctgcacagcggcgacattgcctactgggacgaagatgagcacttcttcatcgtggaccggctgaagtccctgatcaagtacaagggctaccaggtggccccagccgagctggaatctattctgctgcaacaccccaacatcttcgatgccggcgttgcaggactgcccgatgatgatgctggcgaactgccagctgctgtggtggtgctggaacacggcaagaccatgaccgagaaagaaatcgtggactacgtggccagccaagtgaccaccgccaagaaactgagaggcggcgtggtgtttgtggacgaggtgccaaaaggcctgacaggcaagctggacgcccggaagatcagagagatcctgattaaggccaagaaaggcggcaagatcgccgtgtaatagctaactagacaaaacaccaaacaaacaagctgcgagccacggacttaaaaaaacaaccaaaaaaaatctagatatcggatcccggg

SEQ ID NO: 3232 - DNA, 2831 bp, synthetic construct
  source 1..2831: mol_type = other DNA; note = Ana1.11
taatacgactcactatagggagaccctcgaaaaaaaacacaaacacctaattgagccttaaagaagaaattctttaagtggatgctctcaaactcagggaaacctaaatctagttatagacaaggcaatcctgagccaagccgaagtagtaattagtaagttaacaatagatgacttacaactaatcggaaggtgcagagactcgacgggagctaccctaacgtcaagacgagggtaaagagagagtccaattctcaaagccaataggcagtagcgaaagctgcaagagaatgaaaatccgtggctcgcagcaaacaccaaacaaaacaaacacaaaccaacaaaaattaaaacagcctgtgggttgatcccacccacaggcccattgggcgctagcactctggtatcacggtacctttgtgcgcctgttttataccccctcccccaactgtaacttagaagtaacacacaccgatcaacagtcagcgtggcacaccagccacgttttgatcaagcacttctgttaccccggactgagtatcaatagactgctcacgcggttgaaggagaaagcgttcgttatccggccaactacttcgaaaaacctagtaacaccgtggaagttgcagagtgtttcgctcagcactaccccagtgtagatcaggtcgatgagtcaccgcattccccacgggcgaccgtggcggtggctgcgttggcggcctgcccatggggaaacccatgggacgctctaatacagacatggtgcgaagagtctattgagctagttggtagtcctccggcccctgaatgcggctaatcctaactgcggagcacacaccctcaagccagagggcagtgtgtcgtaacgggcaactctgcagcggaaccgactactttgggtgtccgtgtttcattttattcctatactggctgcttatggtgacaattgagagatcgttaccatatagctattggattggccatccggtgactaatagagctattatatatccctttgttgggtttataccacttagcttgaaagaggttaaaacattacaattcattgttaagttgaatacagcaaaatggaagatgccaagaacatcaagaagggccctgctccattctaccctctggaagatggaacagccggcgagcagctgcacaaggccatgaagagatatgccctggtgcctggcacaatcgccttcacagatgcccacatcgaggtggacatcacctacgccgagtacttcgagatgtctgtgcggctggccgaagctatgaagcgctacggcctgaacaccaaccaccggatcgtcgtgtgcagcgagaacagcctgcagttcttcatgcctgtgctgggcgccctgttcatcggagttgctgtggcccctgccaacgacatctacaacgagcgcgagctgctgaacagcatgggcatctctcagcccaccgtggtgttcgtgtccaagaagggactgcagaaaatcctgaacgtgcagaagaagctgcccatcatccagaaaatcatcatcatggacagcaagaccgactaccagggcttccagagcatgtacaccttcgtgaccagccatctgccacctggcttcaacgagtacgacttcgtgcccgagagcttcgaccgggacaagacaatcgccctgatcatgaacagcagcggctctaccggactgcccaaaggtgttgccctgcctcatagaactgcctgcgtgcggtttagccacgccagagatcccatcttcggcaaccagatcatccccgacacagccatcctgagcgtggtgccttttcaccacggcttcggcatgttcaccacactgggctacctgatctgcggcttcagagtggtgctgatgtaccgcttcgaggaagaactgttcctgcggagcctgcaggactacaagatccagtctgctctgctggtgcctactctgttcagcttctttgccaagagcaccctgatcgataagtacgacctgagcaacctgcacgagatcgcctctggcggagcccctctgtctaaagaagtgggagaagccgtcgccaagcggttccatctgcctggcatcagacaaggctatggcctgaccgagacaaccagcgccattctgattacccctgagggcgacgataagcctggcgctgtgggaaaagtggtgccattcttcgaggccaaggtggtggatctggacaccggcaaaacactgggcgttaaccagaggggcgagctgtgtgttagaggccctatgatcatgagcggctacgtgaacaaccccgaggccacaaacgctctgatcgacaaggatggatggctgcacagcggcgacattgcctactgggacgaagatgagcacttcttcatcgtggaccggctgaagtccctgatcaagtacaagggctaccaggtggccccagccgagctggaatctattctgctgcaacaccccaacatcttcgatgccggcgttgcaggactgcccgatgatgatgctggcgaactgccagctgctgtggtggtgctggaacacggcaagaccatgaccgagaaagaaatcgtggactacgtggccagccaagtgaccaccgccaagaaactgagaggcggcgtggtgtttgtggacgaggtgccaaaaggcctgacaggcaagctggacgcccggaagatcagagagatcctgattaaggccaagaaaggcggcaagatcgccgtgtaatagctaactagacaaaacaccaaacaaacaagctgcgagccacggacttaaaaaaaacaaccaaaaaaaatctagatatcggatcccggg

SEQ ID NO: 3233 - DNA, 2831 bp, synthetic construct
  source 1..2831: mol_type = other DNA; note = Ana1.12
taatacgactcactatagggagaccctcgaaaaaaaacacaaacaccaattgagccttaaagaagaaattctttaagtggatgctctcaaactcagggaaacctaaatctagttatagacaaggcaatcctgagccaagccgaagtagtaattagtaagttaacaatagatgacttacaactaatcggaaggtgcagagactcgacgggagctaccctaacgtcaagacgagggtaaagagagagtccaattctcaaagccaataggcagtagcgaaagctgcaagagaatgaaaatccgtggctcgcagcaaacaccaaacaaaacaaacacaaaccaacaaaaattaaaacagcctgtgggttgatcccacccacaggcccattgggcgctagcactctggtatcacggtacctttgtgcgcctgttttataccccctcccccaactgtaacttagaagtaacacacaccgatcaacagtcagcgtggcacaccagccacgttttgatcaagcacttctgttaccccggactgagtatcaatagactgctcacgcggttgaaggagaaagcgttcgttatccggccaactacttcgaaaaacctagtaacaccgtggaagttgcagagtgtttcgctcagcactaccccagtgtagatcaggtcgatgagtcaccgcattccccacgggcgaccgtggcggtggctgcgttggcggcctgcccatggggaaacccatgggacgctctaatacagacatggtgcgaagagtctattgagctagttggtagtcctccggcccctgaatgcggctaatcctaactgcggagcacacaccctcaagccagagggcagtgtgtcgtaacgggcaactctgcagcggaaccgactactttgggtgtccgtgtttcattttattcctatactggctgcttatggtgacaattgagagatcgttaccatatagctattggattggccatccggtgactaatagagctattatatatccctttgttgggtttataccacttagcttgaaagaggttaaaacattacaattcattgttaagttgaatacagcaaaatggaagatgccaagaacatcaagaagggccctgctccattctaccctctggaagatggaacagccggcgagcagctgcacaaggccatgaagagatatgccctggtgcctggcacaatcgccttcacagatgcccacatcgaggtggacatcacctacgccgagtacttcgagatgtctgtgcggctggccgaagctatgaagcgctacggcctgaacaccaaccaccggatcgtcgtgtgcagcgagaacagcctgcagttcttcatgcctgtgctgggcgccctgttcatcggagttgctgtggcccctgccaacgacatctacaacgagcgcgagctgctgaacagcatgggcatctctcagcccaccgtggtgttcgtgtccaagaagggactgcagaaaatcctgaacgtgcagaagaagctgcccatcatccagaaaatcatcatcatggacagcaagaccgactaccagggcttccagagcatgtacaccttcgtgaccagccatctgccacctggcttcaacgagtacgacttcgtgcccgagagcttcgaccgggacaagacaatcgccctgatcatgaacagcagcggctctaccggactgcccaaaggtgttgccctgcctcatagaactgcctgcgtgcggtttagccacgccagagatcccatcttcggcaaccagatcatccccgacacagccatcctgagcgtggtgccttttcaccacggcttcggcatgttcaccacactgggctacctgatctgcggcttcagagtggtgctgatgtaccgcttcgaggaagaactgttcctgcggagcctgcaggactacaagatccagtctgctctgctggtgcctactctgttcagcttctttgccaagagcaccctgatcgataagtacgacctgagcaacctgcacgagatcgcctctggcggagcccctctgtctaaagaagtgggagaagccgtcgccaagcggttccatctgcctggcatcagacaaggctatggcctgaccgagacaaccagcgccattctgattacccctgagggcgacgataagcctggcgctgtgggaaaagtggtgccattcttcgaggccaaggtggtggatctggacaccggcaaaacactgggcgttaaccagaggggcgagctgtgtgttagaggccctatgatcatgagcggctacgtgaacaaccccgaggccacaaacgctctgatcgacaaggatggatggctgcacagcggcgacattgcctactgggacgaagatgagcacttcttcatcgtggaccggctgaagtccctgatcaagtacaagggctaccaggtggccccagccgagctggaatctattctgctgcaacaccccaacatcttcgatgccggcgttgcaggactgcccgatgatgatgctggcgaactgccagctgctgtggtggtgctggaacacggcaagaccatgaccgagaaagaaatcgtggactacgtggccagccaagtgaccaccgccaagaaactgagaggcggcgtggtgtttgtggacgaggtgccaaaaggcctgacaggcaagctggacgcccggaagatcagagagatcctgattaaggccaagaaaggcggcaagatcgccgtgtaatagctaactagacaaaacaccaaacaaacaagctgcgagccacggacttaaataaaaacaaccaaaaaaaatctagatatcggatcccggg

SEQ ID NO: 3234 - DNA, 2831 bp, synthetic construct
  source 1..2831: mol_type = other DNA; note = Ana1.13
taatacgactcactatagggagaccctcgaaaaaaaacacaaacaccattgagccttaaagaagaaattctttaagtggatgctctcaaactcagggaaacctaaatctagttatagacaaggcaatcctgagccaagccgaagtagtaattagtaagttaacaatagatgacttacaactaatcggaaggtgcagagactcgacgggagctaccctaacgtcaagacgagggtaaagagagagtccaattctcaaagccaataggcagtagcgaaagctgcaagagaatgaaaatccgtggctcgcagcaaacaccaaacaaaacaaacacaaaccaacaaaaattaaaacagcctgtgggttgatcccacccacaggcccattgggcgctagcactctggtatcacggtacctttgtgcgcctgttttataccccctcccccaactgtaacttagaagtaacacacaccgatcaacagtcagcgtggcacaccagccacgttttgatcaagcacttctgttaccccggactgagtatcaatagactgctcacgcggttgaaggagaaagcgttcgttatccggccaactacttcgaaaaacctagtaacaccgtggaagttgcagagtgtttcgctcagcactaccccagtgtagatcaggtcgatgagtcaccgcattccccacgggcgaccgtggcggtggctgcgttggcggcctgcccatggggaaacccatgggacgctctaatacagacatggtgcgaagagtctattgagctagttggtagtcctccggcccctgaatgcggctaatcctaactgcggagcacacaccctcaagccagagggcagtgtgtcgtaacgggcaactctgcagcggaaccgactactttgggtgtccgtgtttcattttattcctatactggctgcttatggtgacaattgagagatcgttaccatatagctattggattggccatccggtgactaatagagctattatatatccctttgttgggtttataccacttagcttgaaagaggttaaaacattacaattcattgttaagttgaatacagcaaaatggaagatgccaagaacatcaagaagggccctgctccattctaccctctggaagatggaacagccggcgagcagctgcacaaggccatgaagagatatgccctggtgcctggcacaatcgccttcacagatgcccacatcgaggtggacatcacctacgccgagtacttcgagatgtctgtgcggctggccgaagctatgaagcgctacggcctgaacaccaaccaccggatcgtcgtgtgcagcgagaacagcctgcagttcttcatgcctgtgctgggcgccctgttcatcggagttgctgtggcccctgccaacgacatctacaacgagcgcgagctgctgaacagcatgggcatctctcagcccaccgtggtgttcgtgtccaagaagggactgcagaaaatcctgaacgtgcagaagaagctgcccatcatccagaaaatcatcatcatggacagcaagaccgactaccagggcttccagagcatgtacaccttcgtgaccagccatctgccacctggcttcaacgagtacgacttcgtgcccgagagcttcgaccgggacaagacaatcgccctgatcatgaacagcagcggctctaccggactgcccaaaggtgttgccctgcctcatagaactgcctgcgtgcggtttagccacgccagagatcccatcttcggcaaccagatcatccccgacacagccatcctgagcgtggtgccttttcaccacggcttcggcatgttcaccacactgggctacctgatctgcggcttcagagtggtgctgatgtaccgcttcgaggaagaactgttcctgcggagcctgcaggactacaagatccagtctgctctgctggtgcctactctgttcagcttctttgccaagagcaccctgatcgataagtacgacctgagcaacctgcacgagatcgcctctggcggagcccctctgtctaaagaagtgggagaagccgtcgccaagcggttccatctgcctggcatcagacaaggctatggcctgaccgagacaaccagcgccattctgattacccctgagggcgacgataagcctggcgctgtgggaaaagtggtgccattcttcgaggccaaggtggtggatctggacaccggcaaaacactgggcgttaaccagaggggcgagctgtgtgttagaggccctatgatcatgagcggctacgtgaacaaccccgaggccacaaacgctctgatcgacaaggatggatggctgcacagcggcgacattgcctactgggacgaagatgagcacttcttcatcgtggaccggctgaagtccctgatcaagtacaagggctaccaggtggccccagccgagctggaatctattctgctgcaacaccccaacatcttcgatgccggcgttgcaggactgcccgatgatgatgctggcgaactgccagctgctgtggtggtgctggaacacggcaagaccatgaccgagaaagaaatcgtggactacgtggccagccaagtgaccaccgccaagaaactgagaggcggcgtggtgtttgtggacgaggtgccaaaaggcctgacaggcaagctggacgcccggaagatcagagagatcctgattaaggccaagaaaggcggcaagatcgccgtgtaatagctaactagacaaaacaccaaacaaacaagctgcgagccacggacttaaataaaaaacaaccaaaaaaaatctagatatcggatcccggg

SEQ ID NO: 3235 - DNA, 2831 bp, synthetic construct
  source 1..2831: mol_type = other DNA; note = Ana1.14
taatacgactcactatagggagaccctcgaaaaaaaacacaaacaccttgagccttaaagaagaaattctttaagtggatgctctcaaactcagggaaacctaaatctagttatagacaaggcaatcctgagccaagccgaagtagtaattagtaagttaacaatagatgacttacaactaatcggaaggtgcagagactcgacgggagctaccctaacgtcaagacgagggtaaagagagagtccaattctcaaagccaataggcagtagcgaaagctgcaagagaatgaaaatccgtggctcgcagcaaacaccaaacaaaacaaacacaaaccaacaaaaattaaaacagcctgtgggttgatcccacccacaggcccattgggcgctagcactctggtatcacggtacctttgtgcgcctgttttataccccctcccccaactgtaacttagaagtaacacacaccgatcaacagtcagcgtggcacaccagccacgttttgatcaagcacttctgttaccccggactgagtatcaatagactgctcacgcggttgaaggagaaagcgttcgttatccggccaactacttcgaaaaacctagtaacaccgtggaagttgcagagtgtttcgctcagcactaccccagtgtagatcaggtcgatgagtcaccgcattccccacgggcgaccgtggcggtggctgcgttggcggcctgcccatggggaaacccatgggacgctctaatacagacatggtgcgaagagtctattgagctagttggtagtcctccggcccctgaatgcggctaatcctaactgcggagcacacaccctcaagccagagggcagtgtgtcgtaacgggcaactctgcagcggaaccgactactttgggtgtccgtgtttcattttattcctatactggctgcttatggtgacaattgagagatcgttaccatatagctattggattggccatccggtgactaatagagctattatatatccctttgttgggtttataccacttagcttgaaagaggttaaaacattacaattcattgttaagttgaatacagcaaaatggaagatgccaagaacatcaagaagggccctgctccattctaccctctggaagatggaacagccggcgagcagctgcacaaggccatgaagagatatgccctggtgcctggcacaatcgccttcacagatgcccacatcgaggtggacatcacctacgccgagtacttcgagatgtctgtgcggctggccgaagctatgaagcgctacggcctgaacaccaaccaccggatcgtcgtgtgcagcgagaacagcctgcagttcttcatgcctgtgctgggcgccctgttcatcggagttgctgtggcccctgccaacgacatctacaacgagcgcgagctgctgaacagcatgggcatctctcagcccaccgtggtgttcgtgtccaagaagggactgcagaaaatcctgaacgtgcagaagaagctgcccatcatccagaaaatcatcatcatggacagcaagaccgactaccagggcttccagagcatgtacaccttcgtgaccagccatctgccacctggcttcaacgagtacgacttcgtgcccgagagcttcgaccgggacaagacaatcgccctgatcatgaacagcagcggctctaccggactgcccaaaggtgttgccctgcctcatagaactgcctgcgtgcggtttagccacgccagagatcccatcttcggcaaccagatcatccccgacacagccatcctgagcgtggtgccttttcaccacggcttcggcatgttcaccacactgggctacctgatctgcggcttcagagtggtgctgatgtaccgcttcgaggaagaactgttcctgcggagcctgcaggactacaagatccagtctgctctgctggtgcctactctgttcagcttctttgccaagagcaccctgatcgataagtacgacctgagcaacctgcacgagatcgcctctggcggagcccctctgtctaaagaagtgggagaagccgtcgccaagcggttccatctgcctggcatcagacaaggctatggcctgaccgagacaaccagcgccattctgattacccctgagggcgacgataagcctggcgctgtgggaaaagtggtgccattcttcgaggccaaggtggtggatctggacaccggcaaaacactgggcgttaaccagaggggcgagctgtgtgttagaggccctatgatcatgagcggctacgtgaacaaccccgaggccacaaacgctctgatcgacaaggatggatggctgcacagcggcgacattgcctactgggacgaagatgagcacttcttcatcgtggaccggctgaagtccctgatcaagtacaagggctaccaggtggccccagccgagctggaatctattctgctgcaacaccccaacatcttcgatgccggcgttgcaggactgcccgatgatgatgctggcgaactgccagctgctgtggtggtgctggaacacggcaagaccatgaccgagaaagaaatcgtggactacgtggccagccaagtgaccaccgccaagaaactgagaggcggcgtggtgtttgtggacgaggtgccaaaaggcctgacaggcaagctggacgcccggaagatcagagagatcctgattaaggccaagaaaggcggcaagatcgccgtgtaatagctaactagacaaaacaccaaacaaacaagctgcgagccacggacttaaataaaaaaacaaccaaaaaaaatctagatatcggatcccggg

SEQ ID NO: 3236 - DNA, 2831 bp, synthetic construct
  source 1..2831: mol_type = other DNA; note = Ana1.15
taatacgactcactatagggagaccctcgaaaaaaaacacaaacacctgagccttaaagaagaaattctttaagtggatgctctcaaactcagggaaacctaaatctagttatagacaaggcaatcctgagccaagccgaagtagtaattagtaagttaacaatagatgacttacaactaatcggaaggtgcagagactcgacgggagctaccctaacgtcaagacgagggtaaagagagagtccaattctcaaagccaataggcagtagcgaaagctgcaagagaatgaaaatccgtggctcgcagcaaacaccaaacaaaacaaacacaaaccaacaaaaattaaaacagcctgtgggttgatcccacccacaggcccattgggcgctagcactctggtatcacggtacctttgtgcgcctgttttataccccctcccccaactgtaacttagaagtaacacacaccgatcaacagtcagcgtggcacaccagccacgttttgatcaagcacttctgttaccccggactgagtatcaatagactgctcacgcggttgaaggagaaagcgttcgttatccggccaactacttcgaaaaacctagtaacaccgtggaagttgcagagtgtttcgctcagcactaccccagtgtagatcaggtcgatgagtcaccgcattccccacgggcgaccgtggcggtggctgcgttggcggcctgcccatggggaaacccatgggacgctctaatacagacatggtgcgaagagtctattgagctagttggtagtcctccggcccctgaatgcggctaatcctaactgcggagcacacaccctcaagccagagggcagtgtgtcgtaacgggcaactctgcagcggaaccgactactttgggtgtccgtgtttcattttattcctatactggctgcttatggtgacaattgagagatcgttaccatatagctattggattggccatccggtgactaatagagctattatatatccctttgttgggtttataccacttagcttgaaagaggttaaaacattacaattcattgttaagttgaatacagcaaaatggaagatgccaagaacatcaagaagggccctgctccattctaccctctggaagatggaacagccggcgagcagctgcacaaggccatgaagagatatgccctggtgcctggcacaatcgccttcacagatgcccacatcgaggtggacatcacctacgccgagtacttcgagatgtctgtgcggctggccgaagctatgaagcgctacggcctgaacaccaaccaccggatcgtcgtgtgcagcgagaacagcctgcagttcttcatgcctgtgctgggcgccctgttcatcggagttgctgtggcccctgccaacgacatctacaacgagcgcgagctgctgaacagcatgggcatctctcagcccaccgtggtgttcgtgtccaagaagggactgcagaaaatcctgaacgtgcagaagaagctgcccatcatccagaaaatcatcatcatggacagcaagaccgactaccagggcttccagagcatgtacaccttcgtgaccagccatctgccacctggcttcaacgagtacgacttcgtgcccgagagcttcgaccgggacaagacaatcgccctgatcatgaacagcagcggctctaccggactgcccaaaggtgttgccctgcctcatagaactgcctgcgtgcggtttagccacgccagagatcccatcttcggcaaccagatcatccccgacacagccatcctgagcgtggtgccttttcaccacggcttcggcatgttcaccacactgggctacctgatctgcggcttcagagtggtgctgatgtaccgcttcgaggaagaactgttcctgcggagcctgcaggactacaagatccagtctgctctgctggtgcctactctgttcagcttctttgccaagagcaccctgatcgataagtacgacctgagcaacctgcacgagatcgcctctggcggagcccctctgtctaaagaagtgggagaagccgtcgccaagcggttccatctgcctggcatcagacaaggctatggcctgaccgagacaaccagcgccattctgattacccctgagggcgacgataagcctggcgctgtgggaaaagtggtgccattcttcgaggccaaggtggtggatctggacaccggcaaaacactgggcgttaaccagaggggcgagctgtgtgttagaggccctatgatcatgagcggctacgtgaacaaccccgaggccacaaacgctctgatcgacaaggatggatggctgcacagcggcgacattgcctactgggacgaagatgagcacttcttcatcgtggaccggctgaagtccctgatcaagtacaagggctaccaggtggccccagccgagctggaatctattctgctgcaacaccccaacatcttcgatgccggcgttgcaggactgcccgatgatgatgctggcgaactgccagctgctgtggtggtgctggaacacggcaagaccatgaccgagaaagaaatcgtggactacgtggccagccaagtgaccaccgccaagaaactgagaggcggcgtggtgtttgtggacgaggtgccaaaaggcctgacaggcaagctggacgcccggaagatcagagagatcctgattaaggccaagaaaggcggcaagatcgccgtgtaatagctaactagacaaaacaccaaacaaacaagctgcgagccacggacttaaataataaaaacaaccaaaaaaaatctagatatcggatcccggg

SEQ ID NO: 3237 - DNA, 2831 bp, synthetic construct
  source 1..2831: mol_type = other DNA; note = Ana1.16
taatacgactcactatagggagaccctcgaaaaaaaacacaaacaccgagccttaaagaagaaattctttaagtggatgctctcaaactcagggaaacctaaatctagttatagacaaggcaatcctgagccaagccgaagtagtaattagtaagttaacaatagatgacttacaactaatcggaaggtgcagagactcgacgggagctaccctaacgtcaagacgagggtaaagagagagtccaattctcaaagccaataggcagtagcgaaagctgcaagagaatgaaaatccgtggctcgcagcaaacaccaaacaaaacaaacacaaaccaacaaaaattaaaacagcctgtgggttgatcccacccacaggcccattgggcgctagcactctggtatcacggtacctttgtgcgcctgttttataccccctcccccaactgtaacttagaagtaacacacaccgatcaacagtcagcgtggcacaccagccacgttttgatcaagcacttctgttaccccggactgagtatcaatagactgctcacgcggttgaaggagaaagcgttcgttatccggccaactacttcgaaaaacctagtaacaccgtggaagttgcagagtgtttcgctcagcactaccccagtgtagatcaggtcgatgagtcaccgcattccccacgggcgaccgtggcggtggctgcgttggcggcctgcccatggggaaacccatgggacgctctaatacagacatggtgcgaagagtctattgagctagttggtagtcctccggcccctgaatgcggctaatcctaactgcggagcacacaccctcaagccagagggcagtgtgtcgtaacgggcaactctgcagcggaaccgactactttgggtgtccgtgtttcattttattcctatactggctgcttatggtgacaattgagagatcgttaccatatagctattggattggccatccggtgactaatagagctattatatatccctttgttgggtttataccacttagcttgaaagaggttaaaacattacaattcattgttaagttgaatacagcaaaatggaagatgccaagaacatcaagaagggccctgctccattctaccctctggaagatggaacagccggcgagcagctgcacaaggccatgaagagatatgccctggtgcctggcacaatcgccttcacagatgcccacatcgaggtggacatcacctacgccgagtacttcgagatgtctgtgcggctggccgaagctatgaagcgctacggcctgaacaccaaccaccggatcgtcgtgtgcagcgagaacagcctgcagttcttcatgcctgtgctgggcgccctgttcatcggagttgctgtggcccctgccaacgacatctacaacgagcgcgagctgctgaacagcatgggcatctctcagcccaccgtggtgttcgtgtccaagaagggactgcagaaaatcctgaacgtgcagaagaagctgcccatcatccagaaaatcatcatcatggacagcaagaccgactaccagggcttccagagcatgtacaccttcgtgaccagccatctgccacctggcttcaacgagtacgacttcgtgcccgagagcttcgaccgggacaagacaatcgccctgatcatgaacagcagcggctctaccggactgcccaaaggtgttgccctgcctcatagaactgcctgcgtgcggtttagccacgccagagatcccatcttcggcaaccagatcatccccgacacagccatcctgagcgtggtgccttttcaccacggcttcggcatgttcaccacactgggctacctgatctgcggcttcagagtggtgctgatgtaccgcttcgaggaagaactgttcctgcggagcctgcaggactacaagatccagtctgctctgctggtgcctactctgttcagcttctttgccaagagcaccctgatcgataagtacgacctgagcaacctgcacgagatcgcctctggcggagcccctctgtctaaagaagtgggagaagccgtcgccaagcggttccatctgcctggcatcagacaaggctatggcctgaccgagacaaccagcgccattctgattacccctgagggcgacgataagcctggcgctgtgggaaaagtggtgccattcttcgaggccaaggtggtggatctggacaccggcaaaacactgggcgttaaccagaggggcgagctgtgtgttagaggccctatgatcatgagcggctacgtgaacaaccccgaggccacaaacgctctgatcgacaaggatggatggctgcacagcggcgacattgcctactgggacgaagatgagcacttcttcatcgtggaccggctgaagtccctgatcaagtacaagggctaccaggtggccccagccgagctggaatctattctgctgcaacaccccaacatcttcgatgccggcgttgcaggactgcccgatgatgatgctggcgaactgccagctgctgtggtggtgctggaacacggcaagaccatgaccgagaaagaaatcgtggactacgtggccagccaagtgaccaccgccaagaaactgagaggcggcgtggtgtttgtggacgaggtgccaaaaggcctgacaggcaagctggacgcccggaagatcagagagatcctgattaaggccaagaaaggcggcaagatcgccgtgtaatagctaactagacaaaacaccaaacaaacaagctgcgagccacggacttaaataattaaaaacaaccaaaaaaaatctagatatcggatcccggg

SEQ ID NO: 3238 - DNA, 2831 bp, synthetic construct
  source 1..2831: mol_type = other DNA; note = Ana1.17
taatacgactcactatagggagaccctcgaaaaaaaacacaaacaccagccttaaagaagaaattctttaagtggatgctctcaaactcagggaaacctaaatctagttatagacaaggcaatcctgagccaagccgaagtagtaattagtaagttaacaatagatgacttacaactaatcggaaggtgcagagactcgacgggagctaccctaacgtcaagacgagggtaaagagagagtccaattctcaaagccaataggcagtagcgaaagctgcaagagaatgaaaatccgtggctcgcagcaaacaccaaacaaaacaaacacaaaccaacaaaaattaaaacagcctgtgggttgatcccacccacaggcccattgggcgctagcactctggtatcacggtacctttgtgcgcctgttttataccccctcccccaactgtaacttagaagtaacacacaccgatcaacagtcagcgtggcacaccagccacgttttgatcaagcacttctgttaccccggactgagtatcaatagactgctcacgcggttgaaggagaaagcgttcgttatccggccaactacttcgaaaaacctagtaacaccgtggaagttgcagagtgtttcgctcagcactaccccagtgtagatcaggtcgatgagtcaccgcattccccacgggcgaccgtggcggtggctgcgttggcggcctgcccatggggaaacccatgggacgctctaatacagacatggtgcgaagagtctattgagctagttggtagtcctccggcccctgaatgcggctaatcctaactgcggagcacacaccctcaagccagagggcagtgtgtcgtaacgggcaactctgcagcggaaccgactactttgggtgtccgtgtttcattttattcctatactggctgcttatggtgacaattgagagatcgttaccatatagctattggattggccatccggtgactaatagagctattatatatccctttgttgggtttataccacttagcttgaaagaggttaaaacattacaattcattgttaagttgaatacagcaaaatggaagatgccaagaacatcaagaagggccctgctccattctaccctctggaagatggaacagccggcgagcagctgcacaaggccatgaagagatatgccctggtgcctggcacaatcgccttcacagatgcccacatcgaggtggacatcacctacgccgagtacttcgagatgtctgtgcggctggccgaagctatgaagcgctacggcctgaacaccaaccaccggatcgtcgtgtgcagcgagaacagcctgcagttcttcatgcctgtgctgggcgccctgttcatcggagttgctgtggcccctgccaacgacatctacaacgagcgcgagctgctgaacagcatgggcatctctcagcccaccgtggtgttcgtgtccaagaagggactgcagaaaatcctgaacgtgcagaagaagctgcccatcatccagaaaatcatcatcatggacagcaagaccgactaccagggcttccagagcatgtacaccttcgtgaccagccatctgccacctggcttcaacgagtacgacttcgtgcccgagagcttcgaccgggacaagacaatcgccctgatcatgaacagcagcggctctaccggactgcccaaaggtgttgccctgcctcatagaactgcctgcgtgcggtttagccacgccagagatcccatcttcggcaaccagatcatccccgacacagccatcctgagcgtggtgccttttcaccacggcttcggcatgttcaccacactgggctacctgatctgcggcttcagagtggtgctgatgtaccgcttcgaggaagaactgttcctgcggagcctgcaggactacaagatccagtctgctctgctggtgcctactctgttcagcttctttgccaagagcaccctgatcgataagtacgacctgagcaacctgcacgagatcgcctctggcggagcccctctgtctaaagaagtgggagaagccgtcgccaagcggttccatctgcctggcatcagacaaggctatggcctgaccgagacaaccagcgccattctgattacccctgagggcgacgataagcctggcgctgtgggaaaagtggtgccattcttcgaggccaaggtggtggatctggacaccggcaaaacactgggcgttaaccagaggggcgagctgtgtgttagaggccctatgatcatgagcggctacgtgaacaaccccgaggccacaaacgctctgatcgacaaggatggatggctgcacagcggcgacattgcctactgggacgaagatgagcacttcttcatcgtggaccggctgaagtccctgatcaagtacaagggctaccaggtggccccagccgagctggaatctattctgctgcaacaccccaacatcttcgatgccggcgttgcaggactgcccgatgatgatgctggcgaactgccagctgctgtggtggtgctggaacacggcaagaccatgaccgagaaagaaatcgtggactacgtggccagccaagtgaccaccgccaagaaactgagaggcggcgtggtgtttgtggacgaggtgccaaaaggcctgacaggcaagctggacgcccggaagatcagagagatcctgattaaggccaagaaaggcggcaagatcgccgtgtaatagctaactagacaaaacaccaaacaaacaagctgcgagccacggacttaaataattgaaaaacaaccaaaaaaaatctagatatcggatcccggg

SEQ ID NO: 3239 - DNA, 2831 bp, synthetic construct
  source 1..2831: mol_type = other DNA; note = Ana1.18
taatacgactcactatagggagaccctcgaaaaaaaacacaaacaccgccttaaagaagaaattctttaagtggatgctctcaaactcagggaaacctaaatctagttatagacaaggcaatcctgagccaagccgaagtagtaattagtaagttaacaatagatgacttacaactaatcggaaggtgcagagactcgacgggagctaccctaacgtcaagacgagggtaaagagagagtccaattctcaaagccaataggcagtagcgaaagctgcaagagaatgaaaatccgtggctcgcagcaaacaccaaacaaaacaaacacaaaccaacaaaaattaaaacagcctgtgggttgatcccacccacaggcccattgggcgctagcactctggtatcacggtacctttgtgcgcctgttttataccccctcccccaactgtaacttagaagtaacacacaccgatcaacagtcagcgtggcacaccagccacgttttgatcaagcacttctgttaccccggactgagtatcaatagactgctcacgcggttgaaggagaaagcgttcgttatccggccaactacttcgaaaaacctagtaacaccgtggaagttgcagagtgtttcgctcagcactaccccagtgtagatcaggtcgatgagtcaccgcattccccacgggcgaccgtggcggtggctgcgttggcggcctgcccatggggaaacccatgggacgctctaatacagacatggtgcgaagagtctattgagctagttggtagtcctccggcccctgaatgcggctaatcctaactgcggagcacacaccctcaagccagagggcagtgtgtcgtaacgggcaactctgcagcggaaccgactactttgggtgtccgtgtttcattttattcctatactggctgcttatggtgacaattgagagatcgttaccatatagctattggattggccatccggtgactaatagagctattatatatccctttgttgggtttataccacttagcttgaaagaggttaaaacattacaattcattgttaagttgaatacagcaaaatggaagatgccaagaacatcaagaagggccctgctccattctaccctctggaagatggaacagccggcgagcagctgcacaaggccatgaagagatatgccctggtgcctggcacaatcgccttcacagatgcccacatcgaggtggacatcacctacgccgagtacttcgagatgtctgtgcggctggccgaagctatgaagcgctacggcctgaacaccaaccaccggatcgtcgtgtgcagcgagaacagcctgcagttcttcatgcctgtgctgggcgccctgttcatcggagttgctgtggcccctgccaacgacatctacaacgagcgcgagctgctgaacagcatgggcatctctcagcccaccgtggtgttcgtgtccaagaagggactgcagaaaatcctgaacgtgcagaagaagctgcccatcatccagaaaatcatcatcatggacagcaagaccgactaccagggcttccagagcatgtacaccttcgtgaccagccatctgccacctggcttcaacgagtacgacttcgtgcccgagagcttcgaccgggacaagacaatcgccctgatcatgaacagcagcggctctaccggactgcccaaaggtgttgccctgcctcatagaactgcctgcgtgcggtttagccacgccagagatcccatcttcggcaaccagatcatccccgacacagccatcctgagcgtggtgccttttcaccacggcttcggcatgttcaccacactgggctacctgatctgcggcttcagagtggtgctgatgtaccgcttcgaggaagaactgttcctgcggagcctgcaggactacaagatccagtctgctctgctggtgcctactctgttcagcttctttgccaagagcaccctgatcgataagtacgacctgagcaacctgcacgagatcgcctctggcggagcccctctgtctaaagaagtgggagaagccgtcgccaagcggttccatctgcctggcatcagacaaggctatggcctgaccgagacaaccagcgccattctgattacccctgagggcgacgataagcctggcgctgtgggaaaagtggtgccattcttcgaggccaaggtggtggatctggacaccggcaaaacactgggcgttaaccagaggggcgagctgtgtgttagaggccctatgatcatgagcggctacgtgaacaaccccgaggccacaaacgctctgatcgacaaggatggatggctgcacagcggcgacattgcctactgggacgaagatgagcacttcttcatcgtggaccggctgaagtccctgatcaagtacaagggctaccaggtggccccagccgagctggaatctattctgctgcaacaccccaacatcttcgatgccggcgttgcaggactgcccgatgatgatgctggcgaactgccagctgctgtggtggtgctggaacacggcaagaccatgaccgagaaagaaatcgtggactacgtggccagccaagtgaccaccgccaagaaactgagaggcggcgtggtgtttgtggacgaggtgccaaaaggcctgacaggcaagctggacgcccggaagatcagagagatcctgattaaggccaagaaaggcggcaagatcgccgtgtaatagctaactagacaaaacaccaaacaaacaagctgcgagccacggacttaaataattgaaaaaacaaccaaaaaaaatctagatatcggatcccggg

SEQ ID NO: 3240 - DNA, 2831 bp, synthetic construct
  source 1..2831: mol_type = other DNA; note = Ana1.19
taatacgactcactatagggagaccctcgaaaaaaaacacaaacaccccttaaagaagaaattctttaagtggatgctctcaaactcagggaaacctaaatctagttatagacaaggcaatcctgagccaagccgaagtagtaattagtaagttaacaatagatgacttacaactaatcggaaggtgcagagactcgacgggagctaccctaacgtcaagacgagggtaaagagagagtccaattctcaaagccaataggcagtagcgaaagctgcaagagaatgaaaatccgtggctcgcagcaaacaccaaacaaaacaaacacaaaccaacaaaaattaaaacagcctgtgggttgatcccacccacaggcccattgggcgctagcactctggtatcacggtacctttgtgcgcctgttttataccccctcccccaactgtaacttagaagtaacacacaccgatcaacagtcagcgtggcacaccagccacgttttgatcaagcacttctgttaccccggactgagtatcaatagactgctcacgcggttgaaggagaaagcgttcgttatccggccaactacttcgaaaaacctagtaacaccgtggaagttgcagagtgtttcgctcagcactaccccagtgtagatcaggtcgatgagtcaccgcattccccacgggcgaccgtggcggtggctgcgttggcggcctgcccatggggaaacccatgggacgctctaatacagacatggtgcgaagagtctattgagctagttggtagtcctccggcccctgaatgcggctaatcctaactgcggagcacacaccctcaagccagagggcagtgtgtcgtaacgggcaactctgcagcggaaccgactactttgggtgtccgtgtttcattttattcctatactggctgcttatggtgacaattgagagatcgttaccatatagctattggattggccatccggtgactaatagagctattatatatccctttgttgggtttataccacttagcttgaaagaggttaaaacattacaattcattgttaagttgaatacagcaaaatggaagatgccaagaacatcaagaagggccctgctccattctaccctctggaagatggaacagccggcgagcagctgcacaaggccatgaagagatatgccctggtgcctggcacaatcgccttcacagatgcccacatcgaggtggacatcacctacgccgagtacttcgagatgtctgtgcggctggccgaagctatgaagcgctacggcctgaacaccaaccaccggatcgtcgtgtgcagcgagaacagcctgcagttcttcatgcctgtgctgggcgccctgttcatcggagttgctgtggcccctgccaacgacatctacaacgagcgcgagctgctgaacagcatgggcatctctcagcccaccgtggtgttcgtgtccaagaagggactgcagaaaatcctgaacgtgcagaagaagctgcccatcatccagaaaatcatcatcatggacagcaagaccgactaccagggcttccagagcatgtacaccttcgtgaccagccatctgccacctggcttcaacgagtacgacttcgtgcccgagagcttcgaccgggacaagacaatcgccctgatcatgaacagcagcggctctaccggactgcccaaaggtgttgccctgcctcatagaactgcctgcgtgcggtttagccacgccagagatcccatcttcggcaaccagatcatccccgacacagccatcctgagcgtggtgccttttcaccacggcttcggcatgttcaccacactgggctacctgatctgcggcttcagagtggtgctgatgtaccgcttcgaggaagaactgttcctgcggagcctgcaggactacaagatccagtctgctctgctggtgcctactctgttcagcttctttgccaagagcaccctgatcgataagtacgacctgagcaacctgcacgagatcgcctctggcggagcccctctgtctaaagaagtgggagaagccgtcgccaagcggttccatctgcctggcatcagacaaggctatggcctgaccgagacaaccagcgccattctgattacccctgagggcgacgataagcctggcgctgtgggaaaagtggtgccattcttcgaggccaaggtggtggatctggacaccggcaaaacactgggcgttaaccagaggggcgagctgtgtgttagaggccctatgatcatgagcggctacgtgaacaaccccgaggccacaaacgctctgatcgacaaggatggatggctgcacagcggcgacattgcctactgggacgaagatgagcacttcttcatcgtggaccggctgaagtccctgatcaagtacaagggctaccaggtggccccagccgagctggaatctattctgctgcaacaccccaacatcttcgatgccggcgttgcaggactgcccgatgatgatgctggcgaactgccagctgctgtggtggtgctggaacacggcaagaccatgaccgagaaagaaatcgtggactacgtggccagccaagtgaccaccgccaagaaactgagaggcggcgtggtgtttgtggacgaggtgccaaaaggcctgacaggcaagctggacgcccggaagatcagagagatcctgattaaggccaagaaaggcggcaagatcgccgtgtaatagctaactagacaaaacaccaaacaaacaagctgcgagccacggacttaaataattgagaaaaacaaccaaaaaaaatctagatatcggatcccggg

SEQ ID NO: 3241 - DNA, 2831 bp, synthetic construct
  source 1..2831: mol_type = other DNA; note = Ana1.20
taatacgactcactatagggagaccctcgaaaaaaaacacaaacacccttaaagaagaaattctttaagtggatgctctcaaactcagggaaacctaaatctagttatagacaaggcaatcctgagccaagccgaagtagtaattagtaagttaacaatagatgacttacaactaatcggaaggtgcagagactcgacgggagctaccctaacgtcaagacgagggtaaagagagagtccaattctcaaagccaataggcagtagcgaaagctgcaagagaatgaaaatccgtggctcgcagcaaacaccaaacaaaacaaacacaaaccaacaaaaattaaaacagcctgtgggttgatcccacccacaggcccattgggcgctagcactctggtatcacggtacctttgtgcgcctgttttataccccctcccccaactgtaacttagaagtaacacacaccgatcaacagtcagcgtggcacaccagccacgttttgatcaagcacttctgttaccccggactgagtatcaatagactgctcacgcggttgaaggagaaagcgttcgttatccggccaactacttcgaaaaacctagtaacaccgtggaagttgcagagtgtttcgctcagcactaccccagtgtagatcaggtcgatgagtcaccgcattccccacgggcgaccgtggcggtggctgcgttggcggcctgcccatggggaaacccatgggacgctctaatacagacatggtgcgaagagtctattgagctagttggtagtcctccggcccctgaatgcggctaatcctaactgcggagcacacaccctcaagccagagggcagtgtgtcgtaacgggcaactctgcagcggaaccgactactttgggtgtccgtgtttcattttattcctatactggctgcttatggtgacaattgagagatcgttaccatatagctattggattggccatccggtgactaatagagctattatatatccctttgttgggtttataccacttagcttgaaagaggttaaaacattacaattcattgttaagttgaatacagcaaaatggaagatgccaagaacatcaagaagggccctgctccattctaccctctggaagatggaacagccggcgagcagctgcacaaggccatgaagagatatgccctggtgcctggcacaatcgccttcacagatgcccacatcgaggtggacatcacctacgccgagtacttcgagatgtctgtgcggctggccgaagctatgaagcgctacggcctgaacaccaaccaccggatcgtcgtgtgcagcgagaacagcctgcagttcttcatgcctgtgctgggcgccctgttcatcggagttgctgtggcccctgccaacgacatctacaacgagcgcgagctgctgaacagcatgggcatctctcagcccaccgtggtgttcgtgtccaagaagggactgcagaaaatcctgaacgtgcagaagaagctgcccatcatccagaaaatcatcatcatggacagcaagaccgactaccagggcttccagagcatgtacaccttcgtgaccagccatctgccacctggcttcaacgagtacgacttcgtgcccgagagcttcgaccgggacaagacaatcgccctgatcatgaacagcagcggctctaccggactgcccaaaggtgttgccctgcctcatagaactgcctgcgtgcggtttagccacgccagagatcccatcttcggcaaccagatcatccccgacacagccatcctgagcgtggtgccttttcaccacggcttcggcatgttcaccacactgggctacctgatctgcggcttcagagtggtgctgatgtaccgcttcgaggaagaactgttcctgcggagcctgcaggactacaagatccagtctgctctgctggtgcctactctgttcagcttctttgccaagagcaccctgatcgataagtacgacctgagcaacctgcacgagatcgcctctggcggagcccctctgtctaaagaagtgggagaagccgtcgccaagcggttccatctgcctggcatcagacaaggctatggcctgaccgagacaaccagcgccattctgattacccctgagggcgacgataagcctggcgctgtgggaaaagtggtgccattcttcgaggccaaggtggtggatctggacaccggcaaaacactgggcgttaaccagaggggcgagctgtgtgttagaggccctatgatcatgagcggctacgtgaacaaccccgaggccacaaacgctctgatcgacaaggatggatggctgcacagcggcgacattgcctactgggacgaagatgagcacttcttcatcgtggaccggctgaagtccctgatcaagtacaagggctaccaggtggccccagccgagctggaatctattctgctgcaacaccccaacatcttcgatgccggcgttgcaggactgcccgatgatgatgctggcgaactgccagctgctgtggtggtgctggaacacggcaagaccatgaccgagaaagaaatcgtggactacgtggccagccaagtgaccaccgccaagaaactgagaggcggcgtggtgtttgtggacgaggtgccaaaaggcctgacaggcaagctggacgcccggaagatcagagagatcctgattaaggccaagaaaggcggcaagatcgccgtgtaatagctaactagacaaaacaccaaacaaacaagctgcgagccacggacttaaataattgagcaaaaacaaccaaaaaaaatctagatatcggatcccggg

SEQ ID NO: 3242 - DNA, 2831 bp, synthetic construct
  source 1..2831: mol_type = other DNA; note = Ana1.21
taatacgactcactatagggagaccctcgaaaaaaaacacaaacaccttaaagaagaaattctttaagtggatgctctcaaactcagggaaacctaaatctagttatagacaaggcaatcctgagccaagccgaagtagtaattagtaagttaacaatagatgacttacaactaatcggaaggtgcagagactcgacgggagctaccctaacgtcaagacgagggtaaagagagagtccaattctcaaagccaataggcagtagcgaaagctgcaagagaatgaaaatccgtggctcgcagcaaacaccaaacaaaacaaacacaaaccaacaaaaattaaaacagcctgtgggttgatcccacccacaggcccattgggcgctagcactctggtatcacggtacctttgtgcgcctgttttataccccctcccccaactgtaacttagaagtaacacacaccgatcaacagtcagcgtggcacaccagccacgttttgatcaagcacttctgttaccccggactgagtatcaatagactgctcacgcggttgaaggagaaagcgttcgttatccggccaactacttcgaaaaacctagtaacaccgtggaagttgcagagtgtttcgctcagcactaccccagtgtagatcaggtcgatgagtcaccgcattccccacgggcgaccgtggcggtggctgcgttggcggcctgcccatggggaaacccatgggacgctctaatacagacatggtgcgaagagtctattgagctagttggtagtcctccggcccctgaatgcggctaatcctaactgcggagcacacaccctcaagccagagggcagtgtgtcgtaacgggcaactctgcagcggaaccgactactttgggtgtccgtgtttcattttattcctatactggctgcttatggtgacaattgagagatcgttaccatatagctattggattggccatccggtgactaatagagctattatatatccctttgttgggtttataccacttagcttgaaagaggttaaaacattacaattcattgttaagttgaatacagcaaaatggaagatgccaagaacatcaagaagggccctgctccattctaccctctggaagatggaacagccggcgagcagctgcacaaggccatgaagagatatgccctggtgcctggcacaatcgccttcacagatgcccacatcgaggtggacatcacctacgccgagtacttcgagatgtctgtgcggctggccgaagctatgaagcgctacggcctgaacaccaaccaccggatcgtcgtgtgcagcgagaacagcctgcagttcttcatgcctgtgctgggcgccctgttcatcggagttgctgtggcccctgccaacgacatctacaacgagcgcgagctgctgaacagcatgggcatctctcagcccaccgtggtgttcgtgtccaagaagggactgcagaaaatcctgaacgtgcagaagaagctgcccatcatccagaaaatcatcatcatggacagcaagaccgactaccagggcttccagagcatgtacaccttcgtgaccagccatctgccacctggcttcaacgagtacgacttcgtgcccgagagcttcgaccgggacaagacaatcgccctgatcatgaacagcagcggctctaccggactgcccaaaggtgttgccctgcctcatagaactgcctgcgtgcggtttagccacgccagagatcccatcttcggcaaccagatcatccccgacacagccatcctgagcgtggtgccttttcaccacggcttcggcatgttcaccacactgggctacctgatctgcggcttcagagtggtgctgatgtaccgcttcgaggaagaactgttcctgcggagcctgcaggactacaagatccagtctgctctgctggtgcctactctgttcagcttctttgccaagagcaccctgatcgataagtacgacctgagcaacctgcacgagatcgcctctggcggagcccctctgtctaaagaagtgggagaagccgtcgccaagcggttccatctgcctggcatcagacaaggctatggcctgaccgagacaaccagcgccattctgattacccctgagggcgacgataagcctggcgctgtgggaaaagtggtgccattcttcgaggccaaggtggtggatctggacaccggcaaaacactgggcgttaaccagaggggcgagctgtgtgttagaggccctatgatcatgagcggctacgtgaacaaccccgaggccacaaacgctctgatcgacaaggatggatggctgcacagcggcgacattgcctactgggacgaagatgagcacttcttcatcgtggaccggctgaagtccctgatcaagtacaagggctaccaggtggccccagccgagctggaatctattctgctgcaacaccccaacatcttcgatgccggcgttgcaggactgcccgatgatgatgctggcgaactgccagctgctgtggtggtgctggaacacggcaagaccatgaccgagaaagaaatcgtggactacgtggccagccaagtgaccaccgccaagaaactgagaggcggcgtggtgtttgtggacgaggtgccaaaaggcctgacaggcaagctggacgcccggaagatcagagagatcctgattaaggccaagaaaggcggcaagatcgccgtgtaatagctaactagacaaaacaccaaacaaacaagctgcgagccacggacttaaataattgagccaaaaacaaccaaaaaaaatctagatatcggatcccggg

SEQ ID NO: 3243 - DNA, 2831 bp, synthetic construct
  source 1..2831: mol_type = other DNA; note = Ana1.22
taatacgactcactatagggagaccctcgaaaaaaaacacaaacacctaaagaagaaattctttaagtggatgctctcaaactcagggaaacctaaatctagttatagacaaggcaatcctgagccaagccgaagtagtaattagtaagttaacaatagatgacttacaactaatcggaaggtgcagagactcgacgggagctaccctaacgtcaagacgagggtaaagagagagtccaattctcaaagccaataggcagtagcgaaagctgcaagagaatgaaaatccgtggctcgcagcaaacaccaaacaaaacaaacacaaaccaacaaaaattaaaacagcctgtgggttgatcccacccacaggcccattgggcgctagcactctggtatcacggtacctttgtgcgcctgttttataccccctcccccaactgtaacttagaagtaacacacaccgatcaacagtcagcgtggcacaccagccacgttttgatcaagcacttctgttaccccggactgagtatcaatagactgctcacgcggttgaaggagaaagcgttcgttatccggccaactacttcgaaaaacctagtaacaccgtggaagttgcagagtgtttcgctcagcactaccccagtgtagatcaggtcgatgagtcaccgcattccccacgggcgaccgtggcggtggctgcgttggcggcctgcccatggggaaacccatgggacgctctaatacagacatggtgcgaagagtctattgagctagttggtagtcctccggcccctgaatgcggctaatcctaactgcggagcacacaccctcaagccagagggcagtgtgtcgtaacgggcaactctgcagcggaaccgactactttgggtgtccgtgtttcattttattcctatactggctgcttatggtgacaattgagagatcgttaccatatagctattggattggccatccggtgactaatagagctattatatatccctttgttgggtttataccacttagcttgaaagaggttaaaacattacaattcattgttaagttgaatacagcaaaatggaagatgccaagaacatcaagaagggccctgctccattctaccctctggaagatggaacagccggcgagcagctgcacaaggccatgaagagatatgccctggtgcctggcacaatcgccttcacagatgcccacatcgaggtggacatcacctacgccgagtacttcgagatgtctgtgcggctggccgaagctatgaagcgctacggcctgaacaccaaccaccggatcgtcgtgtgcagcgagaacagcctgcagttcttcatgcctgtgctgggcgccctgttcatcggagttgctgtggcccctgccaacgacatctacaacgagcgcgagctgctgaacagcatgggcatctctcagcccaccgtggtgttcgtgtccaagaagggactgcagaaaatcctgaacgtgcagaagaagctgcccatcatccagaaaatcatcatcatggacagcaagaccgactaccagggcttccagagcatgtacaccttcgtgaccagccatctgccacctggcttcaacgagtacgacttcgtgcccgagagcttcgaccgggacaagacaatcgccctgatcatgaacagcagcggctctaccggactgcccaaaggtgttgccctgcctcatagaactgcctgcgtgcggtttagccacgccagagatcccatcttcggcaaccagatcatccccgacacagccatcctgagcgtggtgccttttcaccacggcttcggcatgttcaccacactgggctacctgatctgcggcttcagagtggtgctgatgtaccgcttcgaggaagaactgttcctgcggagcctgcaggactacaagatccagtctgctctgctggtgcctactctgttcagcttctttgccaagagcaccctgatcgataagtacgacctgagcaacctgcacgagatcgcctctggcggagcccctctgtctaaagaagtgggagaagccgtcgccaagcggttccatctgcctggcatcagacaaggctatggcctgaccgagacaaccagcgccattctgattacccctgagggcgacgataagcctggcgctgtgggaaaagtggtgccattcttcgaggccaaggtggtggatctggacaccggcaaaacactgggcgttaaccagaggggcgagctgtgtgttagaggccctatgatcatgagcggctacgtgaacaaccccgaggccacaaacgctctgatcgacaaggatggatggctgcacagcggcgacattgcctactgggacgaagatgagcacttcttcatcgtggaccggctgaagtccctgatcaagtacaagggctaccaggtggccccagccgagctggaatctattctgctgcaacaccccaacatcttcgatgccggcgttgcaggactgcccgatgatgatgctggcgaactgccagctgctgtggtggtgctggaacacggcaagaccatgaccgagaaagaaatcgtggactacgtggccagccaagtgaccaccgccaagaaactgagaggcggcgtggtgtttgtggacgaggtgccaaaaggcctgacaggcaagctggacgcccggaagatcagagagatcctgattaaggccaagaaaggcggcaagatcgccgtgtaatagctaactagacaaaacaccaaacaaacaagctgcgagccacggacttaaataattgagcctaaaaacaaccaaaaaaaatctagatatcggatcccggg

SEQ ID NO: 3244 - DNA, 2831 bp, synthetic construct
  source 1..2831: mol_type = other DNA; note = Ana1.23
taatacgactcactatagggagaccctcgaaaaaaaacacaaacaccaaagaagaaattctttaagtggatgctctcaaactcagggaaacctaaatctagttatagacaaggcaatcctgagccaagccgaagtagtaattagtaagttaacaatagatgacttacaactaatcggaaggtgcagagactcgacgggagctaccctaacgtcaagacgagggtaaagagagagtccaattctcaaagccaataggcagtagcgaaagctgcaagagaatgaaaatccgtggctcgcagcaaacaccaaacaaaacaaacacaaaccaacaaaaattaaaacagcctgtgggttgatcccacccacaggcccattgggcgctagcactctggtatcacggtacctttgtgcgcctgttttataccccctcccccaactgtaacttagaagtaacacacaccgatcaacagtcagcgtggcacaccagccacgttttgatcaagcacttctgttaccccggactgagtatcaatagactgctcacgcggttgaaggagaaagcgttcgttatccggccaactacttcgaaaaacctagtaacaccgtggaagttgcagagtgtttcgctcagcactaccccagtgtagatcaggtcgatgagtcaccgcattccccacgggcgaccgtggcggtggctgcgttggcggcctgcccatggggaaacccatgggacgctctaatacagacatggtgcgaagagtctattgagctagttggtagtcctccggcccctgaatgcggctaatcctaactgcggagcacacaccctcaagccagagggcagtgtgtcgtaacgggcaactctgcagcggaaccgactactttgggtgtccgtgtttcattttattcctatactggctgcttatggtgacaattgagagatcgttaccatatagctattggattggccatccggtgactaatagagctattatatatccctttgttgggtttataccacttagcttgaaagaggttaaaacattacaattcattgttaagttgaatacagcaaaatggaagatgccaagaacatcaagaagggccctgctccattctaccctctggaagatggaacagccggcgagcagctgcacaaggccatgaagagatatgccctggtgcctggcacaatcgccttcacagatgcccacatcgaggtggacatcacctacgccgagtacttcgagatgtctgtgcggctggccgaagctatgaagcgctacggcctgaacaccaaccaccggatcgtcgtgtgcagcgagaacagcctgcagttcttcatgcctgtgctgggcgccctgttcatcggagttgctgtggcccctgccaacgacatctacaacgagcgcgagctgctgaacagcatgggcatctctcagcccaccgtggtgttcgtgtccaagaagggactgcagaaaatcctgaacgtgcagaagaagctgcccatcatccagaaaatcatcatcatggacagcaagaccgactaccagggcttccagagcatgtacaccttcgtgaccagccatctgccacctggcttcaacgagtacgacttcgtgcccgagagcttcgaccgggacaagacaatcgccctgatcatgaacagcagcggctctaccggactgcccaaaggtgttgccctgcctcatagaactgcctgcgtgcggtttagccacgccagagatcccatcttcggcaaccagatcatccccgacacagccatcctgagcgtggtgccttttcaccacggcttcggcatgttcaccacactgggctacctgatctgcggcttcagagtggtgctgatgtaccgcttcgaggaagaactgttcctgcggagcctgcaggactacaagatccagtctgctctgctggtgcctactctgttcagcttctttgccaagagcaccctgatcgataagtacgacctgagcaacctgcacgagatcgcctctggcggagcccctctgtctaaagaagtgggagaagccgtcgccaagcggttccatctgcctggcatcagacaaggctatggcctgaccgagacaaccagcgccattctgattacccctgagggcgacgataagcctggcgctgtgggaaaagtggtgccattcttcgaggccaaggtggtggatctggacaccggcaaaacactgggcgttaaccagaggggcgagctgtgtgttagaggccctatgatcatgagcggctacgtgaacaaccccgaggccacaaacgctctgatcgacaaggatggatggctgcacagcggcgacattgcctactgggacgaagatgagcacttcttcatcgtggaccggctgaagtccctgatcaagtacaagggctaccaggtggccccagccgagctggaatctattctgctgcaacaccccaacatcttcgatgccggcgttgcaggactgcccgatgatgatgctggcgaactgccagctgctgtggtggtgctggaacacggcaagaccatgaccgagaaagaaatcgtggactacgtggccagccaagtgaccaccgccaagaaactgagaggcggcgtggtgtttgtggacgaggtgccaaaaggcctgacaggcaagctggacgcccggaagatcagagagatcctgattaaggccaagaaaggcggcaagatcgccgtgtaatagctaactagacaaaacaccaaacaaacaagctgcgagccacggacttaaataattgagccttaaaaacaaccaaaaaaaatctagatatcggatcccggg

SEQ ID NO: 3245 - DNA, 2831 bp, synthetic construct
  source 1..2831: mol_type = other DNA; note = Ana1.24
taatacgactcactatagggagaccctcgaaaaaaaacacaaacaccaagaagaaattctttaagtggatgctctcaaactcagggaaacctaaatctagttatagacaaggcaatcctgagccaagccgaagtagtaattagtaagttaacaatagatgacttacaactaatcggaaggtgcagagactcgacgggagctaccctaacgtcaagacgagggtaaagagagagtccaattctcaaagccaataggcagtagcgaaagctgcaagagaatgaaaatccgtggctcgcagcaaacaccaaacaaaacaaacacaaaccaacaaaaattaaaacagcctgtgggttgatcccacccacaggcccattgggcgctagcactctggtatcacggtacctttgtgcgcctgttttataccccctcccccaactgtaacttagaagtaacacacaccgatcaacagtcagcgtggcacaccagccacgttttgatcaagcacttctgttaccccggactgagtatcaatagactgctcacgcggttgaaggagaaagcgttcgttatccggccaactacttcgaaaaacctagtaacaccgtggaagttgcagagtgtttcgctcagcactaccccagtgtagatcaggtcgatgagtcaccgcattccccacgggcgaccgtggcggtggctgcgttggcggcctgcccatggggaaacccatgggacgctctaatacagacatggtgcgaagagtctattgagctagttggtagtcctccggcccctgaatgcggctaatcctaactgcggagcacacaccctcaagccagagggcagtgtgtcgtaacgggcaactctgcagcggaaccgactactttgggtgtccgtgtttcattttattcctatactggctgcttatggtgacaattgagagatcgttaccatatagctattggattggccatccggtgactaatagagctattatatatccctttgttgggtttataccacttagcttgaaagaggttaaaacattacaattcattgttaagttgaatacagcaaaatggaagatgccaagaacatcaagaagggccctgctccattctaccctctggaagatggaacagccggcgagcagctgcacaaggccatgaagagatatgccctggtgcctggcacaatcgccttcacagatgcccacatcgaggtggacatcacctacgccgagtacttcgagatgtctgtgcggctggccgaagctatgaagcgctacggcctgaacaccaaccaccggatcgtcgtgtgcagcgagaacagcctgcagttcttcatgcctgtgctgggcgccctgttcatcggagttgctgtggcccctgccaacgacatctacaacgagcgcgagctgctgaacagcatgggcatctctcagcccaccgtggtgttcgtgtccaagaagggactgcagaaaatcctgaacgtgcagaagaagctgcccatcatccagaaaatcatcatcatggacagcaagaccgactaccagggcttccagagcatgtacaccttcgtgaccagccatctgccacctggcttcaacgagtacgacttcgtgcccgagagcttcgaccgggacaagacaatcgccctgatcatgaacagcagcggctctaccggactgcccaaaggtgttgccctgcctcatagaactgcctgcgtgcggtttagccacgccagagatcccatcttcggcaaccagatcatccccgacacagccatcctgagcgtggtgccttttcaccacggcttcggcatgttcaccacactgggctacctgatctgcggcttcagagtggtgctgatgtaccgcttcgaggaagaactgttcctgcggagcctgcaggactacaagatccagtctgctctgctggtgcctactctgttcagcttctttgccaagagcaccctgatcgataagtacgacctgagcaacctgcacgagatcgcctctggcggagcccctctgtctaaagaagtgggagaagccgtcgccaagcggttccatctgcctggcatcagacaaggctatggcctgaccgagacaaccagcgccattctgattacccctgagggcgacgataagcctggcgctgtgggaaaagtggtgccattcttcgaggccaaggtggtggatctggacaccggcaaaacactgggcgttaaccagaggggcgagctgtgtgttagaggccctatgatcatgagcggctacgtgaacaaccccgaggccacaaacgctctgatcgacaaggatggatggctgcacagcggcgacattgcctactgggacgaagatgagcacttcttcatcgtggaccggctgaagtccctgatcaagtacaagggctaccaggtggccccagccgagctggaatctattctgctgcaacaccccaacatcttcgatgccggcgttgcaggactgcccgatgatgatgctggcgaactgccagctgctgtggtggtgctggaacacggcaagaccatgaccgagaaagaaatcgtggactacgtggccagccaagtgaccaccgccaagaaactgagaggcggcgtggtgtttgtggacgaggtgccaaaaggcctgacaggcaagctggacgcccggaagatcagagagatcctgattaaggccaagaaaggcggcaagatcgccgtgtaatagctaactagacaaaacaccaaacaaacaagctgcgagccacggacttaaataattgagccttaaaaaacaaccaaaaaaaatctagatatcggatcccggg

SEQ ID NO: 3246 - DNA, 2831 bp, synthetic construct
  source 1..2831: mol_type = other DNA; note = Ana1.25
taatacgactcactatagggagaccctcgaaaaaaaacacaaacaccagaagaaattctttaagtggatgctctcaaactcagggaaacctaaatctagttatagacaaggcaatcctgagccaagccgaagtagtaattagtaagttaacaatagatgacttacaactaatcggaaggtgcagagactcgacgggagctaccctaacgtcaagacgagggtaaagagagagtccaattctcaaagccaataggcagtagcgaaagctgcaagagaatgaaaatccgtggctcgcagcaaacaccaaacaaaacaaacacaaaccaacaaaaattaaaacagcctgtgggttgatcccacccacaggcccattgggcgctagcactctggtatcacggtacctttgtgcgcctgttttataccccctcccccaactgtaacttagaagtaacacacaccgatcaacagtcagcgtggcacaccagccacgttttgatcaagcacttctgttaccccggactgagtatcaatagactgctcacgcggttgaaggagaaagcgttcgttatccggccaactacttcgaaaaacctagtaacaccgtggaagttgcagagtgtttcgctcagcactaccccagtgtagatcaggtcgatgagtcaccgcattccccacgggcgaccgtggcggtggctgcgttggcggcctgcccatggggaaacccatgggacgctctaatacagacatggtgcgaagagtctattgagctagttggtagtcctccggcccctgaatgcggctaatcctaactgcggagcacacaccctcaagccagagggcagtgtgtcgtaacgggcaactctgcagcggaaccgactactttgggtgtccgtgtttcattttattcctatactggctgcttatggtgacaattgagagatcgttaccatatagctattggattggccatccggtgactaatagagctattatatatccctttgttgggtttataccacttagcttgaaagaggttaaaacattacaattcattgttaagttgaatacagcaaaatggaagatgccaagaacatcaagaagggccctgctccattctaccctctggaagatggaacagccggcgagcagctgcacaaggccatgaagagatatgccctggtgcctggcacaatcgccttcacagatgcccacatcgaggtggacatcacctacgccgagtacttcgagatgtctgtgcggctggccgaagctatgaagcgctacggcctgaacaccaaccaccggatcgtcgtgtgcagcgagaacagcctgcagttcttcatgcctgtgctgggcgccctgttcatcggagttgctgtggcccctgccaacgacatctacaacgagcgcgagctgctgaacagcatgggcatctctcagcccaccgtggtgttcgtgtccaagaagggactgcagaaaatcctgaacgtgcagaagaagctgcccatcatccagaaaatcatcatcatggacagcaagaccgactaccagggcttccagagcatgtacaccttcgtgaccagccatctgccacctggcttcaacgagtacgacttcgtgcccgagagcttcgaccgggacaagacaatcgccctgatcatgaacagcagcggctctaccggactgcccaaaggtgttgccctgcctcatagaactgcctgcgtgcggtttagccacgccagagatcccatcttcggcaaccagatcatccccgacacagccatcctgagcgtggtgccttttcaccacggcttcggcatgttcaccacactgggctacctgatctgcggcttcagagtggtgctgatgtaccgcttcgaggaagaactgttcctgcggagcctgcaggactacaagatccagtctgctctgctggtgcctactctgttcagcttctttgccaagagcaccctgatcgataagtacgacctgagcaacctgcacgagatcgcctctggcggagcccctctgtctaaagaagtgggagaagccgtcgccaagcggttccatctgcctggcatcagacaaggctatggcctgaccgagacaaccagcgccattctgattacccctgagggcgacgataagcctggcgctgtgggaaaagtggtgccattcttcgaggccaaggtggtggatctggacaccggcaaaacactgggcgttaaccagaggggcgagctgtgtgttagaggccctatgatcatgagcggctacgtgaacaaccccgaggccacaaacgctctgatcgacaaggatggatggctgcacagcggcgacattgcctactgggacgaagatgagcacttcttcatcgtggaccggctgaagtccctgatcaagtacaagggctaccaggtggccccagccgagctggaatctattctgctgcaacaccccaacatcttcgatgccggcgttgcaggactgcccgatgatgatgctggcgaactgccagctgctgtggtggtgctggaacacggcaagaccatgaccgagaaagaaatcgtggactacgtggccagccaagtgaccaccgccaagaaactgagaggcggcgtggtgtttgtggacgaggtgccaaaaggcctgacaggcaagctggacgcccggaagatcagagagatcctgattaaggccaagaaaggcggcaagatcgccgtgtaatagctaactagacaaaacaccaaacaaacaagctgcgagccacggacttaaataattgagccttaaaaaaacaaccaaaaaaaatctagatatcggatcccggg

SEQ ID NO: 3247 - DNA, 2831 bp, synthetic construct
  source 1..2831: mol_type = other DNA; note = Ana1.26
taatacgactcactatagggagaccctcgaaaaaaaacacaaacaccgaagaaattctttaagtggatgctctcaaactcagggaaacctaaatctagttatagacaaggcaatcctgagccaagccgaagtagtaattagtaagttaacaatagatgacttacaactaatcggaaggtgcagagactcgacgggagctaccctaacgtcaagacgagggtaaagagagagtccaattctcaaagccaataggcagtagcgaaagctgcaagagaatgaaaatccgtggctcgcagcaaacaccaaacaaaacaaacacaaaccaacaaaaattaaaacagcctgtgggttgatcccacccacaggcccattgggcgctagcactctggtatcacggtacctttgtgcgcctgttttataccccctcccccaactgtaacttagaagtaacacacaccgatcaacagtcagcgtggcacaccagccacgttttgatcaagcacttctgttaccccggactgagtatcaatagactgctcacgcggttgaaggagaaagcgttcgttatccggccaactacttcgaaaaacctagtaacaccgtggaagttgcagagtgtttcgctcagcactaccccagtgtagatcaggtcgatgagtcaccgcattccccacgggcgaccgtggcggtggctgcgttggcggcctgcccatggggaaacccatgggacgctctaatacagacatggtgcgaagagtctattgagctagttggtagtcctccggcccctgaatgcggctaatcctaactgcggagcacacaccctcaagccagagggcagtgtgtcgtaacgggcaactctgcagcggaaccgactactttgggtgtccgtgtttcattttattcctatactggctgcttatggtgacaattgagagatcgttaccatatagctattggattggccatccggtgactaatagagctattatatatccctttgttgggtttataccacttagcttgaaagaggttaaaacattacaattcattgttaagttgaatacagcaaaatggaagatgccaagaacatcaagaagggccctgctccattctaccctctggaagatggaacagccggcgagcagctgcacaaggccatgaagagatatgccctggtgcctggcacaatcgccttcacagatgcccacatcgaggtggacatcacctacgccgagtacttcgagatgtctgtgcggctggccgaagctatgaagcgctacggcctgaacaccaaccaccggatcgtcgtgtgcagcgagaacagcctgcagttcttcatgcctgtgctgggcgccctgttcatcggagttgctgtggcccctgccaacgacatctacaacgagcgcgagctgctgaacagcatgggcatctctcagcccaccgtggtgttcgtgtccaagaagggactgcagaaaatcctgaacgtgcagaagaagctgcccatcatccagaaaatcatcatcatggacagcaagaccgactaccagggcttccagagcatgtacaccttcgtgaccagccatctgccacctggcttcaacgagtacgacttcgtgcccgagagcttcgaccgggacaagacaatcgccctgatcatgaacagcagcggctctaccggactgcccaaaggtgttgccctgcctcatagaactgcctgcgtgcggtttagccacgccagagatcccatcttcggcaaccagatcatccccgacacagccatcctgagcgtggtgccttttcaccacggcttcggcatgttcaccacactgggctacctgatctgcggcttcagagtggtgctgatgtaccgcttcgaggaagaactgttcctgcggagcctgcaggactacaagatccagtctgctctgctggtgcctactctgttcagcttctttgccaagagcaccctgatcgataagtacgacctgagcaacctgcacgagatcgcctctggcggagcccctctgtctaaagaagtgggagaagccgtcgccaagcggttccatctgcctggcatcagacaaggctatggcctgaccgagacaaccagcgccattctgattacccctgagggcgacgataagcctggcgctgtgggaaaagtggtgccattcttcgaggccaaggtggtggatctggacaccggcaaaacactgggcgttaaccagaggggcgagctgtgtgttagaggccctatgatcatgagcggctacgtgaacaaccccgaggccacaaacgctctgatcgacaaggatggatggctgcacagcggcgacattgcctactgggacgaagatgagcacttcttcatcgtggaccggctgaagtccctgatcaagtacaagggctaccaggtggccccagccgagctggaatctattctgctgcaacaccccaacatcttcgatgccggcgttgcaggactgcccgatgatgatgctggcgaactgccagctgctgtggtggtgctggaacacggcaagaccatgaccgagaaagaaatcgtggactacgtggccagccaagtgaccaccgccaagaaactgagaggcggcgtggtgtttgtggacgaggtgccaaaaggcctgacaggcaagctggacgcccggaagatcagagagatcctgattaaggccaagaaaggcggcaagatcgccgtgtaatagctaactagacaaaacaccaaacaaacaagctgcgagccacggacttaaataattgagccttaaaaaaaacaaccaaaaaaaatctagatatcggatcccggg

SEQ ID NO: 3248 - DNA, 2831 bp, synthetic construct
  source 1..2831: mol_type = other DNA; note = Ana1.27
taatacgactcactatagggagaccctcgaaaaaaaacacaaacaccaagaaattctttaagtggatgctctcaaactcagggaaacctaaatctagttatagacaaggcaatcctgagccaagccgaagtagtaattagtaagttaacaatagatgacttacaactaatcggaaggtgcagagactcgacgggagctaccctaacgtcaagacgagggtaaagagagagtccaattctcaaagccaataggcagtagcgaaagctgcaagagaatgaaaatccgtggctcgcagcaaacaccaaacaaaacaaacacaaaccaacaaaaattaaaacagcctgtgggttgatcccacccacaggcccattgggcgctagcactctggtatcacggtacctttgtgcgcctgttttataccccctcccccaactgtaacttagaagtaacacacaccgatcaacagtcagcgtggcacaccagccacgttttgatcaagcacttctgttaccccggactgagtatcaatagactgctcacgcggttgaaggagaaagcgttcgttatccggccaactacttcgaaaaacctagtaacaccgtggaagttgcagagtgtttcgctcagcactaccccagtgtagatcaggtcgatgagtcaccgcattccccacgggcgaccgtggcggtggctgcgttggcggcctgcccatggggaaacccatgggacgctctaatacagacatggtgcgaagagtctattgagctagttggtagtcctccggcccctgaatgcggctaatcctaactgcggagcacacaccctcaagccagagggcagtgtgtcgtaacgggcaactctgcagcggaaccgactactttgggtgtccgtgtttcattttattcctatactggctgcttatggtgacaattgagagatcgttaccatatagctattggattggccatccggtgactaatagagctattatatatccctttgttgggtttataccacttagcttgaaagaggttaaaacattacaattcattgttaagttgaatacagcaaaatggaagatgccaagaacatcaagaagggccctgctccattctaccctctggaagatggaacagccggcgagcagctgcacaaggccatgaagagatatgccctggtgcctggcacaatcgccttcacagatgcccacatcgaggtggacatcacctacgccgagtacttcgagatgtctgtgcggctggccgaagctatgaagcgctacggcctgaacaccaaccaccggatcgtcgtgtgcagcgagaacagcctgcagttcttcatgcctgtgctgggcgccctgttcatcggagttgctgtggcccctgccaacgacatctacaacgagcgcgagctgctgaacagcatgggcatctctcagcccaccgtggtgttcgtgtccaagaagggactgcagaaaatcctgaacgtgcagaagaagctgcccatcatccagaaaatcatcatcatggacagcaagaccgactaccagggcttccagagcatgtacaccttcgtgaccagccatctgccacctggcttcaacgagtacgacttcgtgcccgagagcttcgaccgggacaagacaatcgccctgatcatgaacagcagcggctctaccggactgcccaaaggtgttgccctgcctcatagaactgcctgcgtgcggtttagccacgccagagatcccatcttcggcaaccagatcatccccgacacagccatcctgagcgtggtgccttttcaccacggcttcggcatgttcaccacactgggctacctgatctgcggcttcagagtggtgctgatgtaccgcttcgaggaagaactgttcctgcggagcctgcaggactacaagatccagtctgctctgctggtgcctactctgttcagcttctttgccaagagcaccctgatcgataagtacgacctgagcaacctgcacgagatcgcctctggcggagcccctctgtctaaagaagtgggagaagccgtcgccaagcggttccatctgcctggcatcagacaaggctatggcctgaccgagacaaccagcgccattctgattacccctgagggcgacgataagcctggcgctgtgggaaaagtggtgccattcttcgaggccaaggtggtggatctggacaccggcaaaacactgggcgttaaccagaggggcgagctgtgtgttagaggccctatgatcatgagcggctacgtgaacaaccccgaggccacaaacgctctgatcgacaaggatggatggctgcacagcggcgacattgcctactgggacgaagatgagcacttcttcatcgtggaccggctgaagtccctgatcaagtacaagggctaccaggtggccccagccgagctggaatctattctgctgcaacaccccaacatcttcgatgccggcgttgcaggactgcccgatgatgatgctggcgaactgccagctgctgtggtggtgctggaacacggcaagaccatgaccgagaaagaaatcgtggactacgtggccagccaagtgaccaccgccaagaaactgagaggcggcgtggtgtttgtggacgaggtgccaaaaggcctgacaggcaagctggacgcccggaagatcagagagatcctgattaaggccaagaaaggcggcaagatcgccgtgtaatagctaactagacaaaacaccaaacaaacaagctgcgagccacggacttaaataattgagccttaaagaaaaacaaccaaaaaaaatctagatatcggatcccggg

SEQ ID NO: 3249 - DNA, 2831 bp, synthetic construct
  source 1..2831: mol_type = other DNA; note = Ana1.28
taatacgactcactatagggagaccctcgaaaaaaaacacaaacaccagaaattctttaagtggatgctctcaaactcagggaaacctaaatctagttatagacaaggcaatcctgagccaagccgaagtagtaattagtaagttaacaatagatgacttacaactaatcggaaggtgcagagactcgacgggagctaccctaacgtcaagacgagggtaaagagagagtccaattctcaaagccaataggcagtagcgaaagctgcaagagaatgaaaatccgtggctcgcagcaaacaccaaacaaaacaaacacaaaccaacaaaaattaaaacagcctgtgggttgatcccacccacaggcccattgggcgctagcactctggtatcacggtacctttgtgcgcctgttttataccccctcccccaactgtaacttagaagtaacacacaccgatcaacagtcagcgtggcacaccagccacgttttgatcaagcacttctgttaccccggactgagtatcaatagactgctcacgcggttgaaggagaaagcgttcgttatccggccaactacttcgaaaaacctagtaacaccgtggaagttgcagagtgtttcgctcagcactaccccagtgtagatcaggtcgatgagtcaccgcattccccacgggcgaccgtggcggtggctgcgttggcggcctgcccatggggaaacccatgggacgctctaatacagacatggtgcgaagagtctattgagctagttggtagtcctccggcccctgaatgcggctaatcctaactgcggagcacacaccctcaagccagagggcagtgtgtcgtaacgggcaactctgcagcggaaccgactactttgggtgtccgtgtttcattttattcctatactggctgcttatggtgacaattgagagatcgttaccatatagctattggattggccatccggtgactaatagagctattatatatccctttgttgggtttataccacttagcttgaaagaggttaaaacattacaattcattgttaagttgaatacagcaaaatggaagatgccaagaacatcaagaagggccctgctccattctaccctctggaagatggaacagccggcgagcagctgcacaaggccatgaagagatatgccctggtgcctggcacaatcgccttcacagatgcccacatcgaggtggacatcacctacgccgagtacttcgagatgtctgtgcggctggccgaagctatgaagcgctacggcctgaacaccaaccaccggatcgtcgtgtgcagcgagaacagcctgcagttcttcatgcctgtgctgggcgccctgttcatcggagttgctgtggcccctgccaacgacatctacaacgagcgcgagctgctgaacagcatgggcatctctcagcccaccgtggtgttcgtgtccaagaagggactgcagaaaatcctgaacgtgcagaagaagctgcccatcatccagaaaatcatcatcatggacagcaagaccgactaccagggcttccagagcatgtacaccttcgtgaccagccatctgccacctggcttcaacgagtacgacttcgtgcccgagagcttcgaccgggacaagacaatcgccctgatcatgaacagcagcggctctaccggactgcccaaaggtgttgccctgcctcatagaactgcctgcgtgcggtttagccacgccagagatcccatcttcggcaaccagatcatccccgacacagccatcctgagcgtggtgccttttcaccacggcttcggcatgttcaccacactgggctacctgatctgcggcttcagagtggtgctgatgtaccgcttcgaggaagaactgttcctgcggagcctgcaggactacaagatccagtctgctctgctggtgcctactctgttcagcttctttgccaagagcaccctgatcgataagtacgacctgagcaacctgcacgagatcgcctctggcggagcccctctgtctaaagaagtgggagaagccgtcgccaagcggttccatctgcctggcatcagacaaggctatggcctgaccgagacaaccagcgccattctgattacccctgagggcgacgataagcctggcgctgtgggaaaagtggtgccattcttcgaggccaaggtggtggatctggacaccggcaaaacactgggcgttaaccagaggggcgagctgtgtgttagaggccctatgatcatgagcggctacgtgaacaaccccgaggccacaaacgctctgatcgacaaggatggatggctgcacagcggcgacattgcctactgggacgaagatgagcacttcttcatcgtggaccggctgaagtccctgatcaagtacaagggctaccaggtggccccagccgagctggaatctattctgctgcaacaccccaacatcttcgatgccggcgttgcaggactgcccgatgatgatgctggcgaactgccagctgctgtggtggtgctggaacacggcaagaccatgaccgagaaagaaatcgtggactacgtggccagccaagtgaccaccgccaagaaactgagaggcggcgtggtgtttgtggacgaggtgccaaaaggcctgacaggcaagctggacgcccggaagatcagagagatcctgattaaggccaagaaaggcggcaagatcgccgtgtaatagctaactagacaaaacaccaaacaaacaagctgcgagccacggacttaaataattgagccttaaagaaaaaacaaccaaaaaaaatctagatatcggatcccggg

SEQ ID NO: 3250 - DNA, 2831 bp, synthetic construct
  source 1..2831: mol_type = other DNA; note = Ana1.29
taatacgactcactatagggagaccctcgaaaaaaaacacaaacaccgaaattctttaagtggatgctctcaaactcagggaaacctaaatctagttatagacaaggcaatcctgagccaagccgaagtagtaattagtaagttaacaatagatgacttacaactaatcggaaggtgcagagactcgacgggagctaccctaacgtcaagacgagggtaaagagagagtccaattctcaaagccaataggcagtagcgaaagctgcaagagaatgaaaatccgtggctcgcagcaaacaccaaacaaaacaaacacaaaccaacaaaaattaaaacagcctgtgggttgatcccacccacaggcccattgggcgctagcactctggtatcacggtacctttgtgcgcctgttttataccccctcccccaactgtaacttagaagtaacacacaccgatcaacagtcagcgtggcacaccagccacgttttgatcaagcacttctgttaccccggactgagtatcaatagactgctcacgcggttgaaggagaaagcgttcgttatccggccaactacttcgaaaaacctagtaacaccgtggaagttgcagagtgtttcgctcagcactaccccagtgtagatcaggtcgatgagtcaccgcattccccacgggcgaccgtggcggtggctgcgttggcggcctgcccatggggaaacccatgggacgctctaatacagacatggtgcgaagagtctattgagctagttggtagtcctccggcccctgaatgcggctaatcctaactgcggagcacacaccctcaagccagagggcagtgtgtcgtaacgggcaactctgcagcggaaccgactactttgggtgtccgtgtttcattttattcctatactggctgcttatggtgacaattgagagatcgttaccatatagctattggattggccatccggtgactaatagagctattatatatccctttgttgggtttataccacttagcttgaaagaggttaaaacattacaattcattgttaagttgaatacagcaaaatggaagatgccaagaacatcaagaagggccctgctccattctaccctctggaagatggaacagccggcgagcagctgcacaaggccatgaagagatatgccctggtgcctggcacaatcgccttcacagatgcccacatcgaggtggacatcacctacgccgagtacttcgagatgtctgtgcggctggccgaagctatgaagcgctacggcctgaacaccaaccaccggatcgtcgtgtgcagcgagaacagcctgcagttcttcatgcctgtgctgggcgccctgttcatcggagttgctgtggcccctgccaacgacatctacaacgagcgcgagctgctgaacagcatgggcatctctcagcccaccgtggtgttcgtgtccaagaagggactgcagaaaatcctgaacgtgcagaagaagctgcccatcatccagaaaatcatcatcatggacagcaagaccgactaccagggcttccagagcatgtacaccttcgtgaccagccatctgccacctggcttcaacgagtacgacttcgtgcccgagagcttcgaccgggacaagacaatcgccctgatcatgaacagcagcggctctaccggactgcccaaaggtgttgccctgcctcatagaactgcctgcgtgcggtttagccacgccagagatcccatcttcggcaaccagatcatccccgacacagccatcctgagcgtggtgccttttcaccacggcttcggcatgttcaccacactgggctacctgatctgcggcttcagagtggtgctgatgtaccgcttcgaggaagaactgttcctgcggagcctgcaggactacaagatccagtctgctctgctggtgcctactctgttcagcttctttgccaagagcaccctgatcgataagtacgacctgagcaacctgcacgagatcgcctctggcggagcccctctgtctaaagaagtgggagaagccgtcgccaagcggttccatctgcctggcatcagacaaggctatggcctgaccgagacaaccagcgccattctgattacccctgagggcgacgataagcctggcgctgtgggaaaagtggtgccattcttcgaggccaaggtggtggatctggacaccggcaaaacactgggcgttaaccagaggggcgagctgtgtgttagaggccctatgatcatgagcggctacgtgaacaaccccgaggccacaaacgctctgatcgacaaggatggatggctgcacagcggcgacattgcctactgggacgaagatgagcacttcttcatcgtggaccggctgaagtccctgatcaagtacaagggctaccaggtggccccagccgagctggaatctattctgctgcaacaccccaacatcttcgatgccggcgttgcaggactgcccgatgatgatgctggcgaactgccagctgctgtggtggtgctggaacacggcaagaccatgaccgagaaagaaatcgtggactacgtggccagccaagtgaccaccgccaagaaactgagaggcggcgtggtgtttgtggacgaggtgccaaaaggcctgacaggcaagctggacgcccggaagatcagagagatcctgattaaggccaagaaaggcggcaagatcgccgtgtaatagctaactagacaaaacaccaaacaaacaagctgcgagccacggacttaaataattgagccttaaagaaaaaaacaaccaaaaaaaatctagatatcggatcccggg

SEQ ID NO: 3251 - DNA, 2831 bp, synthetic construct
  source 1..2831: mol_type = other DNA; note = Ana1.30
taatacgactcactatagggagaccctcgaaaaaaaacacaaacaccaaattctttaagtggatgctctcaaactcagggaaacctaaatctagttatagacaaggcaatcctgagccaagccgaagtagtaattagtaagttaacaatagatgacttacaactaatcggaaggtgcagagactcgacgggagctaccctaacgtcaagacgagggtaaagagagagtccaattctcaaagccaataggcagtagcgaaagctgcaagagaatgaaaatccgtggctcgcagcaaacaccaaacaaaacaaacacaaaccaacaaaaattaaaacagcctgtgggttgatcccacccacaggcccattgggcgctagcactctggtatcacggtacctttgtgcgcctgttttataccccctcccccaactgtaacttagaagtaacacacaccgatcaacagtcagcgtggcacaccagccacgttttgatcaagcacttctgttaccccggactgagtatcaatagactgctcacgcggttgaaggagaaagcgttcgttatccggccaactacttcgaaaaacctagtaacaccgtggaagttgcagagtgtttcgctcagcactaccccagtgtagatcaggtcgatgagtcaccgcattccccacgggcgaccgtggcggtggctgcgttggcggcctgcccatggggaaacccatgggacgctctaatacagacatggtgcgaagagtctattgagctagttggtagtcctccggcccctgaatgcggctaatcctaactgcggagcacacaccctcaagccagagggcagtgtgtcgtaacgggcaactctgcagcggaaccgactactttgggtgtccgtgtttcattttattcctatactggctgcttatggtgacaattgagagatcgttaccatatagctattggattggccatccggtgactaatagagctattatatatccctttgttgggtttataccacttagcttgaaagaggttaaaacattacaattcattgttaagttgaatacagcaaaatggaagatgccaagaacatcaagaagggccctgctccattctaccctctggaagatggaacagccggcgagcagctgcacaaggccatgaagagatatgccctggtgcctggcacaatcgccttcacagatgcccacatcgaggtggacatcacctacgccgagtacttcgagatgtctgtgcggctggccgaagctatgaagcgctacggcctgaacaccaaccaccggatcgtcgtgtgcagcgagaacagcctgcagttcttcatgcctgtgctgggcgccctgttcatcggagttgctgtggcccctgccaacgacatctacaacgagcgcgagctgctgaacagcatgggcatctctcagcccaccgtggtgttcgtgtccaagaagggactgcagaaaatcctgaacgtgcagaagaagctgcccatcatccagaaaatcatcatcatggacagcaagaccgactaccagggcttccagagcatgtacaccttcgtgaccagccatctgccacctggcttcaacgagtacgacttcgtgcccgagagcttcgaccgggacaagacaatcgccctgatcatgaacagcagcggctctaccggactgcccaaaggtgttgccctgcctcatagaactgcctgcgtgcggtttagccacgccagagatcccatcttcggcaaccagatcatccccgacacagccatcctgagcgtggtgccttttcaccacggcttcggcatgttcaccacactgggctacctgatctgcggcttcagagtggtgctgatgtaccgcttcgaggaagaactgttcctgcggagcctgcaggactacaagatccagtctgctctgctggtgcctactctgttcagcttctttgccaagagcaccctgatcgataagtacgacctgagcaacctgcacgagatcgcctctggcggagcccctctgtctaaagaagtgggagaagccgtcgccaagcggttccatctgcctggcatcagacaaggctatggcctgaccgagacaaccagcgccattctgattacccctgagggcgacgataagcctggcgctgtgggaaaagtggtgccattcttcgaggccaaggtggtggatctggacaccggcaaaacactgggcgttaaccagaggggcgagctgtgtgttagaggccctatgatcatgagcggctacgtgaacaaccccgaggccacaaacgctctgatcgacaaggatggatggctgcacagcggcgacattgcctactgggacgaagatgagcacttcttcatcgtggaccggctgaagtccctgatcaagtacaagggctaccaggtggccccagccgagctggaatctattctgctgcaacaccccaacatcttcgatgccggcgttgcaggactgcccgatgatgatgctggcgaactgccagctgctgtggtggtgctggaacacggcaagaccatgaccgagaaagaaatcgtggactacgtggccagccaagtgaccaccgccaagaaactgagaggcggcgtggtgtttgtggacgaggtgccaaaaggcctgacaggcaagctggacgcccggaagatcagagagatcctgattaaggccaagaaaggcggcaagatcgccgtgtaatagctaactagacaaaacaccaaacaaacaagctgcgagccacggacttaaataattgagccttaaagaagaaaaacaaccaaaaaaaatctagatatcggatcccggg

SEQ ID NO: 3252 - DNA, 2831 bp, synthetic construct
  source 1..2831: mol_type = other DNA; note = Ana1.31
taatacgactcactatagggagaccctcgaaaaaaaacacaaacaccaattctttaagtggatgctctcaaactcagggaaacctaaatctagttatagacaaggcaatcctgagccaagccgaagtagtaattagtaagttaacaatagatgacttacaactaatcggaaggtgcagagactcgacgggagctaccctaacgtcaagacgagggtaaagagagagtccaattctcaaagccaataggcagtagcgaaagctgcaagagaatgaaaatccgtggctcgcagcaaacaccaaacaaaacaaacacaaaccaacaaaaattaaaacagcctgtgggttgatcccacccacaggcccattgggcgctagcactctggtatcacggtacctttgtgcgcctgttttataccccctcccccaactgtaacttagaagtaacacacaccgatcaacagtcagcgtggcacaccagccacgttttgatcaagcacttctgttaccccggactgagtatcaatagactgctcacgcggttgaaggagaaagcgttcgttatccggccaactacttcgaaaaacctagtaacaccgtggaagttgcagagtgtttcgctcagcactaccccagtgtagatcaggtcgatgagtcaccgcattccccacgggcgaccgtggcggtggctgcgttggcggcctgcccatggggaaacccatgggacgctctaatacagacatggtgcgaagagtctattgagctagttggtagtcctccggcccctgaatgcggctaatcctaactgcggagcacacaccctcaagccagagggcagtgtgtcgtaacgggcaactctgcagcggaaccgactactttgggtgtccgtgtttcattttattcctatactggctgcttatggtgacaattgagagatcgttaccatatagctattggattggccatccggtgactaatagagctattatatatccctttgttgggtttataccacttagcttgaaagaggttaaaacattacaattcattgttaagttgaatacagcaaaatggaagatgccaagaacatcaagaagggccctgctccattctaccctctggaagatggaacagccggcgagcagctgcacaaggccatgaagagatatgccctggtgcctggcacaatcgccttcacagatgcccacatcgaggtggacatcacctacgccgagtacttcgagatgtctgtgcggctggccgaagctatgaagcgctacggcctgaacaccaaccaccggatcgtcgtgtgcagcgagaacagcctgcagttcttcatgcctgtgctgggcgccctgttcatcggagttgctgtggcccctgccaacgacatctacaacgagcgcgagctgctgaacagcatgggcatctctcagcccaccgtggtgttcgtgtccaagaagggactgcagaaaatcctgaacgtgcagaagaagctgcccatcatccagaaaatcatcatcatggacagcaagaccgactaccagggcttccagagcatgtacaccttcgtgaccagccatctgccacctggcttcaacgagtacgacttcgtgcccgagagcttcgaccgggacaagacaatcgccctgatcatgaacagcagcggctctaccggactgcccaaaggtgttgccctgcctcatagaactgcctgcgtgcggtttagccacgccagagatcccatcttcggcaaccagatcatccccgacacagccatcctgagcgtggtgccttttcaccacggcttcggcatgttcaccacactgggctacctgatctgcggcttcagagtggtgctgatgtaccgcttcgaggaagaactgttcctgcggagcctgcaggactacaagatccagtctgctctgctggtgcctactctgttcagcttctttgccaagagcaccctgatcgataagtacgacctgagcaacctgcacgagatcgcctctggcggagcccctctgtctaaagaagtgggagaagccgtcgccaagcggttccatctgcctggcatcagacaaggctatggcctgaccgagacaaccagcgccattctgattacccctgagggcgacgataagcctggcgctgtgggaaaagtggtgccattcttcgaggccaaggtggtggatctggacaccggcaaaacactgggcgttaaccagaggggcgagctgtgtgttagaggccctatgatcatgagcggctacgtgaacaaccccgaggccacaaacgctctgatcgacaaggatggatggctgcacagcggcgacattgcctactgggacgaagatgagcacttcttcatcgtggaccggctgaagtccctgatcaagtacaagggctaccaggtggccccagccgagctggaatctattctgctgcaacaccccaacatcttcgatgccggcgttgcaggactgcccgatgatgatgctggcgaactgccagctgctgtggtggtgctggaacacggcaagaccatgaccgagaaagaaatcgtggactacgtggccagccaagtgaccaccgccaagaaactgagaggcggcgtggtgtttgtggacgaggtgccaaaaggcctgacaggcaagctggacgcccggaagatcagagagatcctgattaaggccaagaaaggcggcaagatcgccgtgtaatagctaactagacaaaacaccaaacaaacaagctgcgagccacggacttaaataattgagccttaaagaagaaaaaacaaccaaaaaaaatctagatatcggatcccggg

SEQ ID NO: 3253 - DNA, 2831 bp, synthetic construct
  source 1..2831: mol_type = other DNA; note = Ana1.32
taatacgactcactatagggagaccctcgaaaaaaaacacaaacaccattctttaagtggatgctctcaaactcagggaaacctaaatctagttatagacaaggcaatcctgagccaagccgaagtagtaattagtaagttaacaatagatgacttacaactaatcggaaggtgcagagactcgacgggagctaccctaacgtcaagacgagggtaaagagagagtccaattctcaaagccaataggcagtagcgaaagctgcaagagaatgaaaatccgtggctcgcagcaaacaccaaacaaaacaaacacaaaccaacaaaaattaaaacagcctgtgggttgatcccacccacaggcccattgggcgctagcactctggtatcacggtacctttgtgcgcctgttttataccccctcccccaactgtaacttagaagtaacacacaccgatcaacagtcagcgtggcacaccagccacgttttgatcaagcacttctgttaccccggactgagtatcaatagactgctcacgcggttgaaggagaaagcgttcgttatccggccaactacttcgaaaaacctagtaacaccgtggaagttgcagagtgtttcgctcagcactaccccagtgtagatcaggtcgatgagtcaccgcattccccacgggcgaccgtggcggtggctgcgttggcggcctgcccatggggaaacccatgggacgctctaatacagacatggtgcgaagagtctattgagctagttggtagtcctccggcccctgaatgcggctaatcctaactgcggagcacacaccctcaagccagagggcagtgtgtcgtaacgggcaactctgcagcggaaccgactactttgggtgtccgtgtttcattttattcctatactggctgcttatggtgacaattgagagatcgttaccatatagctattggattggccatccggtgactaatagagctattatatatccctttgttgggtttataccacttagcttgaaagaggttaaaacattacaattcattgttaagttgaatacagcaaaatggaagatgccaagaacatcaagaagggccctgctccattctaccctctggaagatggaacagccggcgagcagctgcacaaggccatgaagagatatgccctggtgcctggcacaatcgccttcacagatgcccacatcgaggtggacatcacctacgccgagtacttcgagatgtctgtgcggctggccgaagctatgaagcgctacggcctgaacaccaaccaccggatcgtcgtgtgcagcgagaacagcctgcagttcttcatgcctgtgctgggcgccctgttcatcggagttgctgtggcccctgccaacgacatctacaacgagcgcgagctgctgaacagcatgggcatctctcagcccaccgtggtgttcgtgtccaagaagggactgcagaaaatcctgaacgtgcagaagaagctgcccatcatccagaaaatcatcatcatggacagcaagaccgactaccagggcttccagagcatgtacaccttcgtgaccagccatctgccacctggcttcaacgagtacgacttcgtgcccgagagcttcgaccgggacaagacaatcgccctgatcatgaacagcagcggctctaccggactgcccaaaggtgttgccctgcctcatagaactgcctgcgtgcggtttagccacgccagagatcccatcttcggcaaccagatcatccccgacacagccatcctgagcgtggtgccttttcaccacggcttcggcatgttcaccacactgggctacctgatctgcggcttcagagtggtgctgatgtaccgcttcgaggaagaactgttcctgcggagcctgcaggactacaagatccagtctgctctgctggtgcctactctgttcagcttctttgccaagagcaccctgatcgataagtacgacctgagcaacctgcacgagatcgcctctggcggagcccctctgtctaaagaagtgggagaagccgtcgccaagcggttccatctgcctggcatcagacaaggctatggcctgaccgagacaaccagcgccattctgattacccctgagggcgacgataagcctggcgctgtgggaaaagtggtgccattcttcgaggccaaggtggtggatctggacaccggcaaaacactgggcgttaaccagaggggcgagctgtgtgttagaggccctatgatcatgagcggctacgtgaacaaccccgaggccacaaacgctctgatcgacaaggatggatggctgcacagcggcgacattgcctactgggacgaagatgagcacttcttcatcgtggaccggctgaagtccctgatcaagtacaagggctaccaggtggccccagccgagctggaatctattctgctgcaacaccccaacatcttcgatgccggcgttgcaggactgcccgatgatgatgctggcgaactgccagctgctgtggtggtgctggaacacggcaagaccatgaccgagaaagaaatcgtggactacgtggccagccaagtgaccaccgccaagaaactgagaggcggcgtggtgtttgtggacgaggtgccaaaaggcctgacaggcaagctggacgcccggaagatcagagagatcctgattaaggccaagaaaggcggcaagatcgccgtgtaatagctaactagacaaaacaccaaacaaacaagctgcgagccacggacttaaataattgagccttaaagaagaaaaaaacaaccaaaaaaaatctagatatcggatcccggg

SEQ ID NO: 3254 - DNA, 2831 bp, synthetic construct
  source 1..2831: mol_type = other DNA; note = Ana1.33
taatacgactcactatagggagaccctcgaaaaaaaacacaaacaccttctttaagtggatgctctcaaactcagggaaacctaaatctagttatagacaaggcaatcctgagccaagccgaagtagtaattagtaagttaacaatagatgacttacaactaatcggaaggtgcagagactcgacgggagctaccctaacgtcaagacgagggtaaagagagagtccaattctcaaagccaataggcagtagcgaaagctgcaagagaatgaaaatccgtggctcgcagcaaacaccaaacaaaacaaacacaaaccaacaaaaattaaaacagcctgtgggttgatcccacccacaggcccattgggcgctagcactctggtatcacggtacctttgtgcgcctgttttataccccctcccccaactgtaacttagaagtaacacacaccgatcaacagtcagcgtggcacaccagccacgttttgatcaagcacttctgttaccccggactgagtatcaatagactgctcacgcggttgaaggagaaagcgttcgttatccggccaactacttcgaaaaacctagtaacaccgtggaagttgcagagtgtttcgctcagcactaccccagtgtagatcaggtcgatgagtcaccgcattccccacgggcgaccgtggcggtggctgcgttggcggcctgcccatggggaaacccatgggacgctctaatacagacatggtgcgaagagtctattgagctagttggtagtcctccggcccctgaatgcggctaatcctaactgcggagcacacaccctcaagccagagggcagtgtgtcgtaacgggcaactctgcagcggaaccgactactttgggtgtccgtgtttcattttattcctatactggctgcttatggtgacaattgagagatcgttaccatatagctattggattggccatccggtgactaatagagctattatatatccctttgttgggtttataccacttagcttgaaagaggttaaaacattacaattcattgttaagttgaatacagcaaaatggaagatgccaagaacatcaagaagggccctgctccattctaccctctggaagatggaacagccggcgagcagctgcacaaggccatgaagagatatgccctggtgcctggcacaatcgccttcacagatgcccacatcgaggtggacatcacctacgccgagtacttcgagatgtctgtgcggctggccgaagctatgaagcgctacggcctgaacaccaaccaccggatcgtcgtgtgcagcgagaacagcctgcagttcttcatgcctgtgctgggcgccctgttcatcggagttgctgtggcccctgccaacgacatctacaacgagcgcgagctgctgaacagcatgggcatctctcagcccaccgtggtgttcgtgtccaagaagggactgcagaaaatcctgaacgtgcagaagaagctgcccatcatccagaaaatcatcatcatggacagcaagaccgactaccagggcttccagagcatgtacaccttcgtgaccagccatctgccacctggcttcaacgagtacgacttcgtgcccgagagcttcgaccgggacaagacaatcgccctgatcatgaacagcagcggctctaccggactgcccaaaggtgttgccctgcctcatagaactgcctgcgtgcggtttagccacgccagagatcccatcttcggcaaccagatcatccccgacacagccatcctgagcgtggtgccttttcaccacggcttcggcatgttcaccacactgggctacctgatctgcggcttcagagtggtgctgatgtaccgcttcgaggaagaactgttcctgcggagcctgcaggactacaagatccagtctgctctgctggtgcctactctgttcagcttctttgccaagagcaccctgatcgataagtacgacctgagcaacctgcacgagatcgcctctggcggagcccctctgtctaaagaagtgggagaagccgtcgccaagcggttccatctgcctggcatcagacaaggctatggcctgaccgagacaaccagcgccattctgattacccctgagggcgacgataagcctggcgctgtgggaaaagtggtgccattcttcgaggccaaggtggtggatctggacaccggcaaaacactgggcgttaaccagaggggcgagctgtgtgttagaggccctatgatcatgagcggctacgtgaacaaccccgaggccacaaacgctctgatcgacaaggatggatggctgcacagcggcgacattgcctactgggacgaagatgagcacttcttcatcgtggaccggctgaagtccctgatcaagtacaagggctaccaggtggccccagccgagctggaatctattctgctgcaacaccccaacatcttcgatgccggcgttgcaggactgcccgatgatgatgctggcgaactgccagctgctgtggtggtgctggaacacggcaagaccatgaccgagaaagaaatcgtggactacgtggccagccaagtgaccaccgccaagaaactgagaggcggcgtggtgtttgtggacgaggtgccaaaaggcctgacaggcaagctggacgcccggaagatcagagagatcctgattaaggccaagaaaggcggcaagatcgccgtgtaatagctaactagacaaaacaccaaacaaacaagctgcgagccacggacttaaataattgagccttaaagaagaaaaaaaacaaccaaaaaaaatctagatatcggatcccggg

SEQ ID NO: 3255 - DNA, 2831 bp, synthetic construct
  source 1..2831: mol_type = other DNA; note = Ana1.34
taatacgactcactatagggagaccctcgaaaaaaaacacaaacacctctttaagtggatgctctcaaactcagggaaacctaaatctagttatagacaaggcaatcctgagccaagccgaagtagtaattagtaagttaacaatagatgacttacaactaatcggaaggtgcagagactcgacgggagctaccctaacgtcaagacgagggtaaagagagagtccaattctcaaagccaataggcagtagcgaaagctgcaagagaatgaaaatccgtggctcgcagcaaacaccaaacaaaacaaacacaaaccaacaaaaattaaaacagcctgtgggttgatcccacccacaggcccattgggcgctagcactctggtatcacggtacctttgtgcgcctgttttataccccctcccccaactgtaacttagaagtaacacacaccgatcaacagtcagcgtggcacaccagccacgttttgatcaagcacttctgttaccccggactgagtatcaatagactgctcacgcggttgaaggagaaagcgttcgttatccggccaactacttcgaaaaacctagtaacaccgtggaagttgcagagtgtttcgctcagcactaccccagtgtagatcaggtcgatgagtcaccgcattccccacgggcgaccgtggcggtggctgcgttggcggcctgcccatggggaaacccatgggacgctctaatacagacatggtgcgaagagtctattgagctagttggtagtcctccggcccctgaatgcggctaatcctaactgcggagcacacaccctcaagccagagggcagtgtgtcgtaacgggcaactctgcagcggaaccgactactttgggtgtccgtgtttcattttattcctatactggctgcttatggtgacaattgagagatcgttaccatatagctattggattggccatccggtgactaatagagctattatatatccctttgttgggtttataccacttagcttgaaagaggttaaaacattacaattcattgttaagttgaatacagcaaaatggaagatgccaagaacatcaagaagggccctgctccattctaccctctggaagatggaacagccggcgagcagctgcacaaggccatgaagagatatgccctggtgcctggcacaatcgccttcacagatgcccacatcgaggtggacatcacctacgccgagtacttcgagatgtctgtgcggctggccgaagctatgaagcgctacggcctgaacaccaaccaccggatcgtcgtgtgcagcgagaacagcctgcagttcttcatgcctgtgctgggcgccctgttcatcggagttgctgtggcccctgccaacgacatctacaacgagcgcgagctgctgaacagcatgggcatctctcagcccaccgtggtgttcgtgtccaagaagggactgcagaaaatcctgaacgtgcagaagaagctgcccatcatccagaaaatcatcatcatggacagcaagaccgactaccagggcttccagagcatgtacaccttcgtgaccagccatctgccacctggcttcaacgagtacgacttcgtgcccgagagcttcgaccgggacaagacaatcgccctgatcatgaacagcagcggctctaccggactgcccaaaggtgttgccctgcctcatagaactgcctgcgtgcggtttagccacgccagagatcccatcttcggcaaccagatcatccccgacacagccatcctgagcgtggtgccttttcaccacggcttcggcatgttcaccacactgggctacctgatctgcggcttcagagtggtgctgatgtaccgcttcgaggaagaactgttcctgcggagcctgcaggactacaagatccagtctgctctgctggtgcctactctgttcagcttctttgccaagagcaccctgatcgataagtacgacctgagcaacctgcacgagatcgcctctggcggagcccctctgtctaaagaagtgggagaagccgtcgccaagcggttccatctgcctggcatcagacaaggctatggcctgaccgagacaaccagcgccattctgattacccctgagggcgacgataagcctggcgctgtgggaaaagtggtgccattcttcgaggccaaggtggtggatctggacaccggcaaaacactgggcgttaaccagaggggcgagctgtgtgttagaggccctatgatcatgagcggctacgtgaacaaccccgaggccacaaacgctctgatcgacaaggatggatggctgcacagcggcgacattgcctactgggacgaagatgagcacttcttcatcgtggaccggctgaagtccctgatcaagtacaagggctaccaggtggccccagccgagctggaatctattctgctgcaacaccccaacatcttcgatgccggcgttgcaggactgcccgatgatgatgctggcgaactgccagctgctgtggtggtgctggaacacggcaagaccatgaccgagaaagaaatcgtggactacgtggccagccaagtgaccaccgccaagaaactgagaggcggcgtggtgtttgtggacgaggtgccaaaaggcctgacaggcaagctggacgcccggaagatcagagagatcctgattaaggccaagaaaggcggcaagatcgccgtgtaatagctaactagacaaaacaccaaacaaacaagctgcgagccacggacttaaataattgagccttaaagaagaaataaaaacaaccaaaaaaaatctagatatcggatcccggg

SEQ ID NO: 3256 - DNA, 2831 bp, synthetic construct
  source 1..2831: mol_type = other DNA; note = Ana1.35
taatacgactcactatagggagaccctcgaaaaaaaacacaaacaccctttaagtggatgctctcaaactcagggaaacctaaatctagttatagacaaggcaatcctgagccaagccgaagtagtaattagtaagttaacaatagatgacttacaactaatcggaaggtgcagagactcgacgggagctaccctaacgtcaagacgagggtaaagagagagtccaattctcaaagccaataggcagtagcgaaagctgcaagagaatgaaaatccgtggctcgcagcaaacaccaaacaaaacaaacacaaaccaacaaaaattaaaacagcctgtgggttgatcccacccacaggcccattgggcgctagcactctggtatcacggtacctttgtgcgcctgttttataccccctcccccaactgtaacttagaagtaacacacaccgatcaacagtcagcgtggcacaccagccacgttttgatcaagcacttctgttaccccggactgagtatcaatagactgctcacgcggttgaaggagaaagcgttcgttatccggccaactacttcgaaaaacctagtaacaccgtggaagttgcagagtgtttcgctcagcactaccccagtgtagatcaggtcgatgagtcaccgcattccccacgggcgaccgtggcggtggctgcgttggcggcctgcccatggggaaacccatgggacgctctaatacagacatggtgcgaagagtctattgagctagttggtagtcctccggcccctgaatgcggctaatcctaactgcggagcacacaccctcaagccagagggcagtgtgtcgtaacgggcaactctgcagcggaaccgactactttgggtgtccgtgtttcattttattcctatactggctgcttatggtgacaattgagagatcgttaccatatagctattggattggccatccggtgactaatagagctattatatatccctttgttgggtttataccacttagcttgaaagaggttaaaacattacaattcattgttaagttgaatacagcaaaatggaagatgccaagaacatcaagaagggccctgctccattctaccctctggaagatggaacagccggcgagcagctgcacaaggccatgaagagatatgccctggtgcctggcacaatcgccttcacagatgcccacatcgaggtggacatcacctacgccgagtacttcgagatgtctgtgcggctggccgaagctatgaagcgctacggcctgaacaccaaccaccggatcgtcgtgtgcagcgagaacagcctgcagttcttcatgcctgtgctgggcgccctgttcatcggagttgctgtggcccctgccaacgacatctacaacgagcgcgagctgctgaacagcatgggcatctctcagcccaccgtggtgttcgtgtccaagaagggactgcagaaaatcctgaacgtgcagaagaagctgcccatcatccagaaaatcatcatcatggacagcaagaccgactaccagggcttccagagcatgtacaccttcgtgaccagccatctgccacctggcttcaacgagtacgacttcgtgcccgagagcttcgaccgggacaagacaatcgccctgatcatgaacagcagcggctctaccggactgcccaaaggtgttgccctgcctcatagaactgcctgcgtgcggtttagccacgccagagatcccatcttcggcaaccagatcatccccgacacagccatcctgagcgtggtgccttttcaccacggcttcggcatgttcaccacactgggctacctgatctgcggcttcagagtggtgctgatgtaccgcttcgaggaagaactgttcctgcggagcctgcaggactacaagatccagtctgctctgctggtgcctactctgttcagcttctttgccaagagcaccctgatcgataagtacgacctgagcaacctgcacgagatcgcctctggcggagcccctctgtctaaagaagtgggagaagccgtcgccaagcggttccatctgcctggcatcagacaaggctatggcctgaccgagacaaccagcgccattctgattacccctgagggcgacgataagcctggcgctgtgggaaaagtggtgccattcttcgaggccaaggtggtggatctggacaccggcaaaacactgggcgttaaccagaggggcgagctgtgtgttagaggccctatgatcatgagcggctacgtgaacaaccccgaggccacaaacgctctgatcgacaaggatggatggctgcacagcggcgacattgcctactgggacgaagatgagcacttcttcatcgtggaccggctgaagtccctgatcaagtacaagggctaccaggtggccccagccgagctggaatctattctgctgcaacaccccaacatcttcgatgccggcgttgcaggactgcccgatgatgatgctggcgaactgccagctgctgtggtggtgctggaacacggcaagaccatgaccgagaaagaaatcgtggactacgtggccagccaagtgaccaccgccaagaaactgagaggcggcgtggtgtttgtggacgaggtgccaaaaggcctgacaggcaagctggacgcccggaagatcagagagatcctgattaaggccaagaaaggcggcaagatcgccgtgtaatagctaactagacaaaacaccaaacaaacaagctgcgagccacggacttaaataattgagccttaaagaagaaattaaaaacaaccaaaaaaaatctagatatcggatcccggg

SEQ ID NO: 3257 - DNA, 2831 bp, synthetic construct
  source 1..2831: mol_type = other DNA; note = Ana1.36
taatacgactcactatagggagaccctcgaaaaaaaacacaaacacctttaagtggatgctctcaaactcagggaaacctaaatctagttatagacaaggcaatcctgagccaagccgaagtagtaattagtaagttaacaatagatgacttacaactaatcggaaggtgcagagactcgacgggagctaccctaacgtcaagacgagggtaaagagagagtccaattctcaaagccaataggcagtagcgaaagctgcaagagaatgaaaatccgtggctcgcagcaaacaccaaacaaaacaaacacaaaccaacaaaaattaaaacagcctgtgggttgatcccacccacaggcccattgggcgctagcactctggtatcacggtacctttgtgcgcctgttttataccccctcccccaactgtaacttagaagtaacacacaccgatcaacagtcagcgtggcacaccagccacgttttgatcaagcacttctgttaccccggactgagtatcaatagactgctcacgcggttgaaggagaaagcgttcgttatccggccaactacttcgaaaaacctagtaacaccgtggaagttgcagagtgtttcgctcagcactaccccagtgtagatcaggtcgatgagtcaccgcattccccacgggcgaccgtggcggtggctgcgttggcggcctgcccatggggaaacccatgggacgctctaatacagacatggtgcgaagagtctattgagctagttggtagtcctccggcccctgaatgcggctaatcctaactgcggagcacacaccctcaagccagagggcagtgtgtcgtaacgggcaactctgcagcggaaccgactactttgggtgtccgtgtttcattttattcctatactggctgcttatggtgacaattgagagatcgttaccatatagctattggattggccatccggtgactaatagagctattatatatccctttgttgggtttataccacttagcttgaaagaggttaaaacattacaattcattgttaagttgaatacagcaaaatggaagatgccaagaacatcaagaagggccctgctccattctaccctctggaagatggaacagccggcgagcagctgcacaaggccatgaagagatatgccctggtgcctggcacaatcgccttcacagatgcccacatcgaggtggacatcacctacgccgagtacttcgagatgtctgtgcggctggccgaagctatgaagcgctacggcctgaacaccaaccaccggatcgtcgtgtgcagcgagaacagcctgcagttcttcatgcctgtgctgggcgccctgttcatcggagttgctgtggcccctgccaacgacatctacaacgagcgcgagctgctgaacagcatgggcatctctcagcccaccgtggtgttcgtgtccaagaagggactgcagaaaatcctgaacgtgcagaagaagctgcccatcatccagaaaatcatcatcatggacagcaagaccgactaccagggcttccagagcatgtacaccttcgtgaccagccatctgccacctggcttcaacgagtacgacttcgtgcccgagagcttcgaccgggacaagacaatcgccctgatcatgaacagcagcggctctaccggactgcccaaaggtgttgccctgcctcatagaactgcctgcgtgcggtttagccacgccagagatcccatcttcggcaaccagatcatccccgacacagccatcctgagcgtggtgccttttcaccacggcttcggcatgttcaccacactgggctacctgatctgcggcttcagagtggtgctgatgtaccgcttcgaggaagaactgttcctgcggagcctgcaggactacaagatccagtctgctctgctggtgcctactctgttcagcttctttgccaagagcaccctgatcgataagtacgacctgagcaacctgcacgagatcgcctctggcggagcccctctgtctaaagaagtgggagaagccgtcgccaagcggttccatctgcctggcatcagacaaggctatggcctgaccgagacaaccagcgccattctgattacccctgagggcgacgataagcctggcgctgtgggaaaagtggtgccattcttcgaggccaaggtggtggatctggacaccggcaaaacactgggcgttaaccagaggggcgagctgtgtgttagaggccctatgatcatgagcggctacgtgaacaaccccgaggccacaaacgctctgatcgacaaggatggatggctgcacagcggcgacattgcctactgggacgaagatgagcacttcttcatcgtggaccggctgaagtccctgatcaagtacaagggctaccaggtggccccagccgagctggaatctattctgctgcaacaccccaacatcttcgatgccggcgttgcaggactgcccgatgatgatgctggcgaactgccagctgctgtggtggtgctggaacacggcaagaccatgaccgagaaagaaatcgtggactacgtggccagccaagtgaccaccgccaagaaactgagaggcggcgtggtgtttgtggacgaggtgccaaaaggcctgacaggcaagctggacgcccggaagatcagagagatcctgattaaggccaagaaaggcggcaagatcgccgtgtaatagctaactagacaaaacaccaaacaaacaagctgcgagccacggacttaaataattgagccttaaagaagaaattcaaaaacaaccaaaaaaaatctagatatcggatcccggg

SEQ ID NO: 3258 - DNA, 2831 bp, synthetic construct
  source 1..2831: mol_type = other DNA; note = Ana1.37
taatacgactcactatagggagaccctcgaaaaaaaacacaaacaccttaagtggatgctctcaaactcagggaaacctaaatctagttatagacaaggcaatcctgagccaagccgaagtagtaattagtaagttaacaatagatgacttacaactaatcggaaggtgcagagactcgacgggagctaccctaacgtcaagacgagggtaaagagagagtccaattctcaaagccaataggcagtagcgaaagctgcaagagaatgaaaatccgtggctcgcagcaaacaccaaacaaaacaaacacaaaccaacaaaaattaaaacagcctgtgggttgatcccacccacaggcccattgggcgctagcactctggtatcacggtacctttgtgcgcctgttttataccccctcccccaactgtaacttagaagtaacacacaccgatcaacagtcagcgtggcacaccagccacgttttgatcaagcacttctgttaccccggactgagtatcaatagactgctcacgcggttgaaggagaaagcgttcgttatccggccaactacttcgaaaaacctagtaacaccgtggaagttgcagagtgtttcgctcagcactaccccagtgtagatcaggtcgatgagtcaccgcattccccacgggcgaccgtggcggtggctgcgttggcggcctgcccatggggaaacccatgggacgctctaatacagacatggtgcgaagagtctattgagctagttggtagtcctccggcccctgaatgcggctaatcctaactgcggagcacacaccctcaagccagagggcagtgtgtcgtaacgggcaactctgcagcggaaccgactactttgggtgtccgtgtttcattttattcctatactggctgcttatggtgacaattgagagatcgttaccatatagctattggattggccatccggtgactaatagagctattatatatccctttgttgggtttataccacttagcttgaaagaggttaaaacattacaattcattgttaagttgaatacagcaaaatggaagatgccaagaacatcaagaagggccctgctccattctaccctctggaagatggaacagccggcgagcagctgcacaaggccatgaagagatatgccctggtgcctggcacaatcgccttcacagatgcccacatcgaggtggacatcacctacgccgagtacttcgagatgtctgtgcggctggccgaagctatgaagcgctacggcctgaacaccaaccaccggatcgtcgtgtgcagcgagaacagcctgcagttcttcatgcctgtgctgggcgccctgttcatcggagttgctgtggcccctgccaacgacatctacaacgagcgcgagctgctgaacagcatgggcatctctcagcccaccgtggtgttcgtgtccaagaagggactgcagaaaatcctgaacgtgcagaagaagctgcccatcatccagaaaatcatcatcatggacagcaagaccgactaccagggcttccagagcatgtacaccttcgtgaccagccatctgccacctggcttcaacgagtacgacttcgtgcccgagagcttcgaccgggacaagacaatcgccctgatcatgaacagcagcggctctaccggactgcccaaaggtgttgccctgcctcatagaactgcctgcgtgcggtttagccacgccagagatcccatcttcggcaaccagatcatccccgacacagccatcctgagcgtggtgccttttcaccacggcttcggcatgttcaccacactgggctacctgatctgcggcttcagagtggtgctgatgtaccgcttcgaggaagaactgttcctgcggagcctgcaggactacaagatccagtctgctctgctggtgcctactctgttcagcttctttgccaagagcaccctgatcgataagtacgacctgagcaacctgcacgagatcgcctctggcggagcccctctgtctaaagaagtgggagaagccgtcgccaagcggttccatctgcctggcatcagacaaggctatggcctgaccgagacaaccagcgccattctgattacccctgagggcgacgataagcctggcgctgtgggaaaagtggtgccattcttcgaggccaaggtggtggatctggacaccggcaaaacactgggcgttaaccagaggggcgagctgtgtgttagaggccctatgatcatgagcggctacgtgaacaaccccgaggccacaaacgctctgatcgacaaggatggatggctgcacagcggcgacattgcctactgggacgaagatgagcacttcttcatcgtggaccggctgaagtccctgatcaagtacaagggctaccaggtggccccagccgagctggaatctattctgctgcaacaccccaacatcttcgatgccggcgttgcaggactgcccgatgatgatgctggcgaactgccagctgctgtggtggtgctggaacacggcaagaccatgaccgagaaagaaatcgtggactacgtggccagccaagtgaccaccgccaagaaactgagaggcggcgtggtgtttgtggacgaggtgccaaaaggcctgacaggcaagctggacgcccggaagatcagagagatcctgattaaggccaagaaaggcggcaagatcgccgtgtaatagctaactagacaaaacaccaaacaaacaagctgcgagccacggacttaaataattgagccttaaagaagaaattctaaaaacaaccaaaaaaaatctagatatcggatcccggg

SEQ ID NO: 3259 - DNA, 2831 bp, synthetic construct
  source 1..2831: mol_type = other DNA; note = Ana1.38
taatacgactcactatagggagaccctcgaaaaaaaacacaaacacctaagtggatgctctcaaactcagggaaacctaaatctagttatagacaaggcaatcctgagccaagccgaagtagtaattagtaagttaacaatagatgacttacaactaatcggaaggtgcagagactcgacgggagctaccctaacgtcaagacgagggtaaagagagagtccaattctcaaagccaataggcagtagcgaaagctgcaagagaatgaaaatccgtggctcgcagcaaacaccaaacaaaacaaacacaaaccaacaaaaattaaaacagcctgtgggttgatcccacccacaggcccattgggcgctagcactctggtatcacggtacctttgtgcgcctgttttataccccctcccccaactgtaacttagaagtaacacacaccgatcaacagtcagcgtggcacaccagccacgttttgatcaagcacttctgttaccccggactgagtatcaatagactgctcacgcggttgaaggagaaagcgttcgttatccggccaactacttcgaaaaacctagtaacaccgtggaagttgcagagtgtttcgctcagcactaccccagtgtagatcaggtcgatgagtcaccgcattccccacgggcgaccgtggcggtggctgcgttggcggcctgcccatggggaaacccatgggacgctctaatacagacatggtgcgaagagtctattgagctagttggtagtcctccggcccctgaatgcggctaatcctaactgcggagcacacaccctcaagccagagggcagtgtgtcgtaacgggcaactctgcagcggaaccgactactttgggtgtccgtgtttcattttattcctatactggctgcttatggtgacaattgagagatcgttaccatatagctattggattggccatccggtgactaatagagctattatatatccctttgttgggtttataccacttagcttgaaagaggttaaaacattacaattcattgttaagttgaatacagcaaaatggaagatgccaagaacatcaagaagggccctgctccattctaccctctggaagatggaacagccggcgagcagctgcacaaggccatgaagagatatgccctggtgcctggcacaatcgccttcacagatgcccacatcgaggtggacatcacctacgccgagtacttcgagatgtctgtgcggctggccgaagctatgaagcgctacggcctgaacaccaaccaccggatcgtcgtgtgcagcgagaacagcctgcagttcttcatgcctgtgctgggcgccctgttcatcggagttgctgtggcccctgccaacgacatctacaacgagcgcgagctgctgaacagcatgggcatctctcagcccaccgtggtgttcgtgtccaagaagggactgcagaaaatcctgaacgtgcagaagaagctgcccatcatccagaaaatcatcatcatggacagcaagaccgactaccagggcttccagagcatgtacaccttcgtgaccagccatctgccacctggcttcaacgagtacgacttcgtgcccgagagcttcgaccgggacaagacaatcgccctgatcatgaacagcagcggctctaccggactgcccaaaggtgttgccctgcctcatagaactgcctgcgtgcggtttagccacgccagagatcccatcttcggcaaccagatcatccccgacacagccatcctgagcgtggtgccttttcaccacggcttcggcatgttcaccacactgggctacctgatctgcggcttcagagtggtgctgatgtaccgcttcgaggaagaactgttcctgcggagcctgcaggactacaagatccagtctgctctgctggtgcctactctgttcagcttctttgccaagagcaccctgatcgataagtacgacctgagcaacctgcacgagatcgcctctggcggagcccctctgtctaaagaagtgggagaagccgtcgccaagcggttccatctgcctggcatcagacaaggctatggcctgaccgagacaaccagcgccattctgattacccctgagggcgacgataagcctggcgctgtgggaaaagtggtgccattcttcgaggccaaggtggtggatctggacaccggcaaaacactgggcgttaaccagaggggcgagctgtgtgttagaggccctatgatcatgagcggctacgtgaacaaccccgaggccacaaacgctctgatcgacaaggatggatggctgcacagcggcgacattgcctactgggacgaagatgagcacttcttcatcgtggaccggctgaagtccctgatcaagtacaagggctaccaggtggccccagccgagctggaatctattctgctgcaacaccccaacatcttcgatgccggcgttgcaggactgcccgatgatgatgctggcgaactgccagctgctgtggtggtgctggaacacggcaagaccatgaccgagaaagaaatcgtggactacgtggccagccaagtgaccaccgccaagaaactgagaggcggcgtggtgtttgtggacgaggtgccaaaaggcctgacaggcaagctggacgcccggaagatcagagagatcctgattaaggccaagaaaggcggcaagatcgccgtgtaatagctaactagacaaaacaccaaacaaacaagctgcgagccacggacttaaataattgagccttaaagaagaaattcttaaaaacaaccaaaaaaaatctagatatcggatcccggg

SEQ ID NO: 3260 - DNA, 2831 bp, synthetic construct
  source 1..2831: mol_type = other DNA; note = Ana1.39
taatacgactcactatagggagaccctcgaaaaaaaacacaaacaccaagtggatgctctcaaactcagggaaacctaaatctagttatagacaaggcaatcctgagccaagccgaagtagtaattagtaagttaacaatagatgacttacaactaatcggaaggtgcagagactcgacgggagctaccctaacgtcaagacgagggtaaagagagagtccaattctcaaagccaataggcagtagcgaaagctgcaagagaatgaaaatccgtggctcgcagcaaacaccaaacaaaacaaacacaaaccaacaaaaattaaaacagcctgtgggttgatcccacccacaggcccattgggcgctagcactctggtatcacggtacctttgtgcgcctgttttataccccctcccccaactgtaacttagaagtaacacacaccgatcaacagtcagcgtggcacaccagccacgttttgatcaagcacttctgttaccccggactgagtatcaatagactgctcacgcggttgaaggagaaagcgttcgttatccggccaactacttcgaaaaacctagtaacaccgtggaagttgcagagtgtttcgctcagcactaccccagtgtagatcaggtcgatgagtcaccgcattccccacgggcgaccgtggcggtggctgcgttggcggcctgcccatggggaaacccatgggacgctctaatacagacatggtgcgaagagtctattgagctagttggtagtcctccggcccctgaatgcggctaatcctaactgcggagcacacaccctcaagccagagggcagtgtgtcgtaacgggcaactctgcagcggaaccgactactttgggtgtccgtgtttcattttattcctatactggctgcttatggtgacaattgagagatcgttaccatatagctattggattggccatccggtgactaatagagctattatatatccctttgttgggtttataccacttagcttgaaagaggttaaaacattacaattcattgttaagttgaatacagcaaaatggaagatgccaagaacatcaagaagggccctgctccattctaccctctggaagatggaacagccggcgagcagctgcacaaggccatgaagagatatgccctggtgcctggcacaatcgccttcacagatgcccacatcgaggtggacatcacctacgccgagtacttcgagatgtctgtgcggctggccgaagctatgaagcgctacggcctgaacaccaaccaccggatcgtcgtgtgcagcgagaacagcctgcagttcttcatgcctgtgctgggcgccctgttcatcggagttgctgtggcccctgccaacgacatctacaacgagcgcgagctgctgaacagcatgggcatctctcagcccaccgtggtgttcgtgtccaagaagggactgcagaaaatcctgaacgtgcagaagaagctgcccatcatccagaaaatcatcatcatggacagcaagaccgactaccagggcttccagagcatgtacaccttcgtgaccagccatctgccacctggcttcaacgagtacgacttcgtgcccgagagcttcgaccgggacaagacaatcgccctgatcatgaacagcagcggctctaccggactgcccaaaggtgttgccctgcctcatagaactgcctgcgtgcggtttagccacgccagagatcccatcttcggcaaccagatcatccccgacacagccatcctgagcgtggtgccttttcaccacggcttcggcatgttcaccacactgggctacctgatctgcggcttcagagtggtgctgatgtaccgcttcgaggaagaactgttcctgcggagcctgcaggactacaagatccagtctgctctgctggtgcctactctgttcagcttctttgccaagagcaccctgatcgataagtacgacctgagcaacctgcacgagatcgcctctggcggagcccctctgtctaaagaagtgggagaagccgtcgccaagcggttccatctgcctggcatcagacaaggctatggcctgaccgagacaaccagcgccattctgattacccctgagggcgacgataagcctggcgctgtgggaaaagtggtgccattcttcgaggccaaggtggtggatctggacaccggcaaaacactgggcgttaaccagaggggcgagctgtgtgttagaggccctatgatcatgagcggctacgtgaacaaccccgaggccacaaacgctctgatcgacaaggatggatggctgcacagcggcgacattgcctactgggacgaagatgagcacttcttcatcgtggaccggctgaagtccctgatcaagtacaagggctaccaggtggccccagccgagctggaatctattctgctgcaacaccccaacatcttcgatgccggcgttgcaggactgcccgatgatgatgctggcgaactgccagctgctgtggtggtgctggaacacggcaagaccatgaccgagaaagaaatcgtggactacgtggccagccaagtgaccaccgccaagaaactgagaggcggcgtggtgtttgtggacgaggtgccaaaaggcctgacaggcaagctggacgcccggaagatcagagagatcctgattaaggccaagaaaggcggcaagatcgccgtgtaatagctaactagacaaaacaccaaacaaacaagctgcgagccacggacttaaataattgagccttaaagaagaaattctttaaaaacaaccaaaaaaaatctagatatcggatcccggg

SEQ ID NO: 3261 - DNA, 2831 bp, synthetic construct
  source 1..2831: mol_type = other DNA; note = Ana1.40
taatacgactcactatagggagaccctcgaaaaaaaacacaaacaccagtggatgctctcaaactcagggaaacctaaatctagttatagacaaggcaatcctgagccaagccgaagtagtaattagtaagttaacaatagatgacttacaactaatcggaaggtgcagagactcgacgggagctaccctaacgtcaagacgagggtaaagagagagtccaattctcaaagccaataggcagtagcgaaagctgcaagagaatgaaaatccgtggctcgcagcaaacaccaaacaaaacaaacacaaaccaacaaaaattaaaacagcctgtgggttgatcccacccacaggcccattgggcgctagcactctggtatcacggtacctttgtgcgcctgttttataccccctcccccaactgtaacttagaagtaacacacaccgatcaacagtcagcgtggcacaccagccacgttttgatcaagcacttctgttaccccggactgagtatcaatagactgctcacgcggttgaaggagaaagcgttcgttatccggccaactacttcgaaaaacctagtaacaccgtggaagttgcagagtgtttcgctcagcactaccccagtgtagatcaggtcgatgagtcaccgcattccccacgggcgaccgtggcggtggctgcgttggcggcctgcccatggggaaacccatgggacgctctaatacagacatggtgcgaagagtctattgagctagttggtagtcctccggcccctgaatgcggctaatcctaactgcggagcacacaccctcaagccagagggcagtgtgtcgtaacgggcaactctgcagcggaaccgactactttgggtgtccgtgtttcattttattcctatactggctgcttatggtgacaattgagagatcgttaccatatagctattggattggccatccggtgactaatagagctattatatatccctttgttgggtttataccacttagcttgaaagaggttaaaacattacaattcattgttaagttgaatacagcaaaatggaagatgccaagaacatcaagaagggccctgctccattctaccctctggaagatggaacagccggcgagcagctgcacaaggccatgaagagatatgccctggtgcctggcacaatcgccttcacagatgcccacatcgaggtggacatcacctacgccgagtacttcgagatgtctgtgcggctggccgaagctatgaagcgctacggcctgaacaccaaccaccggatcgtcgtgtgcagcgagaacagcctgcagttcttcatgcctgtgctgggcgccctgttcatcggagttgctgtggcccctgccaacgacatctacaacgagcgcgagctgctgaacagcatgggcatctctcagcccaccgtggtgttcgtgtccaagaagggactgcagaaaatcctgaacgtgcagaagaagctgcccatcatccagaaaatcatcatcatggacagcaagaccgactaccagggcttccagagcatgtacaccttcgtgaccagccatctgccacctggcttcaacgagtacgacttcgtgcccgagagcttcgaccgggacaagacaatcgccctgatcatgaacagcagcggctctaccggactgcccaaaggtgttgccctgcctcatagaactgcctgcgtgcggtttagccacgccagagatcccatcttcggcaaccagatcatccccgacacagccatcctgagcgtggtgccttttcaccacggcttcggcatgttcaccacactgggctacctgatctgcggcttcagagtggtgctgatgtaccgcttcgaggaagaactgttcctgcggagcctgcaggactacaagatccagtctgctctgctggtgcctactctgttcagcttctttgccaagagcaccctgatcgataagtacgacctgagcaacctgcacgagatcgcctctggcggagcccctctgtctaaagaagtgggagaagccgtcgccaagcggttccatctgcctggcatcagacaaggctatggcctgaccgagacaaccagcgccattctgattacccctgagggcgacgataagcctggcgctgtgggaaaagtggtgccattcttcgaggccaaggtggtggatctggacaccggcaaaacactgggcgttaaccagaggggcgagctgtgtgttagaggccctatgatcatgagcggctacgtgaacaaccccgaggccacaaacgctctgatcgacaaggatggatggctgcacagcggcgacattgcctactgggacgaagatgagcacttcttcatcgtggaccggctgaagtccctgatcaagtacaagggctaccaggtggccccagccgagctggaatctattctgctgcaacaccccaacatcttcgatgccggcgttgcaggactgcccgatgatgatgctggcgaactgccagctgctgtggtggtgctggaacacggcaagaccatgaccgagaaagaaatcgtggactacgtggccagccaagtgaccaccgccaagaaactgagaggcggcgtggtgtttgtggacgaggtgccaaaaggcctgacaggcaagctggacgcccggaagatcagagagatcctgattaaggccaagaaaggcggcaagatcgccgtgtaatagctaactagacaaaacaccaaacaaacaagctgcgagccacggacttaaataattgagccttaaagaagaaattctttaaaaaacaaccaaaaaaaatctagatatcggatcccggg

SEQ ID NO: 3262 - DNA, 2831 bp, synthetic construct
  source 1..2831: mol_type = other DNA; note = Ana1.41
taatacgactcactatagggagaccctcgaaaaaaaacacaaacaccgtggatgctctcaaactcagggaaacctaaatctagttatagacaaggcaatcctgagccaagccgaagtagtaattagtaagttaacaatagatgacttacaactaatcggaaggtgcagagactcgacgggagctaccctaacgtcaagacgagggtaaagagagagtccaattctcaaagccaataggcagtagcgaaagctgcaagagaatgaaaatccgtggctcgcagcaaacaccaaacaaaacaaacacaaaccaacaaaaattaaaacagcctgtgggttgatcccacccacaggcccattgggcgctagcactctggtatcacggtacctttgtgcgcctgttttataccccctcccccaactgtaacttagaagtaacacacaccgatcaacagtcagcgtggcacaccagccacgttttgatcaagcacttctgttaccccggactgagtatcaatagactgctcacgcggttgaaggagaaagcgttcgttatccggccaactacttcgaaaaacctagtaacaccgtggaagttgcagagtgtttcgctcagcactaccccagtgtagatcaggtcgatgagtcaccgcattccccacgggcgaccgtggcggtggctgcgttggcggcctgcccatggggaaacccatgggacgctctaatacagacatggtgcgaagagtctattgagctagttggtagtcctccggcccctgaatgcggctaatcctaactgcggagcacacaccctcaagccagagggcagtgtgtcgtaacgggcaactctgcagcggaaccgactactttgggtgtccgtgtttcattttattcctatactggctgcttatggtgacaattgagagatcgttaccatatagctattggattggccatccggtgactaatagagctattatatatccctttgttgggtttataccacttagcttgaaagaggttaaaacattacaattcattgttaagttgaatacagcaaaatggaagatgccaagaacatcaagaagggccctgctccattctaccctctggaagatggaacagccggcgagcagctgcacaaggccatgaagagatatgccctggtgcctggcacaatcgccttcacagatgcccacatcgaggtggacatcacctacgccgagtacttcgagatgtctgtgcggctggccgaagctatgaagcgctacggcctgaacaccaaccaccggatcgtcgtgtgcagcgagaacagcctgcagttcttcatgcctgtgctgggcgccctgttcatcggagttgctgtggcccctgccaacgacatctacaacgagcgcgagctgctgaacagcatgggcatctctcagcccaccgtggtgttcgtgtccaagaagggactgcagaaaatcctgaacgtgcagaagaagctgcccatcatccagaaaatcatcatcatggacagcaagaccgactaccagggcttccagagcatgtacaccttcgtgaccagccatctgccacctggcttcaacgagtacgacttcgtgcccgagagcttcgaccgggacaagacaatcgccctgatcatgaacagcagcggctctaccggactgcccaaaggtgttgccctgcctcatagaactgcctgcgtgcggtttagccacgccagagatcccatcttcggcaaccagatcatccccgacacagccatcctgagcgtggtgccttttcaccacggcttcggcatgttcaccacactgggctacctgatctgcggcttcagagtggtgctgatgtaccgcttcgaggaagaactgttcctgcggagcctgcaggactacaagatccagtctgctctgctggtgcctactctgttcagcttctttgccaagagcaccctgatcgataagtacgacctgagcaacctgcacgagatcgcctctggcggagcccctctgtctaaagaagtgggagaagccgtcgccaagcggttccatctgcctggcatcagacaaggctatggcctgaccgagacaaccagcgccattctgattacccctgagggcgacgataagcctggcgctgtgggaaaagtggtgccattcttcgaggccaaggtggtggatctggacaccggcaaaacactgggcgttaaccagaggggcgagctgtgtgttagaggccctatgatcatgagcggctacgtgaacaaccccgaggccacaaacgctctgatcgacaaggatggatggctgcacagcggcgacattgcctactgggacgaagatgagcacttcttcatcgtggaccggctgaagtccctgatcaagtacaagggctaccaggtggccccagccgagctggaatctattctgctgcaacaccccaacatcttcgatgccggcgttgcaggactgcccgatgatgatgctggcgaactgccagctgctgtggtggtgctggaacacggcaagaccatgaccgagaaagaaatcgtggactacgtggccagccaagtgaccaccgccaagaaactgagaggcggcgtggtgtttgtggacgaggtgccaaaaggcctgacaggcaagctggacgcccggaagatcagagagatcctgattaaggccaagaaaggcggcaagatcgccgtgtaatagctaactagacaaaacaccaaacaaacaagctgcgagccacggacttaaataattgagccttaaagaagaaattctttaaaaaaacaaccaaaaaaaatctagatatcggatcccggg

SEQ ID NO: 3263 - DNA, 2831 bp, synthetic construct
  source 1..2831: mol_type = other DNA; note = Ana1.42
taatacgactcactatagggagaccctcgaaaaaaaacacaaacacctggatgctctcaaactcagggaaacctaaatctagttatagacaaggcaatcctgagccaagccgaagtagtaattagtaagttaacaatagatgacttacaactaatcggaaggtgcagagactcgacgggagctaccctaacgtcaagacgagggtaaagagagagtccaattctcaaagccaataggcagtagcgaaagctgcaagagaatgaaaatccgtggctcgcagcaaacaccaaacaaaacaaacacaaaccaacaaaaattaaaacagcctgtgggttgatcccacccacaggcccattgggcgctagcactctggtatcacggtacctttgtgcgcctgttttataccccctcccccaactgtaacttagaagtaacacacaccgatcaacagtcagcgtggcacaccagccacgttttgatcaagcacttctgttaccccggactgagtatcaatagactgctcacgcggttgaaggagaaagcgttcgttatccggccaactacttcgaaaaacctagtaacaccgtggaagttgcagagtgtttcgctcagcactaccccagtgtagatcaggtcgatgagtcaccgcattccccacgggcgaccgtggcggtggctgcgttggcggcctgcccatggggaaacccatgggacgctctaatacagacatggtgcgaagagtctattgagctagttggtagtcctccggcccctgaatgcggctaatcctaactgcggagcacacaccctcaagccagagggcagtgtgtcgtaacgggcaactctgcagcggaaccgactactttgggtgtccgtgtttcattttattcctatactggctgcttatggtgacaattgagagatcgttaccatatagctattggattggccatccggtgactaatagagctattatatatccctttgttgggtttataccacttagcttgaaagaggttaaaacattacaattcattgttaagttgaatacagcaaaatggaagatgccaagaacatcaagaagggccctgctccattctaccctctggaagatggaacagccggcgagcagctgcacaaggccatgaagagatatgccctggtgcctggcacaatcgccttcacagatgcccacatcgaggtggacatcacctacgccgagtacttcgagatgtctgtgcggctggccgaagctatgaagcgctacggcctgaacaccaaccaccggatcgtcgtgtgcagcgagaacagcctgcagttcttcatgcctgtgctgggcgccctgttcatcggagttgctgtggcccctgccaacgacatctacaacgagcgcgagctgctgaacagcatgggcatctctcagcccaccgtggtgttcgtgtccaagaagggactgcagaaaatcctgaacgtgcagaagaagctgcccatcatccagaaaatcatcatcatggacagcaagaccgactaccagggcttccagagcatgtacaccttcgtgaccagccatctgccacctggcttcaacgagtacgacttcgtgcccgagagcttcgaccgggacaagacaatcgccctgatcatgaacagcagcggctctaccggactgcccaaaggtgttgccctgcctcatagaactgcctgcgtgcggtttagccacgccagagatcccatcttcggcaaccagatcatccccgacacagccatcctgagcgtggtgccttttcaccacggcttcggcatgttcaccacactgggctacctgatctgcggcttcagagtggtgctgatgtaccgcttcgaggaagaactgttcctgcggagcctgcaggactacaagatccagtctgctctgctggtgcctactctgttcagcttctttgccaagagcaccctgatcgataagtacgacctgagcaacctgcacgagatcgcctctggcggagcccctctgtctaaagaagtgggagaagccgtcgccaagcggttccatctgcctggcatcagacaaggctatggcctgaccgagacaaccagcgccattctgattacccctgagggcgacgataagcctggcgctgtgggaaaagtggtgccattcttcgaggccaaggtggtggatctggacaccggcaaaacactgggcgttaaccagaggggcgagctgtgtgttagaggccctatgatcatgagcggctacgtgaacaaccccgaggccacaaacgctctgatcgacaaggatggatggctgcacagcggcgacattgcctactgggacgaagatgagcacttcttcatcgtggaccggctgaagtccctgatcaagtacaagggctaccaggtggccccagccgagctggaatctattctgctgcaacaccccaacatcttcgatgccggcgttgcaggactgcccgatgatgatgctggcgaactgccagctgctgtggtggtgctggaacacggcaagaccatgaccgagaaagaaatcgtggactacgtggccagccaagtgaccaccgccaagaaactgagaggcggcgtggtgtttgtggacgaggtgccaaaaggcctgacaggcaagctggacgcccggaagatcagagagatcctgattaaggccaagaaaggcggcaagatcgccgtgtaatagctaactagacaaaacaccaaacaaacaagctgcgagccacggacttaaataattgagccttaaagaagaaattctttaagaaaaacaaccaaaaaaaatctagatatcggatcccggg

SEQ ID NO: 3264 - DNA, 2831 bp, synthetic construct
  source 1..2831: mol_type = other DNA; note = Ana1.43
taatacgactcactatagggagaccctcgaaaaaaaacacaaacaccggatgctctcaaactcagggaaacctaaatctagttatagacaaggcaatcctgagccaagccgaagtagtaattagtaagttaacaatagatgacttacaactaatcggaaggtgcagagactcgacgggagctaccctaacgtcaagacgagggtaaagagagagtccaattctcaaagccaataggcagtagcgaaagctgcaagagaatgaaaatccgtggctcgcagcaaacaccaaacaaaacaaacacaaaccaacaaaaattaaaacagcctgtgggttgatcccacccacaggcccattgggcgctagcactctggtatcacggtacctttgtgcgcctgttttataccccctcccccaactgtaacttagaagtaacacacaccgatcaacagtcagcgtggcacaccagccacgttttgatcaagcacttctgttaccccggactgagtatcaatagactgctcacgcggttgaaggagaaagcgttcgttatccggccaactacttcgaaaaacctagtaacaccgtggaagttgcagagtgtttcgctcagcactaccccagtgtagatcaggtcgatgagtcaccgcattccccacgggcgaccgtggcggtggctgcgttggcggcctgcccatggggaaacccatgggacgctctaatacagacatggtgcgaagagtctattgagctagttggtagtcctccggcccctgaatgcggctaatcctaactgcggagcacacaccctcaagccagagggcagtgtgtcgtaacgggcaactctgcagcggaaccgactactttgggtgtccgtgtttcattttattcctatactggctgcttatggtgacaattgagagatcgttaccatatagctattggattggccatccggtgactaatagagctattatatatccctttgttgggtttataccacttagcttgaaagaggttaaaacattacaattcattgttaagttgaatacagcaaaatggaagatgccaagaacatcaagaagggccctgctccattctaccctctggaagatggaacagccggcgagcagctgcacaaggccatgaagagatatgccctggtgcctggcacaatcgccttcacagatgcccacatcgaggtggacatcacctacgccgagtacttcgagatgtctgtgcggctggccgaagctatgaagcgctacggcctgaacaccaaccaccggatcgtcgtgtgcagcgagaacagcctgcagttcttcatgcctgtgctgggcgccctgttcatcggagttgctgtggcccctgccaacgacatctacaacgagcgcgagctgctgaacagcatgggcatctctcagcccaccgtggtgttcgtgtccaagaagggactgcagaaaatcctgaacgtgcagaagaagctgcccatcatccagaaaatcatcatcatggacagcaagaccgactaccagggcttccagagcatgtacaccttcgtgaccagccatctgccacctggcttcaacgagtacgacttcgtgcccgagagcttcgaccgggacaagacaatcgccctgatcatgaacagcagcggctctaccggactgcccaaaggtgttgccctgcctcatagaactgcctgcgtgcggtttagccacgccagagatcccatcttcggcaaccagatcatccccgacacagccatcctgagcgtggtgccttttcaccacggcttcggcatgttcaccacactgggctacctgatctgcggcttcagagtggtgctgatgtaccgcttcgaggaagaactgttcctgcggagcctgcaggactacaagatccagtctgctctgctggtgcctactctgttcagcttctttgccaagagcaccctgatcgataagtacgacctgagcaacctgcacgagatcgcctctggcggagcccctctgtctaaagaagtgggagaagccgtcgccaagcggttccatctgcctggcatcagacaaggctatggcctgaccgagacaaccagcgccattctgattacccctgagggcgacgataagcctggcgctgtgggaaaagtggtgccattcttcgaggccaaggtggtggatctggacaccggcaaaacactgggcgttaaccagaggggcgagctgtgtgttagaggccctatgatcatgagcggctacgtgaacaaccccgaggccacaaacgctctgatcgacaaggatggatggctgcacagcggcgacattgcctactgggacgaagatgagcacttcttcatcgtggaccggctgaagtccctgatcaagtacaagggctaccaggtggccccagccgagctggaatctattctgctgcaacaccccaacatcttcgatgccggcgttgcaggactgcccgatgatgatgctggcgaactgccagctgctgtggtggtgctggaacacggcaagaccatgaccgagaaagaaatcgtggactacgtggccagccaagtgaccaccgccaagaaactgagaggcggcgtggtgtttgtggacgaggtgccaaaaggcctgacaggcaagctggacgcccggaagatcagagagatcctgattaaggccaagaaaggcggcaagatcgccgtgtaatagctaactagacaaaacaccaaacaaacaagctgcgagccacggacttaaataattgagccttaaagaagaaattctttaagtaaaaacaaccaaaaaaaatctagatatcggatcccggg

SEQ ID NO: 3265 - DNA, 2831 bp, synthetic construct
  source 1..2831: mol_type = other DNA; note = Ana1.44
taatacgactcactatagggagaccctcgaaaaaaaacacaaacaccgatgctctcaaactcagggaaacctaaatctagttatagacaaggcaatcctgagccaagccgaagtagtaattagtaagttaacaatagatgacttacaactaatcggaaggtgcagagactcgacgggagctaccctaacgtcaagacgagggtaaagagagagtccaattctcaaagccaataggcagtagcgaaagctgcaagagaatgaaaatccgtggctcgcagcaaacaccaaacaaaacaaacacaaaccaacaaaaattaaaacagcctgtgggttgatcccacccacaggcccattgggcgctagcactctggtatcacggtacctttgtgcgcctgttttataccccctcccccaactgtaacttagaagtaacacacaccgatcaacagtcagcgtggcacaccagccacgttttgatcaagcacttctgttaccccggactgagtatcaatagactgctcacgcggttgaaggagaaagcgttcgttatccggccaactacttcgaaaaacctagtaacaccgtggaagttgcagagtgtttcgctcagcactaccccagtgtagatcaggtcgatgagtcaccgcattccccacgggcgaccgtggcggtggctgcgttggcggcctgcccatggggaaacccatgggacgctctaatacagacatggtgcgaagagtctattgagctagttggtagtcctccggcccctgaatgcggctaatcctaactgcggagcacacaccctcaagccagagggcagtgtgtcgtaacgggcaactctgcagcggaaccgactactttgggtgtccgtgtttcattttattcctatactggctgcttatggtgacaattgagagatcgttaccatatagctattggattggccatccggtgactaatagagctattatatatccctttgttgggtttataccacttagcttgaaagaggttaaaacattacaattcattgttaagttgaatacagcaaaatggaagatgccaagaacatcaagaagggccctgctccattctaccctctggaagatggaacagccggcgagcagctgcacaaggccatgaagagatatgccctggtgcctggcacaatcgccttcacagatgcccacatcgaggtggacatcacctacgccgagtacttcgagatgtctgtgcggctggccgaagctatgaagcgctacggcctgaacaccaaccaccggatcgtcgtgtgcagcgagaacagcctgcagttcttcatgcctgtgctgggcgccctgttcatcggagttgctgtggcccctgccaacgacatctacaacgagcgcgagctgctgaacagcatgggcatctctcagcccaccgtggtgttcgtgtccaagaagggactgcagaaaatcctgaacgtgcagaagaagctgcccatcatccagaaaatcatcatcatggacagcaagaccgactaccagggcttccagagcatgtacaccttcgtgaccagccatctgccacctggcttcaacgagtacgacttcgtgcccgagagcttcgaccgggacaagacaatcgccctgatcatgaacagcagcggctctaccggactgcccaaaggtgttgccctgcctcatagaactgcctgcgtgcggtttagccacgccagagatcccatcttcggcaaccagatcatccccgacacagccatcctgagcgtggtgccttttcaccacggcttcggcatgttcaccacactgggctacctgatctgcggcttcagagtggtgctgatgtaccgcttcgaggaagaactgttcctgcggagcctgcaggactacaagatccagtctgctctgctggtgcctactctgttcagcttctttgccaagagcaccctgatcgataagtacgacctgagcaacctgcacgagatcgcctctggcggagcccctctgtctaaagaagtgggagaagccgtcgccaagcggttccatctgcctggcatcagacaaggctatggcctgaccgagacaaccagcgccattctgattacccctgagggcgacgataagcctggcgctgtgggaaaagtggtgccattcttcgaggccaaggtggtggatctggacaccggcaaaacactgggcgttaaccagaggggcgagctgtgtgttagaggccctatgatcatgagcggctacgtgaacaaccccgaggccacaaacgctctgatcgacaaggatggatggctgcacagcggcgacattgcctactgggacgaagatgagcacttcttcatcgtggaccggctgaagtccctgatcaagtacaagggctaccaggtggccccagccgagctggaatctattctgctgcaacaccccaacatcttcgatgccggcgttgcaggactgcccgatgatgatgctggcgaactgccagctgctgtggtggtgctggaacacggcaagaccatgaccgagaaagaaatcgtggactacgtggccagccaagtgaccaccgccaagaaactgagaggcggcgtggtgtttgtggacgaggtgccaaaaggcctgacaggcaagctggacgcccggaagatcagagagatcctgattaaggccaagaaaggcggcaagatcgccgtgtaatagctaactagacaaaacaccaaacaaacaagctgcgagccacggacttaaataattgagccttaaagaagaaattctttaagtgaaaaacaaccaaaaaaaatctagatatcggatcccggg

SEQ ID NO: 3266 - DNA, 2831 bp, synthetic construct
  source 1..2831: mol_type = other DNA; note = Ana1.45
taatacgactcactatagggagaccctcgaaaaaaaacacaaacaccatgctctcaaactcagggaaacctaaatctagttatagacaaggcaatcctgagccaagccgaagtagtaattagtaagttaacaatagatgacttacaactaatcggaaggtgcagagactcgacgggagctaccctaacgtcaagacgagggtaaagagagagtccaattctcaaagccaataggcagtagcgaaagctgcaagagaatgaaaatccgtggctcgcagcaaacaccaaacaaaacaaacacaaaccaacaaaaattaaaacagcctgtgggttgatcccacccacaggcccattgggcgctagcactctggtatcacggtacctttgtgcgcctgttttataccccctcccccaactgtaacttagaagtaacacacaccgatcaacagtcagcgtggcacaccagccacgttttgatcaagcacttctgttaccccggactgagtatcaatagactgctcacgcggttgaaggagaaagcgttcgttatccggccaactacttcgaaaaacctagtaacaccgtggaagttgcagagtgtttcgctcagcactaccccagtgtagatcaggtcgatgagtcaccgcattccccacgggcgaccgtggcggtggctgcgttggcggcctgcccatggggaaacccatgggacgctctaatacagacatggtgcgaagagtctattgagctagttggtagtcctccggcccctgaatgcggctaatcctaactgcggagcacacaccctcaagccagagggcagtgtgtcgtaacgggcaactctgcagcggaaccgactactttgggtgtccgtgtttcattttattcctatactggctgcttatggtgacaattgagagatcgttaccatatagctattggattggccatccggtgactaatagagctattatatatccctttgttgggtttataccacttagcttgaaagaggttaaaacattacaattcattgttaagttgaatacagcaaaatggaagatgccaagaacatcaagaagggccctgctccattctaccctctggaagatggaacagccggcgagcagctgcacaaggccatgaagagatatgccctggtgcctggcacaatcgccttcacagatgcccacatcgaggtggacatcacctacgccgagtacttcgagatgtctgtgcggctggccgaagctatgaagcgctacggcctgaacaccaaccaccggatcgtcgtgtgcagcgagaacagcctgcagttcttcatgcctgtgctgggcgccctgttcatcggagttgctgtggcccctgccaacgacatctacaacgagcgcgagctgctgaacagcatgggcatctctcagcccaccgtggtgttcgtgtccaagaagggactgcagaaaatcctgaacgtgcagaagaagctgcccatcatccagaaaatcatcatcatggacagcaagaccgactaccagggcttccagagcatgtacaccttcgtgaccagccatctgccacctggcttcaacgagtacgacttcgtgcccgagagcttcgaccgggacaagacaatcgccctgatcatgaacagcagcggctctaccggactgcccaaaggtgttgccctgcctcatagaactgcctgcgtgcggtttagccacgccagagatcccatcttcggcaaccagatcatccccgacacagccatcctgagcgtggtgccttttcaccacggcttcggcatgttcaccacactgggctacctgatctgcggcttcagagtggtgctgatgtaccgcttcgaggaagaactgttcctgcggagcctgcaggactacaagatccagtctgctctgctggtgcctactctgttcagcttctttgccaagagcaccctgatcgataagtacgacctgagcaacctgcacgagatcgcctctggcggagcccctctgtctaaagaagtgggagaagccgtcgccaagcggttccatctgcctggcatcagacaaggctatggcctgaccgagacaaccagcgccattctgattacccctgagggcgacgataagcctggcgctgtgggaaaagtggtgccattcttcgaggccaaggtggtggatctggacaccggcaaaacactgggcgttaaccagaggggcgagctgtgtgttagaggccctatgatcatgagcggctacgtgaacaaccccgaggccacaaacgctctgatcgacaaggatggatggctgcacagcggcgacattgcctactgggacgaagatgagcacttcttcatcgtggaccggctgaagtccctgatcaagtacaagggctaccaggtggccccagccgagctggaatctattctgctgcaacaccccaacatcttcgatgccggcgttgcaggactgcccgatgatgatgctggcgaactgccagctgctgtggtggtgctggaacacggcaagaccatgaccgagaaagaaatcgtggactacgtggccagccaagtgaccaccgccaagaaactgagaggcggcgtggtgtttgtggacgaggtgccaaaaggcctgacaggcaagctggacgcccggaagatcagagagatcctgattaaggccaagaaaggcggcaagatcgccgtgtaatagctaactagacaaaacaccaaacaaacaagctgcgagccacggacttaaataattgagccttaaagaagaaattctttaagtggaaaaacaaccaaaaaaaatctagatatcggatcccggg

SEQ ID NO: 3267 - DNA, 2831 bp, synthetic construct
  source 1..2831: mol_type = other DNA; note = Ana1.46
taatacgactcactatagggagaccctcgaaaaaaaacacaaacacctgctctcaaactcagggaaacctaaatctagttatagacaaggcaatcctgagccaagccgaagtagtaattagtaagttaacaatagatgacttacaactaatcggaaggtgcagagactcgacgggagctaccctaacgtcaagacgagggtaaagagagagtccaattctcaaagccaataggcagtagcgaaagctgcaagagaatgaaaatccgtggctcgcagcaaacaccaaacaaaacaaacacaaaccaacaaaaattaaaacagcctgtgggttgatcccacccacaggcccattgggcgctagcactctggtatcacggtacctttgtgcgcctgttttataccccctcccccaactgtaacttagaagtaacacacaccgatcaacagtcagcgtggcacaccagccacgttttgatcaagcacttctgttaccccggactgagtatcaatagactgctcacgcggttgaaggagaaagcgttcgttatccggccaactacttcgaaaaacctagtaacaccgtggaagttgcagagtgtttcgctcagcactaccccagtgtagatcaggtcgatgagtcaccgcattccccacgggcgaccgtggcggtggctgcgttggcggcctgcccatggggaaacccatgggacgctctaatacagacatggtgcgaagagtctattgagctagttggtagtcctccggcccctgaatgcggctaatcctaactgcggagcacacaccctcaagccagagggcagtgtgtcgtaacgggcaactctgcagcggaaccgactactttgggtgtccgtgtttcattttattcctatactggctgcttatggtgacaattgagagatcgttaccatatagctattggattggccatccggtgactaatagagctattatatatccctttgttgggtttataccacttagcttgaaagaggttaaaacattacaattcattgttaagttgaatacagcaaaatggaagatgccaagaacatcaagaagggccctgctccattctaccctctggaagatggaacagccggcgagcagctgcacaaggccatgaagagatatgccctggtgcctggcacaatcgccttcacagatgcccacatcgaggtggacatcacctacgccgagtacttcgagatgtctgtgcggctggccgaagctatgaagcgctacggcctgaacaccaaccaccggatcgtcgtgtgcagcgagaacagcctgcagttcttcatgcctgtgctgggcgccctgttcatcggagttgctgtggcccctgccaacgacatctacaacgagcgcgagctgctgaacagcatgggcatctctcagcccaccgtggtgttcgtgtccaagaagggactgcagaaaatcctgaacgtgcagaagaagctgcccatcatccagaaaatcatcatcatggacagcaagaccgactaccagggcttccagagcatgtacaccttcgtgaccagccatctgccacctggcttcaacgagtacgacttcgtgcccgagagcttcgaccgggacaagacaatcgccctgatcatgaacagcagcggctctaccggactgcccaaaggtgttgccctgcctcatagaactgcctgcgtgcggtttagccacgccagagatcccatcttcggcaaccagatcatccccgacacagccatcctgagcgtggtgccttttcaccacggcttcggcatgttcaccacactgggctacctgatctgcggcttcagagtggtgctgatgtaccgcttcgaggaagaactgttcctgcggagcctgcaggactacaagatccagtctgctctgctggtgcctactctgttcagcttctttgccaagagcaccctgatcgataagtacgacctgagcaacctgcacgagatcgcctctggcggagcccctctgtctaaagaagtgggagaagccgtcgccaagcggttccatctgcctggcatcagacaaggctatggcctgaccgagacaaccagcgccattctgattacccctgagggcgacgataagcctggcgctgtgggaaaagtggtgccattcttcgaggccaaggtggtggatctggacaccggcaaaacactgggcgttaaccagaggggcgagctgtgtgttagaggccctatgatcatgagcggctacgtgaacaaccccgaggccacaaacgctctgatcgacaaggatggatggctgcacagcggcgacattgcctactgggacgaagatgagcacttcttcatcgtggaccggctgaagtccctgatcaagtacaagggctaccaggtggccccagccgagctggaatctattctgctgcaacaccccaacatcttcgatgccggcgttgcaggactgcccgatgatgatgctggcgaactgccagctgctgtggtggtgctggaacacggcaagaccatgaccgagaaagaaatcgtggactacgtggccagccaagtgaccaccgccaagaaactgagaggcggcgtggtgtttgtggacgaggtgccaaaaggcctgacaggcaagctggacgcccggaagatcagagagatcctgattaaggccaagaaaggcggcaagatcgccgtgtaatagctaactagacaaaacaccaaacaaacaagctgcgagccacggacttaaataattgagccttaaagaagaaattctttaagtggaaaaaacaaccaaaaaaaatctagatatcggatcccggg

SEQ ID NO: 3268 - DNA, 2831 bp, synthetic construct
  source 1..2831: mol_type = other DNA; note = Ana1.47
taatacgactcactatagggagaccctcgaaaaaaaacacaaacaccgctctcaaactcagggaaacctaaatctagttatagacaaggcaatcctgagccaagccgaagtagtaattagtaagttaacaatagatgacttacaactaatcggaaggtgcagagactcgacgggagctaccctaacgtcaagacgagggtaaagagagagtccaattctcaaagccaataggcagtagcgaaagctgcaagagaatgaaaatccgtggctcgcagcaaacaccaaacaaaacaaacacaaaccaacaaaaattaaaacagcctgtgggttgatcccacccacaggcccattgggcgctagcactctggtatcacggtacctttgtgcgcctgttttataccccctcccccaactgtaacttagaagtaacacacaccgatcaacagtcagcgtggcacaccagccacgttttgatcaagcacttctgttaccccggactgagtatcaatagactgctcacgcggttgaaggagaaagcgttcgttatccggccaactacttcgaaaaacctagtaacaccgtggaagttgcagagtgtttcgctcagcactaccccagtgtagatcaggtcgatgagtcaccgcattccccacgggcgaccgtggcggtggctgcgttggcggcctgcccatggggaaacccatgggacgctctaatacagacatggtgcgaagagtctattgagctagttggtagtcctccggcccctgaatgcggctaatcctaactgcggagcacacaccctcaagccagagggcagtgtgtcgtaacgggcaactctgcagcggaaccgactactttgggtgtccgtgtttcattttattcctatactggctgcttatggtgacaattgagagatcgttaccatatagctattggattggccatccggtgactaatagagctattatatatccctttgttgggtttataccacttagcttgaaagaggttaaaacattacaattcattgttaagttgaatacagcaaaatggaagatgccaagaacatcaagaagggccctgctccattctaccctctggaagatggaacagccggcgagcagctgcacaaggccatgaagagatatgccctggtgcctggcacaatcgccttcacagatgcccacatcgaggtggacatcacctacgccgagtacttcgagatgtctgtgcggctggccgaagctatgaagcgctacggcctgaacaccaaccaccggatcgtcgtgtgcagcgagaacagcctgcagttcttcatgcctgtgctgggcgccctgttcatcggagttgctgtggcccctgccaacgacatctacaacgagcgcgagctgctgaacagcatgggcatctctcagcccaccgtggtgttcgtgtccaagaagggactgcagaaaatcctgaacgtgcagaagaagctgcccatcatccagaaaatcatcatcatggacagcaagaccgactaccagggcttccagagcatgtacaccttcgtgaccagccatctgccacctggcttcaacgagtacgacttcgtgcccgagagcttcgaccgggacaagacaatcgccctgatcatgaacagcagcggctctaccggactgcccaaaggtgttgccctgcctcatagaactgcctgcgtgcggtttagccacgccagagatcccatcttcggcaaccagatcatccccgacacagccatcctgagcgtggtgccttttcaccacggcttcggcatgttcaccacactgggctacctgatctgcggcttcagagtggtgctgatgtaccgcttcgaggaagaactgttcctgcggagcctgcaggactacaagatccagtctgctctgctggtgcctactctgttcagcttctttgccaagagcaccctgatcgataagtacgacctgagcaacctgcacgagatcgcctctggcggagcccctctgtctaaagaagtgggagaagccgtcgccaagcggttccatctgcctggcatcagacaaggctatggcctgaccgagacaaccagcgccattctgattacccctgagggcgacgataagcctggcgctgtgggaaaagtggtgccattcttcgaggccaaggtggtggatctggacaccggcaaaacactgggcgttaaccagaggggcgagctgtgtgttagaggccctatgatcatgagcggctacgtgaacaaccccgaggccacaaacgctctgatcgacaaggatggatggctgcacagcggcgacattgcctactgggacgaagatgagcacttcttcatcgtggaccggctgaagtccctgatcaagtacaagggctaccaggtggccccagccgagctggaatctattctgctgcaacaccccaacatcttcgatgccggcgttgcaggactgcccgatgatgatgctggcgaactgccagctgctgtggtggtgctggaacacggcaagaccatgaccgagaaagaaatcgtggactacgtggccagccaagtgaccaccgccaagaaactgagaggcggcgtggtgtttgtggacgaggtgccaaaaggcctgacaggcaagctggacgcccggaagatcagagagatcctgattaaggccaagaaaggcggcaagatcgccgtgtaatagctaactagacaaaacaccaaacaaacaagctgcgagccacggacttaaataattgagccttaaagaagaaattctttaagtggataaaaacaaccaaaaaaaatctagatatcggatcccggg

SEQ ID NO: 3269 - DNA, 2831 bp, synthetic construct
  source 1..2831: mol_type = other DNA; note = Ana1.48
taatacgactcactatagggagaccctcgaaaaaaaacacaaacaccctctcaaactcagggaaacctaaatctagttatagacaaggcaatcctgagccaagccgaagtagtaattagtaagttaacaatagatgacttacaactaatcggaaggtgcagagactcgacgggagctaccctaacgtcaagacgagggtaaagagagagtccaattctcaaagccaataggcagtagcgaaagctgcaagagaatgaaaatccgtggctcgcagcaaacaccaaacaaaacaaacacaaaccaacaaaaattaaaacagcctgtgggttgatcccacccacaggcccattgggcgctagcactctggtatcacggtacctttgtgcgcctgttttataccccctcccccaactgtaacttagaagtaacacacaccgatcaacagtcagcgtggcacaccagccacgttttgatcaagcacttctgttaccccggactgagtatcaatagactgctcacgcggttgaaggagaaagcgttcgttatccggccaactacttcgaaaaacctagtaacaccgtggaagttgcagagtgtttcgctcagcactaccccagtgtagatcaggtcgatgagtcaccgcattccccacgggcgaccgtggcggtggctgcgttggcggcctgcccatggggaaacccatgggacgctctaatacagacatggtgcgaagagtctattgagctagttggtagtcctccggcccctgaatgcggctaatcctaactgcggagcacacaccctcaagccagagggcagtgtgtcgtaacgggcaactctgcagcggaaccgactactttgggtgtccgtgtttcattttattcctatactggctgcttatggtgacaattgagagatcgttaccatatagctattggattggccatccggtgactaatagagctattatatatccctttgttgggtttataccacttagcttgaaagaggttaaaacattacaattcattgttaagttgaatacagcaaaatggaagatgccaagaacatcaagaagggccctgctccattctaccctctggaagatggaacagccggcgagcagctgcacaaggccatgaagagatatgccctggtgcctggcacaatcgccttcacagatgcccacatcgaggtggacatcacctacgccgagtacttcgagatgtctgtgcggctggccgaagctatgaagcgctacggcctgaacaccaaccaccggatcgtcgtgtgcagcgagaacagcctgcagttcttcatgcctgtgctgggcgccctgttcatcggagttgctgtggcccctgccaacgacatctacaacgagcgcgagctgctgaacagcatgggcatctctcagcccaccgtggtgttcgtgtccaagaagggactgcagaaaatcctgaacgtgcagaagaagctgcccatcatccagaaaatcatcatcatggacagcaagaccgactaccagggcttccagagcatgtacaccttcgtgaccagccatctgccacctggcttcaacgagtacgacttcgtgcccgagagcttcgaccgggacaagacaatcgccctgatcatgaacagcagcggctctaccggactgcccaaaggtgttgccctgcctcatagaactgcctgcgtgcggtttagccacgccagagatcccatcttcggcaaccagatcatccccgacacagccatcctgagcgtggtgccttttcaccacggcttcggcatgttcaccacactgggctacctgatctgcggcttcagagtggtgctgatgtaccgcttcgaggaagaactgttcctgcggagcctgcaggactacaagatccagtctgctctgctggtgcctactctgttcagcttctttgccaagagcaccctgatcgataagtacgacctgagcaacctgcacgagatcgcctctggcggagcccctctgtctaaagaagtgggagaagccgtcgccaagcggttccatctgcctggcatcagacaaggctatggcctgaccgagacaaccagcgccattctgattacccctgagggcgacgataagcctggcgctgtgggaaaagtggtgccattcttcgaggccaaggtggtggatctggacaccggcaaaacactgggcgttaaccagaggggcgagctgtgtgttagaggccctatgatcatgagcggctacgtgaacaaccccgaggccacaaacgctctgatcgacaaggatggatggctgcacagcggcgacattgcctactgggacgaagatgagcacttcttcatcgtggaccggctgaagtccctgatcaagtacaagggctaccaggtggccccagccgagctggaatctattctgctgcaacaccccaacatcttcgatgccggcgttgcaggactgcccgatgatgatgctggcgaactgccagctgctgtggtggtgctggaacacggcaagaccatgaccgagaaagaaatcgtggactacgtggccagccaagtgaccaccgccaagaaactgagaggcggcgtggtgtttgtggacgaggtgccaaaaggcctgacaggcaagctggacgcccggaagatcagagagatcctgattaaggccaagaaaggcggcaagatcgccgtgtaatagctaactagacaaaacaccaaacaaacaagctgcgagccacggacttaaataattgagccttaaagaagaaattctttaagtggatgaaaaacaaccaaaaaaaatctagatatcggatcccggg

SEQ ID NO: 3270 - DNA, 2831 bp, synthetic construct
  source 1..2831: mol_type = other DNA; note = Ana1.49
taatacgactcactatagggagaccctcgaaaaaaaacacaaacacctctcaaactcagggaaacctaaatctagttatagacaaggcaatcctgagccaagccgaagtagtaattagtaagttaacaatagatgacttacaactaatcggaaggtgcagagactcgacgggagctaccctaacgtcaagacgagggtaaagagagagtccaattctcaaagccaataggcagtagcgaaagctgcaagagaatgaaaatccgtggctcgcagcaaacaccaaacaaaacaaacacaaaccaacaaaaattaaaacagcctgtgggttgatcccacccacaggcccattgggcgctagcactctggtatcacggtacctttgtgcgcctgttttataccccctcccccaactgtaacttagaagtaacacacaccgatcaacagtcagcgtggcacaccagccacgttttgatcaagcacttctgttaccccggactgagtatcaatagactgctcacgcggttgaaggagaaagcgttcgttatccggccaactacttcgaaaaacctagtaacaccgtggaagttgcagagtgtttcgctcagcactaccccagtgtagatcaggtcgatgagtcaccgcattccccacgggcgaccgtggcggtggctgcgttggcggcctgcccatggggaaacccatgggacgctctaatacagacatggtgcgaagagtctattgagctagttggtagtcctccggcccctgaatgcggctaatcctaactgcggagcacacaccctcaagccagagggcagtgtgtcgtaacgggcaactctgcagcggaaccgactactttgggtgtccgtgtttcattttattcctatactggctgcttatggtgacaattgagagatcgttaccatatagctattggattggccatccggtgactaatagagctattatatatccctttgttgggtttataccacttagcttgaaagaggttaaaacattacaattcattgttaagttgaatacagcaaaatggaagatgccaagaacatcaagaagggccctgctccattctaccctctggaagatggaacagccggcgagcagctgcacaaggccatgaagagatatgccctggtgcctggcacaatcgccttcacagatgcccacatcgaggtggacatcacctacgccgagtacttcgagatgtctgtgcggctggccgaagctatgaagcgctacggcctgaacaccaaccaccggatcgtcgtgtgcagcgagaacagcctgcagttcttcatgcctgtgctgggcgccctgttcatcggagttgctgtggcccctgccaacgacatctacaacgagcgcgagctgctgaacagcatgggcatctctcagcccaccgtggtgttcgtgtccaagaagggactgcagaaaatcctgaacgtgcagaagaagctgcccatcatccagaaaatcatcatcatggacagcaagaccgactaccagggcttccagagcatgtacaccttcgtgaccagccatctgccacctggcttcaacgagtacgacttcgtgcccgagagcttcgaccgggacaagacaatcgccctgatcatgaacagcagcggctctaccggactgcccaaaggtgttgccctgcctcatagaactgcctgcgtgcggtttagccacgccagagatcccatcttcggcaaccagatcatccccgacacagccatcctgagcgtggtgccttttcaccacggcttcggcatgttcaccacactgggctacctgatctgcggcttcagagtggtgctgatgtaccgcttcgaggaagaactgttcctgcggagcctgcaggactacaagatccagtctgctctgctggtgcctactctgttcagcttctttgccaagagcaccctgatcgataagtacgacctgagcaacctgcacgagatcgcctctggcggagcccctctgtctaaagaagtgggagaagccgtcgccaagcggttccatctgcctggcatcagacaaggctatggcctgaccgagacaaccagcgccattctgattacccctgagggcgacgataagcctggcgctgtgggaaaagtggtgccattcttcgaggccaaggtggtggatctggacaccggcaaaacactgggcgttaaccagaggggcgagctgtgtgttagaggccctatgatcatgagcggctacgtgaacaaccccgaggccacaaacgctctgatcgacaaggatggatggctgcacagcggcgacattgcctactgggacgaagatgagcacttcttcatcgtggaccggctgaagtccctgatcaagtacaagggctaccaggtggccccagccgagctggaatctattctgctgcaacaccccaacatcttcgatgccggcgttgcaggactgcccgatgatgatgctggcgaactgccagctgctgtggtggtgctggaacacggcaagaccatgaccgagaaagaaatcgtggactacgtggccagccaagtgaccaccgccaagaaactgagaggcggcgtggtgtttgtggacgaggtgccaaaaggcctgacaggcaagctggacgcccggaagatcagagagatcctgattaaggccaagaaaggcggcaagatcgccgtgtaatagctaactagacaaaacaccaaacaaacaagctgcgagccacggacttaaataattgagccttaaagaagaaattctttaagtggatgcaaaaacaaccaaaaaaaatctagatatcggatcccggg

SEQ ID NO: 3271 - DNA, 2831 bp, synthetic construct
  source 1..2831: mol_type = other DNA; note = Ana1.50
taatacgactcactatagggagaccctcgaaaaaaaacacaaacaccctcaaactcagggaaacctaaatctagttatagacaaggcaatcctgagccaagccgaagtagtaattagtaagttaacaatagatgacttacaactaatcggaaggtgcagagactcgacgggagctaccctaacgtcaagacgagggtaaagagagagtccaattctcaaagccaataggcagtagcgaaagctgcaagagaatgaaaatccgtggctcgcagcaaacaccaaacaaaacaaacacaaaccaacaaaaattaaaacagcctgtgggttgatcccacccacaggcccattgggcgctagcactctggtatcacggtacctttgtgcgcctgttttataccccctcccccaactgtaacttagaagtaacacacaccgatcaacagtcagcgtggcacaccagccacgttttgatcaagcacttctgttaccccggactgagtatcaatagactgctcacgcggttgaaggagaaagcgttcgttatccggccaactacttcgaaaaacctagtaacaccgtggaagttgcagagtgtttcgctcagcactaccccagtgtagatcaggtcgatgagtcaccgcattccccacgggcgaccgtggcggtggctgcgttggcggcctgcccatggggaaacccatgggacgctctaatacagacatggtgcgaagagtctattgagctagttggtagtcctccggcccctgaatgcggctaatcctaactgcggagcacacaccctcaagccagagggcagtgtgtcgtaacgggcaactctgcagcggaaccgactactttgggtgtccgtgtttcattttattcctatactggctgcttatggtgacaattgagagatcgttaccatatagctattggattggccatccggtgactaatagagctattatatatccctttgttgggtttataccacttagcttgaaagaggttaaaacattacaattcattgttaagttgaatacagcaaaatggaagatgccaagaacatcaagaagggccctgctccattctaccctctggaagatggaacagccggcgagcagctgcacaaggccatgaagagatatgccctggtgcctggcacaatcgccttcacagatgcccacatcgaggtggacatcacctacgccgagtacttcgagatgtctgtgcggctggccgaagctatgaagcgctacggcctgaacaccaaccaccggatcgtcgtgtgcagcgagaacagcctgcagttcttcatgcctgtgctgggcgccctgttcatcggagttgctgtggcccctgccaacgacatctacaacgagcgcgagctgctgaacagcatgggcatctctcagcccaccgtggtgttcgtgtccaagaagggactgcagaaaatcctgaacgtgcagaagaagctgcccatcatccagaaaatcatcatcatggacagcaagaccgactaccagggcttccagagcatgtacaccttcgtgaccagccatctgccacctggcttcaacgagtacgacttcgtgcccgagagcttcgaccgggacaagacaatcgccctgatcatgaacagcagcggctctaccggactgcccaaaggtgttgccctgcctcatagaactgcctgcgtgcggtttagccacgccagagatcccatcttcggcaaccagatcatccccgacacagccatcctgagcgtggtgccttttcaccacggcttcggcatgttcaccacactgggctacctgatctgcggcttcagagtggtgctgatgtaccgcttcgaggaagaactgttcctgcggagcctgcaggactacaagatccagtctgctctgctggtgcctactctgttcagcttctttgccaagagcaccctgatcgataagtacgacctgagcaacctgcacgagatcgcctctggcggagcccctctgtctaaagaagtgggagaagccgtcgccaagcggttccatctgcctggcatcagacaaggctatggcctgaccgagacaaccagcgccattctgattacccctgagggcgacgataagcctggcgctgtgggaaaagtggtgccattcttcgaggccaaggtggtggatctggacaccggcaaaacactgggcgttaaccagaggggcgagctgtgtgttagaggccctatgatcatgagcggctacgtgaacaaccccgaggccacaaacgctctgatcgacaaggatggatggctgcacagcggcgacattgcctactgggacgaagatgagcacttcttcatcgtggaccggctgaagtccctgatcaagtacaagggctaccaggtggccccagccgagctggaatctattctgctgcaacaccccaacatcttcgatgccggcgttgcaggactgcccgatgatgatgctggcgaactgccagctgctgtggtggtgctggaacacggcaagaccatgaccgagaaagaaatcgtggactacgtggccagccaagtgaccaccgccaagaaactgagaggcggcgtggtgtttgtggacgaggtgccaaaaggcctgacaggcaagctggacgcccggaagatcagagagatcctgattaaggccaagaaaggcggcaagatcgccgtgtaatagctaactagacaaaacaccaaacaaacaagctgcgagccacggacttaaataattgagccttaaagaagaaattctttaagtggatgctaaaaacaaccaaaaaaaatctagatatcggatcccggg

SEQ ID NO: 3272 - DNA, 2831 bp, synthetic construct
  source 1..2831: mol_type = other DNA; note = Ana1.51
taatacgactcactatagggagaccctcgaaaaaaaacacaaacacctcaaactcagggaaacctaaatctagttatagacaaggcaatcctgagccaagccgaagtagtaattagtaagttaacaatagatgacttacaactaatcggaaggtgcagagactcgacgggagctaccctaacgtcaagacgagggtaaagagagagtccaattctcaaagccaataggcagtagcgaaagctgcaagagaatgaaaatccgtggctcgcagcaaacaccaaacaaaacaaacacaaaccaacaaaaattaaaacagcctgtgggttgatcccacccacaggcccattgggcgctagcactctggtatcacggtacctttgtgcgcctgttttataccccctcccccaactgtaacttagaagtaacacacaccgatcaacagtcagcgtggcacaccagccacgttttgatcaagcacttctgttaccccggactgagtatcaatagactgctcacgcggttgaaggagaaagcgttcgttatccggccaactacttcgaaaaacctagtaacaccgtggaagttgcagagtgtttcgctcagcactaccccagtgtagatcaggtcgatgagtcaccgcattccccacgggcgaccgtggcggtggctgcgttggcggcctgcccatggggaaacccatgggacgctctaatacagacatggtgcgaagagtctattgagctagttggtagtcctccggcccctgaatgcggctaatcctaactgcggagcacacaccctcaagccagagggcagtgtgtcgtaacgggcaactctgcagcggaaccgactactttgggtgtccgtgtttcattttattcctatactggctgcttatggtgacaattgagagatcgttaccatatagctattggattggccatccggtgactaatagagctattatatatccctttgttgggtttataccacttagcttgaaagaggttaaaacattacaattcattgttaagttgaatacagcaaaatggaagatgccaagaacatcaagaagggccctgctccattctaccctctggaagatggaacagccggcgagcagctgcacaaggccatgaagagatatgccctggtgcctggcacaatcgccttcacagatgcccacatcgaggtggacatcacctacgccgagtacttcgagatgtctgtgcggctggccgaagctatgaagcgctacggcctgaacaccaaccaccggatcgtcgtgtgcagcgagaacagcctgcagttcttcatgcctgtgctgggcgccctgttcatcggagttgctgtggcccctgccaacgacatctacaacgagcgcgagctgctgaacagcatgggcatctctcagcccaccgtggtgttcgtgtccaagaagggactgcagaaaatcctgaacgtgcagaagaagctgcccatcatccagaaaatcatcatcatggacagcaagaccgactaccagggcttccagagcatgtacaccttcgtgaccagccatctgccacctggcttcaacgagtacgacttcgtgcccgagagcttcgaccgggacaagacaatcgccctgatcatgaacagcagcggctctaccggactgcccaaaggtgttgccctgcctcatagaactgcctgcgtgcggtttagccacgccagagatcccatcttcggcaaccagatcatccccgacacagccatcctgagcgtggtgccttttcaccacggcttcggcatgttcaccacactgggctacctgatctgcggcttcagagtggtgctgatgtaccgcttcgaggaagaactgttcctgcggagcctgcaggactacaagatccagtctgctctgctggtgcctactctgttcagcttctttgccaagagcaccctgatcgataagtacgacctgagcaacctgcacgagatcgcctctggcggagcccctctgtctaaagaagtgggagaagccgtcgccaagcggttccatctgcctggcatcagacaaggctatggcctgaccgagacaaccagcgccattctgattacccctgagggcgacgataagcctggcgctgtgggaaaagtggtgccattcttcgaggccaaggtggtggatctggacaccggcaaaacactgggcgttaaccagaggggcgagctgtgtgttagaggccctatgatcatgagcggctacgtgaacaaccccgaggccacaaacgctctgatcgacaaggatggatggctgcacagcggcgacattgcctactgggacgaagatgagcacttcttcatcgtggaccggctgaagtccctgatcaagtacaagggctaccaggtggccccagccgagctggaatctattctgctgcaacaccccaacatcttcgatgccggcgttgcaggactgcccgatgatgatgctggcgaactgccagctgctgtggtggtgctggaacacggcaagaccatgaccgagaaagaaatcgtggactacgtggccagccaagtgaccaccgccaagaaactgagaggcggcgtggtgtttgtggacgaggtgccaaaaggcctgacaggcaagctggacgcccggaagatcagagagatcctgattaaggccaagaaaggcggcaagatcgccgtgtaatagctaactagacaaaacaccaaacaaacaagctgcgagccacggacttaaataattgagccttaaagaagaaattctttaagtggatgctcaaaaacaaccaaaaaaaatctagatatcggatcccggg

SEQ ID NO: 3273 - DNA, 2831 bp, synthetic construct
  source 1..2831: mol_type = other DNA; note = Ana1.52
taatacgactcactatagggagaccctcgaaaaaaaacacaaacacccaaactcagggaaacctaaatctagttatagacaaggcaatcctgagccaagccgaagtagtaattagtaagttaacaatagatgacttacaactaatcggaaggtgcagagactcgacgggagctaccctaacgtcaagacgagggtaaagagagagtccaattctcaaagccaataggcagtagcgaaagctgcaagagaatgaaaatccgtggctcgcagcaaacaccaaacaaaacaaacacaaaccaacaaaaattaaaacagcctgtgggttgatcccacccacaggcccattgggcgctagcactctggtatcacggtacctttgtgcgcctgttttataccccctcccccaactgtaacttagaagtaacacacaccgatcaacagtcagcgtggcacaccagccacgttttgatcaagcacttctgttaccccggactgagtatcaatagactgctcacgcggttgaaggagaaagcgttcgttatccggccaactacttcgaaaaacctagtaacaccgtggaagttgcagagtgtttcgctcagcactaccccagtgtagatcaggtcgatgagtcaccgcattccccacgggcgaccgtggcggtggctgcgttggcggcctgcccatggggaaacccatgggacgctctaatacagacatggtgcgaagagtctattgagctagttggtagtcctccggcccctgaatgcggctaatcctaactgcggagcacacaccctcaagccagagggcagtgtgtcgtaacgggcaactctgcagcggaaccgactactttgggtgtccgtgtttcattttattcctatactggctgcttatggtgacaattgagagatcgttaccatatagctattggattggccatccggtgactaatagagctattatatatccctttgttgggtttataccacttagcttgaaagaggttaaaacattacaattcattgttaagttgaatacagcaaaatggaagatgccaagaacatcaagaagggccctgctccattctaccctctggaagatggaacagccggcgagcagctgcacaaggccatgaagagatatgccctggtgcctggcacaatcgccttcacagatgcccacatcgaggtggacatcacctacgccgagtacttcgagatgtctgtgcggctggccgaagctatgaagcgctacggcctgaacaccaaccaccggatcgtcgtgtgcagcgagaacagcctgcagttcttcatgcctgtgctgggcgccctgttcatcggagttgctgtggcccctgccaacgacatctacaacgagcgcgagctgctgaacagcatgggcatctctcagcccaccgtggtgttcgtgtccaagaagggactgcagaaaatcctgaacgtgcagaagaagctgcccatcatccagaaaatcatcatcatggacagcaagaccgactaccagggcttccagagcatgtacaccttcgtgaccagccatctgccacctggcttcaacgagtacgacttcgtgcccgagagcttcgaccgggacaagacaatcgccctgatcatgaacagcagcggctctaccggactgcccaaaggtgttgccctgcctcatagaactgcctgcgtgcggtttagccacgccagagatcccatcttcggcaaccagatcatccccgacacagccatcctgagcgtggtgccttttcaccacggcttcggcatgttcaccacactgggctacctgatctgcggcttcagagtggtgctgatgtaccgcttcgaggaagaactgttcctgcggagcctgcaggactacaagatccagtctgctctgctggtgcctactctgttcagcttctttgccaagagcaccctgatcgataagtacgacctgagcaacctgcacgagatcgcctctggcggagcccctctgtctaaagaagtgggagaagccgtcgccaagcggttccatctgcctggcatcagacaaggctatggcctgaccgagacaaccagcgccattctgattacccctgagggcgacgataagcctggcgctgtgggaaaagtggtgccattcttcgaggccaaggtggtggatctggacaccggcaaaacactgggcgttaaccagaggggcgagctgtgtgttagaggccctatgatcatgagcggctacgtgaacaaccccgaggccacaaacgctctgatcgacaaggatggatggctgcacagcggcgacattgcctactgggacgaagatgagcacttcttcatcgtggaccggctgaagtccctgatcaagtacaagggctaccaggtggccccagccgagctggaatctattctgctgcaacaccccaacatcttcgatgccggcgttgcaggactgcccgatgatgatgctggcgaactgccagctgctgtggtggtgctggaacacggcaagaccatgaccgagaaagaaatcgtggactacgtggccagccaagtgaccaccgccaagaaactgagaggcggcgtggtgtttgtggacgaggtgccaaaaggcctgacaggcaagctggacgcccggaagatcagagagatcctgattaaggccaagaaaggcggcaagatcgccgtgtaatagctaactagacaaaacaccaaacaaacaagctgcgagccacggacttaaataattgagccttaaagaagaaattctttaagtggatgctctaaaaacaaccaaaaaaaatctagatatcggatcccggg

SEQ ID NO: 3274 - DNA, 2831 bp, synthetic construct
  source 1..2831: mol_type = other DNA; note = Ana1.53
taatacgactcactatagggagaccctcgaaaaaaaacacaaacaccaaactcagggaaacctaaatctagttatagacaaggcaatcctgagccaagccgaagtagtaattagtaagttaacaatagatgacttacaactaatcggaaggtgcagagactcgacgggagctaccctaacgtcaagacgagggtaaagagagagtccaattctcaaagccaataggcagtagcgaaagctgcaagagaatgaaaatccgtggctcgcagcaaacaccaaacaaaacaaacacaaaccaacaaaaattaaaacagcctgtgggttgatcccacccacaggcccattgggcgctagcactctggtatcacggtacctttgtgcgcctgttttataccccctcccccaactgtaacttagaagtaacacacaccgatcaacagtcagcgtggcacaccagccacgttttgatcaagcacttctgttaccccggactgagtatcaatagactgctcacgcggttgaaggagaaagcgttcgttatccggccaactacttcgaaaaacctagtaacaccgtggaagttgcagagtgtttcgctcagcactaccccagtgtagatcaggtcgatgagtcaccgcattccccacgggcgaccgtggcggtggctgcgttggcggcctgcccatggggaaacccatgggacgctctaatacagacatggtgcgaagagtctattgagctagttggtagtcctccggcccctgaatgcggctaatcctaactgcggagcacacaccctcaagccagagggcagtgtgtcgtaacgggcaactctgcagcggaaccgactactttgggtgtccgtgtttcattttattcctatactggctgcttatggtgacaattgagagatcgttaccatatagctattggattggccatccggtgactaatagagctattatatatccctttgttgggtttataccacttagcttgaaagaggttaaaacattacaattcattgttaagttgaatacagcaaaatggaagatgccaagaacatcaagaagggccctgctccattctaccctctggaagatggaacagccggcgagcagctgcacaaggccatgaagagatatgccctggtgcctggcacaatcgccttcacagatgcccacatcgaggtggacatcacctacgccgagtacttcgagatgtctgtgcggctggccgaagctatgaagcgctacggcctgaacaccaaccaccggatcgtcgtgtgcagcgagaacagcctgcagttcttcatgcctgtgctgggcgccctgttcatcggagttgctgtggcccctgccaacgacatctacaacgagcgcgagctgctgaacagcatgggcatctctcagcccaccgtggtgttcgtgtccaagaagggactgcagaaaatcctgaacgtgcagaagaagctgcccatcatccagaaaatcatcatcatggacagcaagaccgactaccagggcttccagagcatgtacaccttcgtgaccagccatctgccacctggcttcaacgagtacgacttcgtgcccgagagcttcgaccgggacaagacaatcgccctgatcatgaacagcagcggctctaccggactgcccaaaggtgttgccctgcctcatagaactgcctgcgtgcggtttagccacgccagagatcccatcttcggcaaccagatcatccccgacacagccatcctgagcgtggtgccttttcaccacggcttcggcatgttcaccacactgggctacctgatctgcggcttcagagtggtgctgatgtaccgcttcgaggaagaactgttcctgcggagcctgcaggactacaagatccagtctgctctgctggtgcctactctgttcagcttctttgccaagagcaccctgatcgataagtacgacctgagcaacctgcacgagatcgcctctggcggagcccctctgtctaaagaagtgggagaagccgtcgccaagcggttccatctgcctggcatcagacaaggctatggcctgaccgagacaaccagcgccattctgattacccctgagggcgacgataagcctggcgctgtgggaaaagtggtgccattcttcgaggccaaggtggtggatctggacaccggcaaaacactgggcgttaaccagaggggcgagctgtgtgttagaggccctatgatcatgagcggctacgtgaacaaccccgaggccacaaacgctctgatcgacaaggatggatggctgcacagcggcgacattgcctactgggacgaagatgagcacttcttcatcgtggaccggctgaagtccctgatcaagtacaagggctaccaggtggccccagccgagctggaatctattctgctgcaacaccccaacatcttcgatgccggcgttgcaggactgcccgatgatgatgctggcgaactgccagctgctgtggtggtgctggaacacggcaagaccatgaccgagaaagaaatcgtggactacgtggccagccaagtgaccaccgccaagaaactgagaggcggcgtggtgtttgtggacgaggtgccaaaaggcctgacaggcaagctggacgcccggaagatcagagagatcctgattaaggccaagaaaggcggcaagatcgccgtgtaatagctaactagacaaaacaccaaacaaacaagctgcgagccacggacttaaataattgagccttaaagaagaaattctttaagtggatgctctcaaaaacaaccaaaaaaaatctagatatcggatcccggg

SEQ ID NO: 3275 - DNA, 2831 bp, synthetic construct
  source 1..2831: mol_type = other DNA; note = Ana1.54
taatacgactcactatagggagaccctcgaaaaaaaacacaaacaccaactcagggaaacctaaatctagttatagacaaggcaatcctgagccaagccgaagtagtaattagtaagttaacaatagatgacttacaactaatcggaaggtgcagagactcgacgggagctaccctaacgtcaagacgagggtaaagagagagtccaattctcaaagccaataggcagtagcgaaagctgcaagagaatgaaaatccgtggctcgcagcaaacaccaaacaaaacaaacacaaaccaacaaaaattaaaacagcctgtgggttgatcccacccacaggcccattgggcgctagcactctggtatcacggtacctttgtgcgcctgttttataccccctcccccaactgtaacttagaagtaacacacaccgatcaacagtcagcgtggcacaccagccacgttttgatcaagcacttctgttaccccggactgagtatcaatagactgctcacgcggttgaaggagaaagcgttcgttatccggccaactacttcgaaaaacctagtaacaccgtggaagttgcagagtgtttcgctcagcactaccccagtgtagatcaggtcgatgagtcaccgcattccccacgggcgaccgtggcggtggctgcgttggcggcctgcccatggggaaacccatgggacgctctaatacagacatggtgcgaagagtctattgagctagttggtagtcctccggcccctgaatgcggctaatcctaactgcggagcacacaccctcaagccagagggcagtgtgtcgtaacgggcaactctgcagcggaaccgactactttgggtgtccgtgtttcattttattcctatactggctgcttatggtgacaattgagagatcgttaccatatagctattggattggccatccggtgactaatagagctattatatatccctttgttgggtttataccacttagcttgaaagaggttaaaacattacaattcattgttaagttgaatacagcaaaatggaagatgccaagaacatcaagaagggccctgctccattctaccctctggaagatggaacagccggcgagcagctgcacaaggccatgaagagatatgccctggtgcctggcacaatcgccttcacagatgcccacatcgaggtggacatcacctacgccgagtacttcgagatgtctgtgcggctggccgaagctatgaagcgctacggcctgaacaccaaccaccggatcgtcgtgtgcagcgagaacagcctgcagttcttcatgcctgtgctgggcgccctgttcatcggagttgctgtggcccctgccaacgacatctacaacgagcgcgagctgctgaacagcatgggcatctctcagcccaccgtggtgttcgtgtccaagaagggactgcagaaaatcctgaacgtgcagaagaagctgcccatcatccagaaaatcatcatcatggacagcaagaccgactaccagggcttccagagcatgtacaccttcgtgaccagccatctgccacctggcttcaacgagtacgacttcgtgcccgagagcttcgaccgggacaagacaatcgccctgatcatgaacagcagcggctctaccggactgcccaaaggtgttgccctgcctcatagaactgcctgcgtgcggtttagccacgccagagatcccatcttcggcaaccagatcatccccgacacagccatcctgagcgtggtgccttttcaccacggcttcggcatgttcaccacactgggctacctgatctgcggcttcagagtggtgctgatgtaccgcttcgaggaagaactgttcctgcggagcctgcaggactacaagatccagtctgctctgctggtgcctactctgttcagcttctttgccaagagcaccctgatcgataagtacgacctgagcaacctgcacgagatcgcctctggcggagcccctctgtctaaagaagtgggagaagccgtcgccaagcggttccatctgcctggcatcagacaaggctatggcctgaccgagacaaccagcgccattctgattacccctgagggcgacgataagcctggcgctgtgggaaaagtggtgccattcttcgaggccaaggtggtggatctggacaccggcaaaacactgggcgttaaccagaggggcgagctgtgtgttagaggccctatgatcatgagcggctacgtgaacaaccccgaggccacaaacgctctgatcgacaaggatggatggctgcacagcggcgacattgcctactgggacgaagatgagcacttcttcatcgtggaccggctgaagtccctgatcaagtacaagggctaccaggtggccccagccgagctggaatctattctgctgcaacaccccaacatcttcgatgccggcgttgcaggactgcccgatgatgatgctggcgaactgccagctgctgtggtggtgctggaacacggcaagaccatgaccgagaaagaaatcgtggactacgtggccagccaagtgaccaccgccaagaaactgagaggcggcgtggtgtttgtggacgaggtgccaaaaggcctgacaggcaagctggacgcccggaagatcagagagatcctgattaaggccaagaaaggcggcaagatcgccgtgtaatagctaactagacaaaacaccaaacaaacaagctgcgagccacggacttaaataattgagccttaaagaagaaattctttaagtggatgctctcaaaaaacaaccaaaaaaaatctagatatcggatcccggg

SEQ ID NO: 3276 - DNA, 2831 bp, synthetic construct
  source 1..2831: mol_type = other DNA; note = Ana1.55
taatacgactcactatagggagaccctcgaaaaaaaacacaaacaccactcagggaaacctaaatctagttatagacaaggcaatcctgagccaagccgaagtagtaattagtaagttaacaatagatgacttacaactaatcggaaggtgcagagactcgacgggagctaccctaacgtcaagacgagggtaaagagagagtccaattctcaaagccaataggcagtagcgaaagctgcaagagaatgaaaatccgtggctcgcagcaaacaccaaacaaaacaaacacaaaccaacaaaaattaaaacagcctgtgggttgatcccacccacaggcccattgggcgctagcactctggtatcacggtacctttgtgcgcctgttttataccccctcccccaactgtaacttagaagtaacacacaccgatcaacagtcagcgtggcacaccagccacgttttgatcaagcacttctgttaccccggactgagtatcaatagactgctcacgcggttgaaggagaaagcgttcgttatccggccaactacttcgaaaaacctagtaacaccgtggaagttgcagagtgtttcgctcagcactaccccagtgtagatcaggtcgatgagtcaccgcattccccacgggcgaccgtggcggtggctgcgttggcggcctgcccatggggaaacccatgggacgctctaatacagacatggtgcgaagagtctattgagctagttggtagtcctccggcccctgaatgcggctaatcctaactgcggagcacacaccctcaagccagagggcagtgtgtcgtaacgggcaactctgcagcggaaccgactactttgggtgtccgtgtttcattttattcctatactggctgcttatggtgacaattgagagatcgttaccatatagctattggattggccatccggtgactaatagagctattatatatccctttgttgggtttataccacttagcttgaaagaggttaaaacattacaattcattgttaagttgaatacagcaaaatggaagatgccaagaacatcaagaagggccctgctccattctaccctctggaagatggaacagccggcgagcagctgcacaaggccatgaagagatatgccctggtgcctggcacaatcgccttcacagatgcccacatcgaggtggacatcacctacgccgagtacttcgagatgtctgtgcggctggccgaagctatgaagcgctacggcctgaacaccaaccaccggatcgtcgtgtgcagcgagaacagcctgcagttcttcatgcctgtgctgggcgccctgttcatcggagttgctgtggcccctgccaacgacatctacaacgagcgcgagctgctgaacagcatgggcatctctcagcccaccgtggtgttcgtgtccaagaagggactgcagaaaatcctgaacgtgcagaagaagctgcccatcatccagaaaatcatcatcatggacagcaagaccgactaccagggcttccagagcatgtacaccttcgtgaccagccatctgccacctggcttcaacgagtacgacttcgtgcccgagagcttcgaccgggacaagacaatcgccctgatcatgaacagcagcggctctaccggactgcccaaaggtgttgccctgcctcatagaactgcctgcgtgcggtttagccacgccagagatcccatcttcggcaaccagatcatccccgacacagccatcctgagcgtggtgccttttcaccacggcttcggcatgttcaccacactgggctacctgatctgcggcttcagagtggtgctgatgtaccgcttcgaggaagaactgttcctgcggagcctgcaggactacaagatccagtctgctctgctggtgcctactctgttcagcttctttgccaagagcaccctgatcgataagtacgacctgagcaacctgcacgagatcgcctctggcggagcccctctgtctaaagaagtgggagaagccgtcgccaagcggttccatctgcctggcatcagacaaggctatggcctgaccgagacaaccagcgccattctgattacccctgagggcgacgataagcctggcgctgtgggaaaagtggtgccattcttcgaggccaaggtggtggatctggacaccggcaaaacactgggcgttaaccagaggggcgagctgtgtgttagaggccctatgatcatgagcggctacgtgaacaaccccgaggccacaaacgctctgatcgacaaggatggatggctgcacagcggcgacattgcctactgggacgaagatgagcacttcttcatcgtggaccggctgaagtccctgatcaagtacaagggctaccaggtggccccagccgagctggaatctattctgctgcaacaccccaacatcttcgatgccggcgttgcaggactgcccgatgatgatgctggcgaactgccagctgctgtggtggtgctggaacacggcaagaccatgaccgagaaagaaatcgtggactacgtggccagccaagtgaccaccgccaagaaactgagaggcggcgtggtgtttgtggacgaggtgccaaaaggcctgacaggcaagctggacgcccggaagatcagagagatcctgattaaggccaagaaaggcggcaagatcgccgtgtaatagctaactagacaaaacaccaaacaaacaagctgcgagccacggacttaaataattgagccttaaagaagaaattctttaagtggatgctctcaaaaaaacaaccaaaaaaaatctagatatcggatcccggg

SEQ ID NO: 3277 - DNA, 2831 bp, synthetic construct
  source 1..2831: mol_type = other DNA; note = Ana1.56
taatacgactcactatagggagaccctcgaaaaaaaacacaaacaccctcagggaaacctaaatctagttatagacaaggcaatcctgagccaagccgaagtagtaattagtaagttaacaatagatgacttacaactaatcggaaggtgcagagactcgacgggagctaccctaacgtcaagacgagggtaaagagagagtccaattctcaaagccaataggcagtagcgaaagctgcaagagaatgaaaatccgtggctcgcagcaaacaccaaacaaaacaaacacaaaccaacaaaaattaaaacagcctgtgggttgatcccacccacaggcccattgggcgctagcactctggtatcacggtacctttgtgcgcctgttttataccccctcccccaactgtaacttagaagtaacacacaccgatcaacagtcagcgtggcacaccagccacgttttgatcaagcacttctgttaccccggactgagtatcaatagactgctcacgcggttgaaggagaaagcgttcgttatccggccaactacttcgaaaaacctagtaacaccgtggaagttgcagagtgtttcgctcagcactaccccagtgtagatcaggtcgatgagtcaccgcattccccacgggcgaccgtggcggtggctgcgttggcggcctgcccatggggaaacccatgggacgctctaatacagacatggtgcgaagagtctattgagctagttggtagtcctccggcccctgaatgcggctaatcctaactgcggagcacacaccctcaagccagagggcagtgtgtcgtaacgggcaactctgcagcggaaccgactactttgggtgtccgtgtttcattttattcctatactggctgcttatggtgacaattgagagatcgttaccatatagctattggattggccatccggtgactaatagagctattatatatccctttgttgggtttataccacttagcttgaaagaggttaaaacattacaattcattgttaagttgaatacagcaaaatggaagatgccaagaacatcaagaagggccctgctccattctaccctctggaagatggaacagccggcgagcagctgcacaaggccatgaagagatatgccctggtgcctggcacaatcgccttcacagatgcccacatcgaggtggacatcacctacgccgagtacttcgagatgtctgtgcggctggccgaagctatgaagcgctacggcctgaacaccaaccaccggatcgtcgtgtgcagcgagaacagcctgcagttcttcatgcctgtgctgggcgccctgttcatcggagttgctgtggcccctgccaacgacatctacaacgagcgcgagctgctgaacagcatgggcatctctcagcccaccgtggtgttcgtgtccaagaagggactgcagaaaatcctgaacgtgcagaagaagctgcccatcatccagaaaatcatcatcatggacagcaagaccgactaccagggcttccagagcatgtacaccttcgtgaccagccatctgccacctggcttcaacgagtacgacttcgtgcccgagagcttcgaccgggacaagacaatcgccctgatcatgaacagcagcggctctaccggactgcccaaaggtgttgccctgcctcatagaactgcctgcgtgcggtttagccacgccagagatcccatcttcggcaaccagatcatccccgacacagccatcctgagcgtggtgccttttcaccacggcttcggcatgttcaccacactgggctacctgatctgcggcttcagagtggtgctgatgtaccgcttcgaggaagaactgttcctgcggagcctgcaggactacaagatccagtctgctctgctggtgcctactctgttcagcttctttgccaagagcaccctgatcgataagtacgacctgagcaacctgcacgagatcgcctctggcggagcccctctgtctaaagaagtgggagaagccgtcgccaagcggttccatctgcctggcatcagacaaggctatggcctgaccgagacaaccagcgccattctgattacccctgagggcgacgataagcctggcgctgtgggaaaagtggtgccattcttcgaggccaaggtggtggatctggacaccggcaaaacactgggcgttaaccagaggggcgagctgtgtgttagaggccctatgatcatgagcggctacgtgaacaaccccgaggccacaaacgctctgatcgacaaggatggatggctgcacagcggcgacattgcctactgggacgaagatgagcacttcttcatcgtggaccggctgaagtccctgatcaagtacaagggctaccaggtggccccagccgagctggaatctattctgctgcaacaccccaacatcttcgatgccggcgttgcaggactgcccgatgatgatgctggcgaactgccagctgctgtggtggtgctggaacacggcaagaccatgaccgagaaagaaatcgtggactacgtggccagccaagtgaccaccgccaagaaactgagaggcggcgtggtgtttgtggacgaggtgccaaaaggcctgacaggcaagctggacgcccggaagatcagagagatcctgattaaggccaagaaaggcggcaagatcgccgtgtaatagctaactagacaaaacaccaaacaaacaagctgcgagccacggacttaaataattgagccttaaagaagaaattctttaagtggatgctctcaaaaaaaacaaccaaaaaaaatctagatatcggatcccggg

SEQ ID NO: 3278 - DNA, 2831 bp, synthetic construct
  source 1..2831: mol_type = other DNA; note = Ana1.57
taatacgactcactatagggagaccctcgaaaaaaaacacaaacacctcagggaaacctaaatctagttatagacaaggcaatcctgagccaagccgaagtagtaattagtaagttaacaatagatgacttacaactaatcggaaggtgcagagactcgacgggagctaccctaacgtcaagacgagggtaaagagagagtccaattctcaaagccaataggcagtagcgaaagctgcaagagaatgaaaatccgtggctcgcagcaaacaccaaacaaaacaaacacaaaccaacaaaaattaaaacagcctgtgggttgatcccacccacaggcccattgggcgctagcactctggtatcacggtacctttgtgcgcctgttttataccccctcccccaactgtaacttagaagtaacacacaccgatcaacagtcagcgtggcacaccagccacgttttgatcaagcacttctgttaccccggactgagtatcaatagactgctcacgcggttgaaggagaaagcgttcgttatccggccaactacttcgaaaaacctagtaacaccgtggaagttgcagagtgtttcgctcagcactaccccagtgtagatcaggtcgatgagtcaccgcattccccacgggcgaccgtggcggtggctgcgttggcggcctgcccatggggaaacccatgggacgctctaatacagacatggtgcgaagagtctattgagctagttggtagtcctccggcccctgaatgcggctaatcctaactgcggagcacacaccctcaagccagagggcagtgtgtcgtaacgggcaactctgcagcggaaccgactactttgggtgtccgtgtttcattttattcctatactggctgcttatggtgacaattgagagatcgttaccatatagctattggattggccatccggtgactaatagagctattatatatccctttgttgggtttataccacttagcttgaaagaggttaaaacattacaattcattgttaagttgaatacagcaaaatggaagatgccaagaacatcaagaagggccctgctccattctaccctctggaagatggaacagccggcgagcagctgcacaaggccatgaagagatatgccctggtgcctggcacaatcgccttcacagatgcccacatcgaggtggacatcacctacgccgagtacttcgagatgtctgtgcggctggccgaagctatgaagcgctacggcctgaacaccaaccaccggatcgtcgtgtgcagcgagaacagcctgcagttcttcatgcctgtgctgggcgccctgttcatcggagttgctgtggcccctgccaacgacatctacaacgagcgcgagctgctgaacagcatgggcatctctcagcccaccgtggtgttcgtgtccaagaagggactgcagaaaatcctgaacgtgcagaagaagctgcccatcatccagaaaatcatcatcatggacagcaagaccgactaccagggcttccagagcatgtacaccttcgtgaccagccatctgccacctggcttcaacgagtacgacttcgtgcccgagagcttcgaccgggacaagacaatcgccctgatcatgaacagcagcggctctaccggactgcccaaaggtgttgccctgcctcatagaactgcctgcgtgcggtttagccacgccagagatcccatcttcggcaaccagatcatccccgacacagccatcctgagcgtggtgccttttcaccacggcttcggcatgttcaccacactgggctacctgatctgcggcttcagagtggtgctgatgtaccgcttcgaggaagaactgttcctgcggagcctgcaggactacaagatccagtctgctctgctggtgcctactctgttcagcttctttgccaagagcaccctgatcgataagtacgacctgagcaacctgcacgagatcgcctctggcggagcccctctgtctaaagaagtgggagaagccgtcgccaagcggttccatctgcctggcatcagacaaggctatggcctgaccgagacaaccagcgccattctgattacccctgagggcgacgataagcctggcgctgtgggaaaagtggtgccattcttcgaggccaaggtggtggatctggacaccggcaaaacactgggcgttaaccagaggggcgagctgtgtgttagaggccctatgatcatgagcggctacgtgaacaaccccgaggccacaaacgctctgatcgacaaggatggatggctgcacagcggcgacattgcctactgggacgaagatgagcacttcttcatcgtggaccggctgaagtccctgatcaagtacaagggctaccaggtggccccagccgagctggaatctattctgctgcaacaccccaacatcttcgatgccggcgttgcaggactgcccgatgatgatgctggcgaactgccagctgctgtggtggtgctggaacacggcaagaccatgaccgagaaagaaatcgtggactacgtggccagccaagtgaccaccgccaagaaactgagaggcggcgtggtgtttgtggacgaggtgccaaaaggcctgacaggcaagctggacgcccggaagatcagagagatcctgattaaggccaagaaaggcggcaagatcgccgtgtaatagctaactagacaaaacaccaaacaaacaagctgcgagccacggacttaaataattgagccttaaagaagaaattctttaagtggatgctctcaaacaaaaacaaccaaaaaaaatctagatatcggatcccggg

SEQ ID NO: 3279 - DNA, 2831 bp, synthetic construct
  source 1..2831: mol_type = other DNA; note = Ana1.58
taatacgactcactatagggagaccctcgaaaaaaaacacaaacacccagggaaacctaaatctagttatagacaaggcaatcctgagccaagccgaagtagtaattagtaagttaacaatagatgacttacaactaatcggaaggtgcagagactcgacgggagctaccctaacgtcaagacgagggtaaagagagagtccaattctcaaagccaataggcagtagcgaaagctgcaagagaatgaaaatccgtggctcgcagcaaacaccaaacaaaacaaacacaaaccaacaaaaattaaaacagcctgtgggttgatcccacccacaggcccattgggcgctagcactctggtatcacggtacctttgtgcgcctgttttataccccctcccccaactgtaacttagaagtaacacacaccgatcaacagtcagcgtggcacaccagccacgttttgatcaagcacttctgttaccccggactgagtatcaatagactgctcacgcggttgaaggagaaagcgttcgttatccggccaactacttcgaaaaacctagtaacaccgtggaagttgcagagtgtttcgctcagcactaccccagtgtagatcaggtcgatgagtcaccgcattccccacgggcgaccgtggcggtggctgcgttggcggcctgcccatggggaaacccatgggacgctctaatacagacatggtgcgaagagtctattgagctagttggtagtcctccggcccctgaatgcggctaatcctaactgcggagcacacaccctcaagccagagggcagtgtgtcgtaacgggcaactctgcagcggaaccgactactttgggtgtccgtgtttcattttattcctatactggctgcttatggtgacaattgagagatcgttaccatatagctattggattggccatccggtgactaatagagctattatatatccctttgttgggtttataccacttagcttgaaagaggttaaaacattacaattcattgttaagttgaatacagcaaaatggaagatgccaagaacatcaagaagggccctgctccattctaccctctggaagatggaacagccggcgagcagctgcacaaggccatgaagagatatgccctggtgcctggcacaatcgccttcacagatgcccacatcgaggtggacatcacctacgccgagtacttcgagatgtctgtgcggctggccgaagctatgaagcgctacggcctgaacaccaaccaccggatcgtcgtgtgcagcgagaacagcctgcagttcttcatgcctgtgctgggcgccctgttcatcggagttgctgtggcccctgccaacgacatctacaacgagcgcgagctgctgaacagcatgggcatctctcagcccaccgtggtgttcgtgtccaagaagggactgcagaaaatcctgaacgtgcagaagaagctgcccatcatccagaaaatcatcatcatggacagcaagaccgactaccagggcttccagagcatgtacaccttcgtgaccagccatctgccacctggcttcaacgagtacgacttcgtgcccgagagcttcgaccgggacaagacaatcgccctgatcatgaacagcagcggctctaccggactgcccaaaggtgttgccctgcctcatagaactgcctgcgtgcggtttagccacgccagagatcccatcttcggcaaccagatcatccccgacacagccatcctgagcgtggtgccttttcaccacggcttcggcatgttcaccacactgggctacctgatctgcggcttcagagtggtgctgatgtaccgcttcgaggaagaactgttcctgcggagcctgcaggactacaagatccagtctgctctgctggtgcctactctgttcagcttctttgccaagagcaccctgatcgataagtacgacctgagcaacctgcacgagatcgcctctggcggagcccctctgtctaaagaagtgggagaagccgtcgccaagcggttccatctgcctggcatcagacaaggctatggcctgaccgagacaaccagcgccattctgattacccctgagggcgacgataagcctggcgctgtgggaaaagtggtgccattcttcgaggccaaggtggtggatctggacaccggcaaaacactgggcgttaaccagaggggcgagctgtgtgttagaggccctatgatcatgagcggctacgtgaacaaccccgaggccacaaacgctctgatcgacaaggatggatggctgcacagcggcgacattgcctactgggacgaagatgagcacttcttcatcgtggaccggctgaagtccctgatcaagtacaagggctaccaggtggccccagccgagctggaatctattctgctgcaacaccccaacatcttcgatgccggcgttgcaggactgcccgatgatgatgctggcgaactgccagctgctgtggtggtgctggaacacggcaagaccatgaccgagaaagaaatcgtggactacgtggccagccaagtgaccaccgccaagaaactgagaggcggcgtggtgtttgtggacgaggtgccaaaaggcctgacaggcaagctggacgcccggaagatcagagagatcctgattaaggccaagaaaggcggcaagatcgccgtgtaatagctaactagacaaaacaccaaacaaacaagctgcgagccacggacttaaataattgagccttaaagaagaaattctttaagtggatgctctcaaactaaaaacaaccaaaaaaaatctagatatcggatcccggg

SEQ ID NO: 3280 - DNA, 2831 bp, synthetic construct
  source 1..2831: mol_type = other DNA; note = Ana1.59
taatacgactcactatagggagaccctcgaaaaaaaacacaaacaccagggaaacctaaatctagttatagacaaggcaatcctgagccaagccgaagtagtaattagtaagttaacaatagatgacttacaactaatcggaaggtgcagagactcgacgggagctaccctaacgtcaagacgagggtaaagagagagtccaattctcaaagccaataggcagtagcgaaagctgcaagagaatgaaaatccgtggctcgcagcaaacaccaaacaaaacaaacacaaaccaacaaaaattaaaacagcctgtgggttgatcccacccacaggcccattgggcgctagcactctggtatcacggtacctttgtgcgcctgttttataccccctcccccaactgtaacttagaagtaacacacaccgatcaacagtcagcgtggcacaccagccacgttttgatcaagcacttctgttaccccggactgagtatcaatagactgctcacgcggttgaaggagaaagcgttcgttatccggccaactacttcgaaaaacctagtaacaccgtggaagttgcagagtgtttcgctcagcactaccccagtgtagatcaggtcgatgagtcaccgcattccccacgggcgaccgtggcggtggctgcgttggcggcctgcccatggggaaacccatgggacgctctaatacagacatggtgcgaagagtctattgagctagttggtagtcctccggcccctgaatgcggctaatcctaactgcggagcacacaccctcaagccagagggcagtgtgtcgtaacgggcaactctgcagcggaaccgactactttgggtgtccgtgtttcattttattcctatactggctgcttatggtgacaattgagagatcgttaccatatagctattggattggccatccggtgactaatagagctattatatatccctttgttgggtttataccacttagcttgaaagaggttaaaacattacaattcattgttaagttgaatacagcaaaatggaagatgccaagaacatcaagaagggccctgctccattctaccctctggaagatggaacagccggcgagcagctgcacaaggccatgaagagatatgccctggtgcctggcacaatcgccttcacagatgcccacatcgaggtggacatcacctacgccgagtacttcgagatgtctgtgcggctggccgaagctatgaagcgctacggcctgaacaccaaccaccggatcgtcgtgtgcagcgagaacagcctgcagttcttcatgcctgtgctgggcgccctgttcatcggagttgctgtggcccctgccaacgacatctacaacgagcgcgagctgctgaacagcatgggcatctctcagcccaccgtggtgttcgtgtccaagaagggactgcagaaaatcctgaacgtgcagaagaagctgcccatcatccagaaaatcatcatcatggacagcaagaccgactaccagggcttccagagcatgtacaccttcgtgaccagccatctgccacctggcttcaacgagtacgacttcgtgcccgagagcttcgaccgggacaagacaatcgccctgatcatgaacagcagcggctctaccggactgcccaaaggtgttgccctgcctcatagaactgcctgcgtgcggtttagccacgccagagatcccatcttcggcaaccagatcatccccgacacagccatcctgagcgtggtgccttttcaccacggcttcggcatgttcaccacactgggctacctgatctgcggcttcagagtggtgctgatgtaccgcttcgaggaagaactgttcctgcggagcctgcaggactacaagatccagtctgctctgctggtgcctactctgttcagcttctttgccaagagcaccctgatcgataagtacgacctgagcaacctgcacgagatcgcctctggcggagcccctctgtctaaagaagtgggagaagccgtcgccaagcggttccatctgcctggcatcagacaaggctatggcctgaccgagacaaccagcgccattctgattacccctgagggcgacgataagcctggcgctgtgggaaaagtggtgccattcttcgaggccaaggtggtggatctggacaccggcaaaacactgggcgttaaccagaggggcgagctgtgtgttagaggccctatgatcatgagcggctacgtgaacaaccccgaggccacaaacgctctgatcgacaaggatggatggctgcacagcggcgacattgcctactgggacgaagatgagcacttcttcatcgtggaccggctgaagtccctgatcaagtacaagggctaccaggtggccccagccgagctggaatctattctgctgcaacaccccaacatcttcgatgccggcgttgcaggactgcccgatgatgatgctggcgaactgccagctgctgtggtggtgctggaacacggcaagaccatgaccgagaaagaaatcgtggactacgtggccagccaagtgaccaccgccaagaaactgagaggcggcgtggtgtttgtggacgaggtgccaaaaggcctgacaggcaagctggacgcccggaagatcagagagatcctgattaaggccaagaaaggcggcaagatcgccgtgtaatagctaactagacaaaacaccaaacaaacaagctgcgagccacggacttaaataattgagccttaaagaagaaattctttaagtggatgctctcaaactcaaaaacaaccaaaaaaaatctagatatcggatcccggg

SEQ ID NO: 3281 - DNA, 2831 bp, synthetic construct
  source 1..2831: mol_type = other DNA; note = Ana1.60
taatacgactcactatagggagaccctcgaaaaaaaacacaaacaccgggaaacctaaatctagttatagacaaggcaatcctgagccaagccgaagtagtaattagtaagttaacaatagatgacttacaactaatcggaaggtgcagagactcgacgggagctaccctaacgtcaagacgagggtaaagagagagtccaattctcaaagccaataggcagtagcgaaagctgcaagagaatgaaaatccgtggctcgcagcaaacaccaaacaaaacaaacacaaaccaacaaaaattaaaacagcctgtgggttgatcccacccacaggcccattgggcgctagcactctggtatcacggtacctttgtgcgcctgttttataccccctcccccaactgtaacttagaagtaacacacaccgatcaacagtcagcgtggcacaccagccacgttttgatcaagcacttctgttaccccggactgagtatcaatagactgctcacgcggttgaaggagaaagcgttcgttatccggccaactacttcgaaaaacctagtaacaccgtggaagttgcagagtgtttcgctcagcactaccccagtgtagatcaggtcgatgagtcaccgcattccccacgggcgaccgtggcggtggctgcgttggcggcctgcccatggggaaacccatgggacgctctaatacagacatggtgcgaagagtctattgagctagttggtagtcctccggcccctgaatgcggctaatcctaactgcggagcacacaccctcaagccagagggcagtgtgtcgtaacgggcaactctgcagcggaaccgactactttgggtgtccgtgtttcattttattcctatactggctgcttatggtgacaattgagagatcgttaccatatagctattggattggccatccggtgactaatagagctattatatatccctttgttgggtttataccacttagcttgaaagaggttaaaacattacaattcattgttaagttgaatacagcaaaatggaagatgccaagaacatcaagaagggccctgctccattctaccctctggaagatggaacagccggcgagcagctgcacaaggccatgaagagatatgccctggtgcctggcacaatcgccttcacagatgcccacatcgaggtggacatcacctacgccgagtacttcgagatgtctgtgcggctggccgaagctatgaagcgctacggcctgaacaccaaccaccggatcgtcgtgtgcagcgagaacagcctgcagttcttcatgcctgtgctgggcgccctgttcatcggagttgctgtggcccctgccaacgacatctacaacgagcgcgagctgctgaacagcatgggcatctctcagcccaccgtggtgttcgtgtccaagaagggactgcagaaaatcctgaacgtgcagaagaagctgcccatcatccagaaaatcatcatcatggacagcaagaccgactaccagggcttccagagcatgtacaccttcgtgaccagccatctgccacctggcttcaacgagtacgacttcgtgcccgagagcttcgaccgggacaagacaatcgccctgatcatgaacagcagcggctctaccggactgcccaaaggtgttgccctgcctcatagaactgcctgcgtgcggtttagccacgccagagatcccatcttcggcaaccagatcatccccgacacagccatcctgagcgtggtgccttttcaccacggcttcggcatgttcaccacactgggctacctgatctgcggcttcagagtggtgctgatgtaccgcttcgaggaagaactgttcctgcggagcctgcaggactacaagatccagtctgctctgctggtgcctactctgttcagcttctttgccaagagcaccctgatcgataagtacgacctgagcaacctgcacgagatcgcctctggcggagcccctctgtctaaagaagtgggagaagccgtcgccaagcggttccatctgcctggcatcagacaaggctatggcctgaccgagacaaccagcgccattctgattacccctgagggcgacgataagcctggcgctgtgggaaaagtggtgccattcttcgaggccaaggtggtggatctggacaccggcaaaacactgggcgttaaccagaggggcgagctgtgtgttagaggccctatgatcatgagcggctacgtgaacaaccccgaggccacaaacgctctgatcgacaaggatggatggctgcacagcggcgacattgcctactgggacgaagatgagcacttcttcatcgtggaccggctgaagtccctgatcaagtacaagggctaccaggtggccccagccgagctggaatctattctgctgcaacaccccaacatcttcgatgccggcgttgcaggactgcccgatgatgatgctggcgaactgccagctgctgtggtggtgctggaacacggcaagaccatgaccgagaaagaaatcgtggactacgtggccagccaagtgaccaccgccaagaaactgagaggcggcgtggtgtttgtggacgaggtgccaaaaggcctgacaggcaagctggacgcccggaagatcagagagatcctgattaaggccaagaaaggcggcaagatcgccgtgtaatagctaactagacaaaacaccaaacaaacaagctgcgagccacggacttaaataattgagccttaaagaagaaattctttaagtggatgctctcaaactcaaaaaacaaccaaaaaaaatctagatatcggatcccggg

SEQ ID NO: 3282 - DNA, 2831 bp, synthetic construct
  source 1..2831: mol_type = other DNA; note = Ana1.61
taatacgactcactatagggagaccctcgaaaaaaaacacaaacaccggaaacctaaatctagttatagacaaggcaatcctgagccaagccgaagtagtaattagtaagttaacaatagatgacttacaactaatcggaaggtgcagagactcgacgggagctaccctaacgtcaagacgagggtaaagagagagtccaattctcaaagccaataggcagtagcgaaagctgcaagagaatgaaaatccgtggctcgcagcaaacaccaaacaaaacaaacacaaaccaacaaaaattaaaacagcctgtgggttgatcccacccacaggcccattgggcgctagcactctggtatcacggtacctttgtgcgcctgttttataccccctcccccaactgtaacttagaagtaacacacaccgatcaacagtcagcgtggcacaccagccacgttttgatcaagcacttctgttaccccggactgagtatcaatagactgctcacgcggttgaaggagaaagcgttcgttatccggccaactacttcgaaaaacctagtaacaccgtggaagttgcagagtgtttcgctcagcactaccccagtgtagatcaggtcgatgagtcaccgcattccccacgggcgaccgtggcggtggctgcgttggcggcctgcccatggggaaacccatgggacgctctaatacagacatggtgcgaagagtctattgagctagttggtagtcctccggcccctgaatgcggctaatcctaactgcggagcacacaccctcaagccagagggcagtgtgtcgtaacgggcaactctgcagcggaaccgactactttgggtgtccgtgtttcattttattcctatactggctgcttatggtgacaattgagagatcgttaccatatagctattggattggccatccggtgactaatagagctattatatatccctttgttgggtttataccacttagcttgaaagaggttaaaacattacaattcattgttaagttgaatacagcaaaatggaagatgccaagaacatcaagaagggccctgctccattctaccctctggaagatggaacagccggcgagcagctgcacaaggccatgaagagatatgccctggtgcctggcacaatcgccttcacagatgcccacatcgaggtggacatcacctacgccgagtacttcgagatgtctgtgcggctggccgaagctatgaagcgctacggcctgaacaccaaccaccggatcgtcgtgtgcagcgagaacagcctgcagttcttcatgcctgtgctgggcgccctgttcatcggagttgctgtggcccctgccaacgacatctacaacgagcgcgagctgctgaacagcatgggcatctctcagcccaccgtggtgttcgtgtccaagaagggactgcagaaaatcctgaacgtgcagaagaagctgcccatcatccagaaaatcatcatcatggacagcaagaccgactaccagggcttccagagcatgtacaccttcgtgaccagccatctgccacctggcttcaacgagtacgacttcgtgcccgagagcttcgaccgggacaagacaatcgccctgatcatgaacagcagcggctctaccggactgcccaaaggtgttgccctgcctcatagaactgcctgcgtgcggtttagccacgccagagatcccatcttcggcaaccagatcatccccgacacagccatcctgagcgtggtgccttttcaccacggcttcggcatgttcaccacactgggctacctgatctgcggcttcagagtggtgctgatgtaccgcttcgaggaagaactgttcctgcggagcctgcaggactacaagatccagtctgctctgctggtgcctactctgttcagcttctttgccaagagcaccctgatcgataagtacgacctgagcaacctgcacgagatcgcctctggcggagcccctctgtctaaagaagtgggagaagccgtcgccaagcggttccatctgcctggcatcagacaaggctatggcctgaccgagacaaccagcgccattctgattacccctgagggcgacgataagcctggcgctgtgggaaaagtggtgccattcttcgaggccaaggtggtggatctggacaccggcaaaacactgggcgttaaccagaggggcgagctgtgtgttagaggccctatgatcatgagcggctacgtgaacaaccccgaggccacaaacgctctgatcgacaaggatggatggctgcacagcggcgacattgcctactgggacgaagatgagcacttcttcatcgtggaccggctgaagtccctgatcaagtacaagggctaccaggtggccccagccgagctggaatctattctgctgcaacaccccaacatcttcgatgccggcgttgcaggactgcccgatgatgatgctggcgaactgccagctgctgtggtggtgctggaacacggcaagaccatgaccgagaaagaaatcgtggactacgtggccagccaagtgaccaccgccaagaaactgagaggcggcgtggtgtttgtggacgaggtgccaaaaggcctgacaggcaagctggacgcccggaagatcagagagatcctgattaaggccaagaaaggcggcaagatcgccgtgtaatagctaactagacaaaacaccaaacaaacaagctgcgagccacggacttaaataattgagccttaaagaagaaattctttaagtggatgctctcaaactcagaaaaacaaccaaaaaaaatctagatatcggatcccggg

SEQ ID NO: 3283 - DNA, 2831 bp, synthetic construct
  source 1..2831: mol_type = other DNA; note = Ana1.62
taatacgactcactatagggagaccctcgaaaaaaaacacaaacaccgaaacctaaatctagttatagacaaggcaatcctgagccaagccgaagtagtaattagtaagttaacaatagatgacttacaactaatcggaaggtgcagagactcgacgggagctaccctaacgtcaagacgagggtaaagagagagtccaattctcaaagccaataggcagtagcgaaagctgcaagagaatgaaaatccgtggctcgcagcaaacaccaaacaaaacaaacacaaaccaacaaaaattaaaacagcctgtgggttgatcccacccacaggcccattgggcgctagcactctggtatcacggtacctttgtgcgcctgttttataccccctcccccaactgtaacttagaagtaacacacaccgatcaacagtcagcgtggcacaccagccacgttttgatcaagcacttctgttaccccggactgagtatcaatagactgctcacgcggttgaaggagaaagcgttcgttatccggccaactacttcgaaaaacctagtaacaccgtggaagttgcagagtgtttcgctcagcactaccccagtgtagatcaggtcgatgagtcaccgcattccccacgggcgaccgtggcggtggctgcgttggcggcctgcccatggggaaacccatgggacgctctaatacagacatggtgcgaagagtctattgagctagttggtagtcctccggcccctgaatgcggctaatcctaactgcggagcacacaccctcaagccagagggcagtgtgtcgtaacgggcaactctgcagcggaaccgactactttgggtgtccgtgtttcattttattcctatactggctgcttatggtgacaattgagagatcgttaccatatagctattggattggccatccggtgactaatagagctattatatatccctttgttgggtttataccacttagcttgaaagaggttaaaacattacaattcattgttaagttgaatacagcaaaatggaagatgccaagaacatcaagaagggccctgctccattctaccctctggaagatggaacagccggcgagcagctgcacaaggccatgaagagatatgccctggtgcctggcacaatcgccttcacagatgcccacatcgaggtggacatcacctacgccgagtacttcgagatgtctgtgcggctggccgaagctatgaagcgctacggcctgaacaccaaccaccggatcgtcgtgtgcagcgagaacagcctgcagttcttcatgcctgtgctgggcgccctgttcatcggagttgctgtggcccctgccaacgacatctacaacgagcgcgagctgctgaacagcatgggcatctctcagcccaccgtggtgttcgtgtccaagaagggactgcagaaaatcctgaacgtgcagaagaagctgcccatcatccagaaaatcatcatcatggacagcaagaccgactaccagggcttccagagcatgtacaccttcgtgaccagccatctgccacctggcttcaacgagtacgacttcgtgcccgagagcttcgaccgggacaagacaatcgccctgatcatgaacagcagcggctctaccggactgcccaaaggtgttgccctgcctcatagaactgcctgcgtgcggtttagccacgccagagatcccatcttcggcaaccagatcatccccgacacagccatcctgagcgtggtgccttttcaccacggcttcggcatgttcaccacactgggctacctgatctgcggcttcagagtggtgctgatgtaccgcttcgaggaagaactgttcctgcggagcctgcaggactacaagatccagtctgctctgctggtgcctactctgttcagcttctttgccaagagcaccctgatcgataagtacgacctgagcaacctgcacgagatcgcctctggcggagcccctctgtctaaagaagtgggagaagccgtcgccaagcggttccatctgcctggcatcagacaaggctatggcctgaccgagacaaccagcgccattctgattacccctgagggcgacgataagcctggcgctgtgggaaaagtggtgccattcttcgaggccaaggtggtggatctggacaccggcaaaacactgggcgttaaccagaggggcgagctgtgtgttagaggccctatgatcatgagcggctacgtgaacaaccccgaggccacaaacgctctgatcgacaaggatggatggctgcacagcggcgacattgcctactgggacgaagatgagcacttcttcatcgtggaccggctgaagtccctgatcaagtacaagggctaccaggtggccccagccgagctggaatctattctgctgcaacaccccaacatcttcgatgccggcgttgcaggactgcccgatgatgatgctggcgaactgccagctgctgtggtggtgctggaacacggcaagaccatgaccgagaaagaaatcgtggactacgtggccagccaagtgaccaccgccaagaaactgagaggcggcgtggtgtttgtggacgaggtgccaaaaggcctgacaggcaagctggacgcccggaagatcagagagatcctgattaaggccaagaaaggcggcaagatcgccgtgtaatagctaactagacaaaacaccaaacaaacaagctgcgagccacggacttaaataattgagccttaaagaagaaattctttaagtggatgctctcaaactcaggaaaaacaaccaaaaaaaatctagatatcggatcccggg

SEQ ID NO: 3284 - DNA, 2831 bp, synthetic construct
  source 1..2831: mol_type = other DNA; note = Ana1.63
taatacgactcactatagggagaccctcgaaaaaaaacacaaacaccaaacctaaatctagttatagacaaggcaatcctgagccaagccgaagtagtaattagtaagttaacaatagatgacttacaactaatcggaaggtgcagagactcgacgggagctaccctaacgtcaagacgagggtaaagagagagtccaattctcaaagccaataggcagtagcgaaagctgcaagagaatgaaaatccgtggctcgcagcaaacaccaaacaaaacaaacacaaaccaacaaaaattaaaacagcctgtgggttgatcccacccacaggcccattgggcgctagcactctggtatcacggtacctttgtgcgcctgttttataccccctcccccaactgtaacttagaagtaacacacaccgatcaacagtcagcgtggcacaccagccacgttttgatcaagcacttctgttaccccggactgagtatcaatagactgctcacgcggttgaaggagaaagcgttcgttatccggccaactacttcgaaaaacctagtaacaccgtggaagttgcagagtgtttcgctcagcactaccccagtgtagatcaggtcgatgagtcaccgcattccccacgggcgaccgtggcggtggctgcgttggcggcctgcccatggggaaacccatgggacgctctaatacagacatggtgcgaagagtctattgagctagttggtagtcctccggcccctgaatgcggctaatcctaactgcggagcacacaccctcaagccagagggcagtgtgtcgtaacgggcaactctgcagcggaaccgactactttgggtgtccgtgtttcattttattcctatactggctgcttatggtgacaattgagagatcgttaccatatagctattggattggccatccggtgactaatagagctattatatatccctttgttgggtttataccacttagcttgaaagaggttaaaacattacaattcattgttaagttgaatacagcaaaatggaagatgccaagaacatcaagaagggccctgctccattctaccctctggaagatggaacagccggcgagcagctgcacaaggccatgaagagatatgccctggtgcctggcacaatcgccttcacagatgcccacatcgaggtggacatcacctacgccgagtacttcgagatgtctgtgcggctggccgaagctatgaagcgctacggcctgaacaccaaccaccggatcgtcgtgtgcagcgagaacagcctgcagttcttcatgcctgtgctgggcgccctgttcatcggagttgctgtggcccctgccaacgacatctacaacgagcgcgagctgctgaacagcatgggcatctctcagcccaccgtggtgttcgtgtccaagaagggactgcagaaaatcctgaacgtgcagaagaagctgcccatcatccagaaaatcatcatcatggacagcaagaccgactaccagggcttccagagcatgtacaccttcgtgaccagccatctgccacctggcttcaacgagtacgacttcgtgcccgagagcttcgaccgggacaagacaatcgccctgatcatgaacagcagcggctctaccggactgcccaaaggtgttgccctgcctcatagaactgcctgcgtgcggtttagccacgccagagatcccatcttcggcaaccagatcatccccgacacagccatcctgagcgtggtgccttttcaccacggcttcggcatgttcaccacactgggctacctgatctgcggcttcagagtggtgctgatgtaccgcttcgaggaagaactgttcctgcggagcctgcaggactacaagatccagtctgctctgctggtgcctactctgttcagcttctttgccaagagcaccctgatcgataagtacgacctgagcaacctgcacgagatcgcctctggcggagcccctctgtctaaagaagtgggagaagccgtcgccaagcggttccatctgcctggcatcagacaaggctatggcctgaccgagacaaccagcgccattctgattacccctgagggcgacgataagcctggcgctgtgggaaaagtggtgccattcttcgaggccaaggtggtggatctggacaccggcaaaacactgggcgttaaccagaggggcgagctgtgtgttagaggccctatgatcatgagcggctacgtgaacaaccccgaggccacaaacgctctgatcgacaaggatggatggctgcacagcggcgacattgcctactgggacgaagatgagcacttcttcatcgtggaccggctgaagtccctgatcaagtacaagggctaccaggtggccccagccgagctggaatctattctgctgcaacaccccaacatcttcgatgccggcgttgcaggactgcccgatgatgatgctggcgaactgccagctgctgtggtggtgctggaacacggcaagaccatgaccgagaaagaaatcgtggactacgtggccagccaagtgaccaccgccaagaaactgagaggcggcgtggtgtttgtggacgaggtgccaaaaggcctgacaggcaagctggacgcccggaagatcagagagatcctgattaaggccaagaaaggcggcaagatcgccgtgtaatagctaactagacaaaacaccaaacaaacaagctgcgagccacggacttaaataattgagccttaaagaagaaattctttaagtggatgctctcaaactcagggaaaaacaaccaaaaaaaatctagatatcggatcccggg

SEQ ID NO: 3285 - DNA, 2831 bp, synthetic construct
  source 1..2831: mol_type = other DNA; note = Ana1.64
taatacgactcactatagggagaccctcgaaaaaaaacacaaacaccaacctaaatctagttatagacaaggcaatcctgagccaagccgaagtagtaattagtaagttaacaatagatgacttacaactaatcggaaggtgcagagactcgacgggagctaccctaacgtcaagacgagggtaaagagagagtccaattctcaaagccaataggcagtagcgaaagctgcaagagaatgaaaatccgtggctcgcagcaaacaccaaacaaaacaaacacaaaccaacaaaaattaaaacagcctgtgggttgatcccacccacaggcccattgggcgctagcactctggtatcacggtacctttgtgcgcctgttttataccccctcccccaactgtaacttagaagtaacacacaccgatcaacagtcagcgtggcacaccagccacgttttgatcaagcacttctgttaccccggactgagtatcaatagactgctcacgcggttgaaggagaaagcgttcgttatccggccaactacttcgaaaaacctagtaacaccgtggaagttgcagagtgtttcgctcagcactaccccagtgtagatcaggtcgatgagtcaccgcattccccacgggcgaccgtggcggtggctgcgttggcggcctgcccatggggaaacccatgggacgctctaatacagacatggtgcgaagagtctattgagctagttggtagtcctccggcccctgaatgcggctaatcctaactgcggagcacacaccctcaagccagagggcagtgtgtcgtaacgggcaactctgcagcggaaccgactactttgggtgtccgtgtttcattttattcctatactggctgcttatggtgacaattgagagatcgttaccatatagctattggattggccatccggtgactaatagagctattatatatccctttgttgggtttataccacttagcttgaaagaggttaaaacattacaattcattgttaagttgaatacagcaaaatggaagatgccaagaacatcaagaagggccctgctccattctaccctctggaagatggaacagccggcgagcagctgcacaaggccatgaagagatatgccctggtgcctggcacaatcgccttcacagatgcccacatcgaggtggacatcacctacgccgagtacttcgagatgtctgtgcggctggccgaagctatgaagcgctacggcctgaacaccaaccaccggatcgtcgtgtgcagcgagaacagcctgcagttcttcatgcctgtgctgggcgccctgttcatcggagttgctgtggcccctgccaacgacatctacaacgagcgcgagctgctgaacagcatgggcatctctcagcccaccgtggtgttcgtgtccaagaagggactgcagaaaatcctgaacgtgcagaagaagctgcccatcatccagaaaatcatcatcatggacagcaagaccgactaccagggcttccagagcatgtacaccttcgtgaccagccatctgccacctggcttcaacgagtacgacttcgtgcccgagagcttcgaccgggacaagacaatcgccctgatcatgaacagcagcggctctaccggactgcccaaaggtgttgccctgcctcatagaactgcctgcgtgcggtttagccacgccagagatcccatcttcggcaaccagatcatccccgacacagccatcctgagcgtggtgccttttcaccacggcttcggcatgttcaccacactgggctacctgatctgcggcttcagagtggtgctgatgtaccgcttcgaggaagaactgttcctgcggagcctgcaggactacaagatccagtctgctctgctggtgcctactctgttcagcttctttgccaagagcaccctgatcgataagtacgacctgagcaacctgcacgagatcgcctctggcggagcccctctgtctaaagaagtgggagaagccgtcgccaagcggttccatctgcctggcatcagacaaggctatggcctgaccgagacaaccagcgccattctgattacccctgagggcgacgataagcctggcgctgtgggaaaagtggtgccattcttcgaggccaaggtggtggatctggacaccggcaaaacactgggcgttaaccagaggggcgagctgtgtgttagaggccctatgatcatgagcggctacgtgaacaaccccgaggccacaaacgctctgatcgacaaggatggatggctgcacagcggcgacattgcctactgggacgaagatgagcacttcttcatcgtggaccggctgaagtccctgatcaagtacaagggctaccaggtggccccagccgagctggaatctattctgctgcaacaccccaacatcttcgatgccggcgttgcaggactgcccgatgatgatgctggcgaactgccagctgctgtggtggtgctggaacacggcaagaccatgaccgagaaagaaatcgtggactacgtggccagccaagtgaccaccgccaagaaactgagaggcggcgtggtgtttgtggacgaggtgccaaaaggcctgacaggcaagctggacgcccggaagatcagagagatcctgattaaggccaagaaaggcggcaagatcgccgtgtaatagctaactagacaaaacaccaaacaaacaagctgcgagccacggacttaaataattgagccttaaagaagaaattctttaagtggatgctctcaaactcagggaaaaaacaaccaaaaaaaatctagatatcggatcccggg

SEQ ID NO: 3286 - DNA, 2831 bp, synthetic construct
  source 1..2831: mol_type = other DNA; note = Ana1.65
taatacgactcactatagggagaccctcgaaaaaaaacacaaacaccacctaaatctagttatagacaaggcaatcctgagccaagccgaagtagtaattagtaagttaacaatagatgacttacaactaatcggaaggtgcagagactcgacgggagctaccctaacgtcaagacgagggtaaagagagagtccaattctcaaagccaataggcagtagcgaaagctgcaagagaatgaaaatccgtggctcgcagcaaacaccaaacaaaacaaacacaaaccaacaaaaattaaaacagcctgtgggttgatcccacccacaggcccattgggcgctagcactctggtatcacggtacctttgtgcgcctgttttataccccctcccccaactgtaacttagaagtaacacacaccgatcaacagtcagcgtggcacaccagccacgttttgatcaagcacttctgttaccccggactgagtatcaatagactgctcacgcggttgaaggagaaagcgttcgttatccggccaactacttcgaaaaacctagtaacaccgtggaagttgcagagtgtttcgctcagcactaccccagtgtagatcaggtcgatgagtcaccgcattccccacgggcgaccgtggcggtggctgcgttggcggcctgcccatggggaaacccatgggacgctctaatacagacatggtgcgaagagtctattgagctagttggtagtcctccggcccctgaatgcggctaatcctaactgcggagcacacaccctcaagccagagggcagtgtgtcgtaacgggcaactctgcagcggaaccgactactttgggtgtccgtgtttcattttattcctatactggctgcttatggtgacaattgagagatcgttaccatatagctattggattggccatccggtgactaatagagctattatatatccctttgttgggtttataccacttagcttgaaagaggttaaaacattacaattcattgttaagttgaatacagcaaaatggaagatgccaagaacatcaagaagggccctgctccattctaccctctggaagatggaacagccggcgagcagctgcacaaggccatgaagagatatgccctggtgcctggcacaatcgccttcacagatgcccacatcgaggtggacatcacctacgccgagtacttcgagatgtctgtgcggctggccgaagctatgaagcgctacggcctgaacaccaaccaccggatcgtcgtgtgcagcgagaacagcctgcagttcttcatgcctgtgctgggcgccctgttcatcggagttgctgtggcccctgccaacgacatctacaacgagcgcgagctgctgaacagcatgggcatctctcagcccaccgtggtgttcgtgtccaagaagggactgcagaaaatcctgaacgtgcagaagaagctgcccatcatccagaaaatcatcatcatggacagcaagaccgactaccagggcttccagagcatgtacaccttcgtgaccagccatctgccacctggcttcaacgagtacgacttcgtgcccgagagcttcgaccgggacaagacaatcgccctgatcatgaacagcagcggctctaccggactgcccaaaggtgttgccctgcctcatagaactgcctgcgtgcggtttagccacgccagagatcccatcttcggcaaccagatcatccccgacacagccatcctgagcgtggtgccttttcaccacggcttcggcatgttcaccacactgggctacctgatctgcggcttcagagtggtgctgatgtaccgcttcgaggaagaactgttcctgcggagcctgcaggactacaagatccagtctgctctgctggtgcctactctgttcagcttctttgccaagagcaccctgatcgataagtacgacctgagcaacctgcacgagatcgcctctggcggagcccctctgtctaaagaagtgggagaagccgtcgccaagcggttccatctgcctggcatcagacaaggctatggcctgaccgagacaaccagcgccattctgattacccctgagggcgacgataagcctggcgctgtgggaaaagtggtgccattcttcgaggccaaggtggtggatctggacaccggcaaaacactgggcgttaaccagaggggcgagctgtgtgttagaggccctatgatcatgagcggctacgtgaacaaccccgaggccacaaacgctctgatcgacaaggatggatggctgcacagcggcgacattgcctactgggacgaagatgagcacttcttcatcgtggaccggctgaagtccctgatcaagtacaagggctaccaggtggccccagccgagctggaatctattctgctgcaacaccccaacatcttcgatgccggcgttgcaggactgcccgatgatgatgctggcgaactgccagctgctgtggtggtgctggaacacggcaagaccatgaccgagaaagaaatcgtggactacgtggccagccaagtgaccaccgccaagaaactgagaggcggcgtggtgtttgtggacgaggtgccaaaaggcctgacaggcaagctggacgcccggaagatcagagagatcctgattaaggccaagaaaggcggcaagatcgccgtgtaatagctaactagacaaaacaccaaacaaacaagctgcgagccacggacttaaataattgagccttaaagaagaaattctttaagtggatgctctcaaactcagggaaaaaaacaaccaaaaaaaatctagatatcggatcccggg

SEQ ID NO: 3287 - DNA, 2831 bp, synthetic construct
  source 1..2831: mol_type = other DNA; note = Ana1.66
taatacgactcactatagggagaccctcgaaaaaaaacacaaacacccctaaatctagttatagacaaggcaatcctgagccaagccgaagtagtaattagtaagttaacaatagatgacttacaactaatcggaaggtgcagagactcgacgggagctaccctaacgtcaagacgagggtaaagagagagtccaattctcaaagccaataggcagtagcgaaagctgcaagagaatgaaaatccgtggctcgcagcaaacaccaaacaaaacaaacacaaaccaacaaaaattaaaacagcctgtgggttgatcccacccacaggcccattgggcgctagcactctggtatcacggtacctttgtgcgcctgttttataccccctcccccaactgtaacttagaagtaacacacaccgatcaacagtcagcgtggcacaccagccacgttttgatcaagcacttctgttaccccggactgagtatcaatagactgctcacgcggttgaaggagaaagcgttcgttatccggccaactacttcgaaaaacctagtaacaccgtggaagttgcagagtgtttcgctcagcactaccccagtgtagatcaggtcgatgagtcaccgcattccccacgggcgaccgtggcggtggctgcgttggcggcctgcccatggggaaacccatgggacgctctaatacagacatggtgcgaagagtctattgagctagttggtagtcctccggcccctgaatgcggctaatcctaactgcggagcacacaccctcaagccagagggcagtgtgtcgtaacgggcaactctgcagcggaaccgactactttgggtgtccgtgtttcattttattcctatactggctgcttatggtgacaattgagagatcgttaccatatagctattggattggccatccggtgactaatagagctattatatatccctttgttgggtttataccacttagcttgaaagaggttaaaacattacaattcattgttaagttgaatacagcaaaatggaagatgccaagaacatcaagaagggccctgctccattctaccctctggaagatggaacagccggcgagcagctgcacaaggccatgaagagatatgccctggtgcctggcacaatcgccttcacagatgcccacatcgaggtggacatcacctacgccgagtacttcgagatgtctgtgcggctggccgaagctatgaagcgctacggcctgaacaccaaccaccggatcgtcgtgtgcagcgagaacagcctgcagttcttcatgcctgtgctgggcgccctgttcatcggagttgctgtggcccctgccaacgacatctacaacgagcgcgagctgctgaacagcatgggcatctctcagcccaccgtggtgttcgtgtccaagaagggactgcagaaaatcctgaacgtgcagaagaagctgcccatcatccagaaaatcatcatcatggacagcaagaccgactaccagggcttccagagcatgtacaccttcgtgaccagccatctgccacctggcttcaacgagtacgacttcgtgcccgagagcttcgaccgggacaagacaatcgccctgatcatgaacagcagcggctctaccggactgcccaaaggtgttgccctgcctcatagaactgcctgcgtgcggtttagccacgccagagatcccatcttcggcaaccagatcatccccgacacagccatcctgagcgtggtgccttttcaccacggcttcggcatgttcaccacactgggctacctgatctgcggcttcagagtggtgctgatgtaccgcttcgaggaagaactgttcctgcggagcctgcaggactacaagatccagtctgctctgctggtgcctactctgttcagcttctttgccaagagcaccctgatcgataagtacgacctgagcaacctgcacgagatcgcctctggcggagcccctctgtctaaagaagtgggagaagccgtcgccaagcggttccatctgcctggcatcagacaaggctatggcctgaccgagacaaccagcgccattctgattacccctgagggcgacgataagcctggcgctgtgggaaaagtggtgccattcttcgaggccaaggtggtggatctggacaccggcaaaacactgggcgttaaccagaggggcgagctgtgtgttagaggccctatgatcatgagcggctacgtgaacaaccccgaggccacaaacgctctgatcgacaaggatggatggctgcacagcggcgacattgcctactgggacgaagatgagcacttcttcatcgtggaccggctgaagtccctgatcaagtacaagggctaccaggtggccccagccgagctggaatctattctgctgcaacaccccaacatcttcgatgccggcgttgcaggactgcccgatgatgatgctggcgaactgccagctgctgtggtggtgctggaacacggcaagaccatgaccgagaaagaaatcgtggactacgtggccagccaagtgaccaccgccaagaaactgagaggcggcgtggtgtttgtggacgaggtgccaaaaggcctgacaggcaagctggacgcccggaagatcagagagatcctgattaaggccaagaaaggcggcaagatcgccgtgtaatagctaactagacaaaacaccaaacaaacaagctgcgagccacggacttaaataattgagccttaaagaagaaattctttaagtggatgctctcaaactcagggaaaaaaaacaaccaaaaaaaatctagatatcggatcccggg

SEQ ID NO: 3288 - DNA, 2831 bp, synthetic construct
  source 1..2831: mol_type = other DNA; note = Ana1.67
taatacgactcactatagggagaccctcgaaaaaaaacacaaacaccctaaatctagttatagacaaggcaatcctgagccaagccgaagtagtaattagtaagttaacaatagatgacttacaactaatcggaaggtgcagagactcgacgggagctaccctaacgtcaagacgagggtaaagagagagtccaattctcaaagccaataggcagtagcgaaagctgcaagagaatgaaaatccgtggctcgcagcaaacaccaaacaaaacaaacacaaaccaacaaaaattaaaacagcctgtgggttgatcccacccacaggcccattgggcgctagcactctggtatcacggtacctttgtgcgcctgttttataccccctcccccaactgtaacttagaagtaacacacaccgatcaacagtcagcgtggcacaccagccacgttttgatcaagcacttctgttaccccggactgagtatcaatagactgctcacgcggttgaaggagaaagcgttcgttatccggccaactacttcgaaaaacctagtaacaccgtggaagttgcagagtgtttcgctcagcactaccccagtgtagatcaggtcgatgagtcaccgcattccccacgggcgaccgtggcggtggctgcgttggcggcctgcccatggggaaacccatgggacgctctaatacagacatggtgcgaagagtctattgagctagttggtagtcctccggcccctgaatgcggctaatcctaactgcggagcacacaccctcaagccagagggcagtgtgtcgtaacgggcaactctgcagcggaaccgactactttgggtgtccgtgtttcattttattcctatactggctgcttatggtgacaattgagagatcgttaccatatagctattggattggccatccggtgactaatagagctattatatatccctttgttgggtttataccacttagcttgaaagaggttaaaacattacaattcattgttaagttgaatacagcaaaatggaagatgccaagaacatcaagaagggccctgctccattctaccctctggaagatggaacagccggcgagcagctgcacaaggccatgaagagatatgccctggtgcctggcacaatcgccttcacagatgcccacatcgaggtggacatcacctacgccgagtacttcgagatgtctgtgcggctggccgaagctatgaagcgctacggcctgaacaccaaccaccggatcgtcgtgtgcagcgagaacagcctgcagttcttcatgcctgtgctgggcgccctgttcatcggagttgctgtggcccctgccaacgacatctacaacgagcgcgagctgctgaacagcatgggcatctctcagcccaccgtggtgttcgtgtccaagaagggactgcagaaaatcctgaacgtgcagaagaagctgcccatcatccagaaaatcatcatcatggacagcaagaccgactaccagggcttccagagcatgtacaccttcgtgaccagccatctgccacctggcttcaacgagtacgacttcgtgcccgagagcttcgaccgggacaagacaatcgccctgatcatgaacagcagcggctctaccggactgcccaaaggtgttgccctgcctcatagaactgcctgcgtgcggtttagccacgccagagatcccatcttcggcaaccagatcatccccgacacagccatcctgagcgtggtgccttttcaccacggcttcggcatgttcaccacactgggctacctgatctgcggcttcagagtggtgctgatgtaccgcttcgaggaagaactgttcctgcggagcctgcaggactacaagatccagtctgctctgctggtgcctactctgttcagcttctttgccaagagcaccctgatcgataagtacgacctgagcaacctgcacgagatcgcctctggcggagcccctctgtctaaagaagtgggagaagccgtcgccaagcggttccatctgcctggcatcagacaaggctatggcctgaccgagacaaccagcgccattctgattacccctgagggcgacgataagcctggcgctgtgggaaaagtggtgccattcttcgaggccaaggtggtggatctggacaccggcaaaacactgggcgttaaccagaggggcgagctgtgtgttagaggccctatgatcatgagcggctacgtgaacaaccccgaggccacaaacgctctgatcgacaaggatggatggctgcacagcggcgacattgcctactgggacgaagatgagcacttcttcatcgtggaccggctgaagtccctgatcaagtacaagggctaccaggtggccccagccgagctggaatctattctgctgcaacaccccaacatcttcgatgccggcgttgcaggactgcccgatgatgatgctggcgaactgccagctgctgtggtggtgctggaacacggcaagaccatgaccgagaaagaaatcgtggactacgtggccagccaagtgaccaccgccaagaaactgagaggcggcgtggtgtttgtggacgaggtgccaaaaggcctgacaggcaagctggacgcccggaagatcagagagatcctgattaaggccaagaaaggcggcaagatcgccgtgtaatagctaactagacaaaacaccaaacaaacaagctgcgagccacggacttaaataattgagccttaaagaagaaattctttaagtggatgctctcaaactcagggaaacaaaaacaaccaaaaaaaatctagatatcggatcccggg

SEQ ID NO: 3289 - DNA, 2831 bp, synthetic construct
  source 1..2831: mol_type = other DNA; note = Ana1.68
taatacgactcactatagggagaccctcgaaaaaaaacacaaacacctaaatctagttatagacaaggcaatcctgagccaagccgaagtagtaattagtaagttaacaatagatgacttacaactaatcggaaggtgcagagactcgacgggagctaccctaacgtcaagacgagggtaaagagagagtccaattctcaaagccaataggcagtagcgaaagctgcaagagaatgaaaatccgtggctcgcagcaaacaccaaacaaaacaaacacaaaccaacaaaaattaaaacagcctgtgggttgatcccacccacaggcccattgggcgctagcactctggtatcacggtacctttgtgcgcctgttttataccccctcccccaactgtaacttagaagtaacacacaccgatcaacagtcagcgtggcacaccagccacgttttgatcaagcacttctgttaccccggactgagtatcaatagactgctcacgcggttgaaggagaaagcgttcgttatccggccaactacttcgaaaaacctagtaacaccgtggaagttgcagagtgtttcgctcagcactaccccagtgtagatcaggtcgatgagtcaccgcattccccacgggcgaccgtggcggtggctgcgttggcggcctgcccatggggaaacccatgggacgctctaatacagacatggtgcgaagagtctattgagctagttggtagtcctccggcccctgaatgcggctaatcctaactgcggagcacacaccctcaagccagagggcagtgtgtcgtaacgggcaactctgcagcggaaccgactactttgggtgtccgtgtttcattttattcctatactggctgcttatggtgacaattgagagatcgttaccatatagctattggattggccatccggtgactaatagagctattatatatccctttgttgggtttataccacttagcttgaaagaggttaaaacattacaattcattgttaagttgaatacagcaaaatggaagatgccaagaacatcaagaagggccctgctccattctaccctctggaagatggaacagccggcgagcagctgcacaaggccatgaagagatatgccctggtgcctggcacaatcgccttcacagatgcccacatcgaggtggacatcacctacgccgagtacttcgagatgtctgtgcggctggccgaagctatgaagcgctacggcctgaacaccaaccaccggatcgtcgtgtgcagcgagaacagcctgcagttcttcatgcctgtgctgggcgccctgttcatcggagttgctgtggcccctgccaacgacatctacaacgagcgcgagctgctgaacagcatgggcatctctcagcccaccgtggtgttcgtgtccaagaagggactgcagaaaatcctgaacgtgcagaagaagctgcccatcatccagaaaatcatcatcatggacagcaagaccgactaccagggcttccagagcatgtacaccttcgtgaccagccatctgccacctggcttcaacgagtacgacttcgtgcccgagagcttcgaccgggacaagacaatcgccctgatcatgaacagcagcggctctaccggactgcccaaaggtgttgccctgcctcatagaactgcctgcgtgcggtttagccacgccagagatcccatcttcggcaaccagatcatccccgacacagccatcctgagcgtggtgccttttcaccacggcttcggcatgttcaccacactgggctacctgatctgcggcttcagagtggtgctgatgtaccgcttcgaggaagaactgttcctgcggagcctgcaggactacaagatccagtctgctctgctggtgcctactctgttcagcttctttgccaagagcaccctgatcgataagtacgacctgagcaacctgcacgagatcgcctctggcggagcccctctgtctaaagaagtgggagaagccgtcgccaagcggttccatctgcctggcatcagacaaggctatggcctgaccgagacaaccagcgccattctgattacccctgagggcgacgataagcctggcgctgtgggaaaagtggtgccattcttcgaggccaaggtggtggatctggacaccggcaaaacactgggcgttaaccagaggggcgagctgtgtgttagaggccctatgatcatgagcggctacgtgaacaaccccgaggccacaaacgctctgatcgacaaggatggatggctgcacagcggcgacattgcctactgggacgaagatgagcacttcttcatcgtggaccggctgaagtccctgatcaagtacaagggctaccaggtggccccagccgagctggaatctattctgctgcaacaccccaacatcttcgatgccggcgttgcaggactgcccgatgatgatgctggcgaactgccagctgctgtggtggtgctggaacacggcaagaccatgaccgagaaagaaatcgtggactacgtggccagccaagtgaccaccgccaagaaactgagaggcggcgtggtgtttgtggacgaggtgccaaaaggcctgacaggcaagctggacgcccggaagatcagagagatcctgattaaggccaagaaaggcggcaagatcgccgtgtaatagctaactagacaaaacaccaaacaaacaagctgcgagccacggacttaaataattgagccttaaagaagaaattctttaagtggatgctctcaaactcagggaaaccaaaaacaaccaaaaaaaatctagatatcggatcccggg

SEQ ID NO: 3290 - DNA, 2831 bp, synthetic construct
  source 1..2831: mol_type = other DNA; note = Ana1.69
taatacgactcactatagggagaccctcgaaaaaaaacacaaacaccaaatctagttatagacaaggcaatcctgagccaagccgaagtagtaattagtaagttaacaatagatgacttacaactaatcggaaggtgcagagactcgacgggagctaccctaacgtcaagacgagggtaaagagagagtccaattctcaaagccaataggcagtagcgaaagctgcaagagaatgaaaatccgtggctcgcagcaaacaccaaacaaaacaaacacaaaccaacaaaaattaaaacagcctgtgggttgatcccacccacaggcccattgggcgctagcactctggtatcacggtacctttgtgcgcctgttttataccccctcccccaactgtaacttagaagtaacacacaccgatcaacagtcagcgtggcacaccagccacgttttgatcaagcacttctgttaccccggactgagtatcaatagactgctcacgcggttgaaggagaaagcgttcgttatccggccaactacttcgaaaaacctagtaacaccgtggaagttgcagagtgtttcgctcagcactaccccagtgtagatcaggtcgatgagtcaccgcattccccacgggcgaccgtggcggtggctgcgttggcggcctgcccatggggaaacccatgggacgctctaatacagacatggtgcgaagagtctattgagctagttggtagtcctccggcccctgaatgcggctaatcctaactgcggagcacacaccctcaagccagagggcagtgtgtcgtaacgggcaactctgcagcggaaccgactactttgggtgtccgtgtttcattttattcctatactggctgcttatggtgacaattgagagatcgttaccatatagctattggattggccatccggtgactaatagagctattatatatccctttgttgggtttataccacttagcttgaaagaggttaaaacattacaattcattgttaagttgaatacagcaaaatggaagatgccaagaacatcaagaagggccctgctccattctaccctctggaagatggaacagccggcgagcagctgcacaaggccatgaagagatatgccctggtgcctggcacaatcgccttcacagatgcccacatcgaggtggacatcacctacgccgagtacttcgagatgtctgtgcggctggccgaagctatgaagcgctacggcctgaacaccaaccaccggatcgtcgtgtgcagcgagaacagcctgcagttcttcatgcctgtgctgggcgccctgttcatcggagttgctgtggcccctgccaacgacatctacaacgagcgcgagctgctgaacagcatgggcatctctcagcccaccgtggtgttcgtgtccaagaagggactgcagaaaatcctgaacgtgcagaagaagctgcccatcatccagaaaatcatcatcatggacagcaagaccgactaccagggcttccagagcatgtacaccttcgtgaccagccatctgccacctggcttcaacgagtacgacttcgtgcccgagagcttcgaccgggacaagacaatcgccctgatcatgaacagcagcggctctaccggactgcccaaaggtgttgccctgcctcatagaactgcctgcgtgcggtttagccacgccagagatcccatcttcggcaaccagatcatccccgacacagccatcctgagcgtggtgccttttcaccacggcttcggcatgttcaccacactgggctacctgatctgcggcttcagagtggtgctgatgtaccgcttcgaggaagaactgttcctgcggagcctgcaggactacaagatccagtctgctctgctggtgcctactctgttcagcttctttgccaagagcaccctgatcgataagtacgacctgagcaacctgcacgagatcgcctctggcggagcccctctgtctaaagaagtgggagaagccgtcgccaagcggttccatctgcctggcatcagacaaggctatggcctgaccgagacaaccagcgccattctgattacccctgagggcgacgataagcctggcgctgtgggaaaagtggtgccattcttcgaggccaaggtggtggatctggacaccggcaaaacactgggcgttaaccagaggggcgagctgtgtgttagaggccctatgatcatgagcggctacgtgaacaaccccgaggccacaaacgctctgatcgacaaggatggatggctgcacagcggcgacattgcctactgggacgaagatgagcacttcttcatcgtggaccggctgaagtccctgatcaagtacaagggctaccaggtggccccagccgagctggaatctattctgctgcaacaccccaacatcttcgatgccggcgttgcaggactgcccgatgatgatgctggcgaactgccagctgctgtggtggtgctggaacacggcaagaccatgaccgagaaagaaatcgtggactacgtggccagccaagtgaccaccgccaagaaactgagaggcggcgtggtgtttgtggacgaggtgccaaaaggcctgacaggcaagctggacgcccggaagatcagagagatcctgattaaggccaagaaaggcggcaagatcgccgtgtaatagctaactagacaaaacaccaaacaaacaagctgcgagccacggacttaaataattgagccttaaagaagaaattctttaagtggatgctctcaaactcagggaaacctaaaaacaaccaaaaaaaatctagatatcggatcccggg

SEQ ID NO: 3291 - DNA, 2831 bp, synthetic construct
  source 1..2831: mol_type = other DNA; note = Ana1.70
taatacgactcactatagggagaccctcgaaaaaaaacacaaacaccaatctagttatagacaaggcaatcctgagccaagccgaagtagtaattagtaagttaacaatagatgacttacaactaatcggaaggtgcagagactcgacgggagctaccctaacgtcaagacgagggtaaagagagagtccaattctcaaagccaataggcagtagcgaaagctgcaagagaatgaaaatccgtggctcgcagcaaacaccaaacaaaacaaacacaaaccaacaaaaattaaaacagcctgtgggttgatcccacccacaggcccattgggcgctagcactctggtatcacggtacctttgtgcgcctgttttataccccctcccccaactgtaacttagaagtaacacacaccgatcaacagtcagcgtggcacaccagccacgttttgatcaagcacttctgttaccccggactgagtatcaatagactgctcacgcggttgaaggagaaagcgttcgttatccggccaactacttcgaaaaacctagtaacaccgtggaagttgcagagtgtttcgctcagcactaccccagtgtagatcaggtcgatgagtcaccgcattccccacgggcgaccgtggcggtggctgcgttggcggcctgcccatggggaaacccatgggacgctctaatacagacatggtgcgaagagtctattgagctagttggtagtcctccggcccctgaatgcggctaatcctaactgcggagcacacaccctcaagccagagggcagtgtgtcgtaacgggcaactctgcagcggaaccgactactttgggtgtccgtgtttcattttattcctatactggctgcttatggtgacaattgagagatcgttaccatatagctattggattggccatccggtgactaatagagctattatatatccctttgttgggtttataccacttagcttgaaagaggttaaaacattacaattcattgttaagttgaatacagcaaaatggaagatgccaagaacatcaagaagggccctgctccattctaccctctggaagatggaacagccggcgagcagctgcacaaggccatgaagagatatgccctggtgcctggcacaatcgccttcacagatgcccacatcgaggtggacatcacctacgccgagtacttcgagatgtctgtgcggctggccgaagctatgaagcgctacggcctgaacaccaaccaccggatcgtcgtgtgcagcgagaacagcctgcagttcttcatgcctgtgctgggcgccctgttcatcggagttgctgtggcccctgccaacgacatctacaacgagcgcgagctgctgaacagcatgggcatctctcagcccaccgtggtgttcgtgtccaagaagggactgcagaaaatcctgaacgtgcagaagaagctgcccatcatccagaaaatcatcatcatggacagcaagaccgactaccagggcttccagagcatgtacaccttcgtgaccagccatctgccacctggcttcaacgagtacgacttcgtgcccgagagcttcgaccgggacaagacaatcgccctgatcatgaacagcagcggctctaccggactgcccaaaggtgttgccctgcctcatagaactgcctgcgtgcggtttagccacgccagagatcccatcttcggcaaccagatcatccccgacacagccatcctgagcgtggtgccttttcaccacggcttcggcatgttcaccacactgggctacctgatctgcggcttcagagtggtgctgatgtaccgcttcgaggaagaactgttcctgcggagcctgcaggactacaagatccagtctgctctgctggtgcctactctgttcagcttctttgccaagagcaccctgatcgataagtacgacctgagcaacctgcacgagatcgcctctggcggagcccctctgtctaaagaagtgggagaagccgtcgccaagcggttccatctgcctggcatcagacaaggctatggcctgaccgagacaaccagcgccattctgattacccctgagggcgacgataagcctggcgctgtgggaaaagtggtgccattcttcgaggccaaggtggtggatctggacaccggcaaaacactgggcgttaaccagaggggcgagctgtgtgttagaggccctatgatcatgagcggctacgtgaacaaccccgaggccacaaacgctctgatcgacaaggatggatggctgcacagcggcgacattgcctactgggacgaagatgagcacttcttcatcgtggaccggctgaagtccctgatcaagtacaagggctaccaggtggccccagccgagctggaatctattctgctgcaacaccccaacatcttcgatgccggcgttgcaggactgcccgatgatgatgctggcgaactgccagctgctgtggtggtgctggaacacggcaagaccatgaccgagaaagaaatcgtggactacgtggccagccaagtgaccaccgccaagaaactgagaggcggcgtggtgtttgtggacgaggtgccaaaaggcctgacaggcaagctggacgcccggaagatcagagagatcctgattaaggccaagaaaggcggcaagatcgccgtgtaatagctaactagacaaaacaccaaacaaacaagctgcgagccacggacttaaataattgagccttaaagaagaaattctttaagtggatgctctcaaactcagggaaacctaaaaaacaaccaaaaaaaatctagatatcggatcccggg

SEQ ID NO: 3292 - DNA, 2831 bp, synthetic construct
  source 1..2831: mol_type = other DNA; note = Ana1.71
taatacgactcactatagggagaccctcgaaaaaaaacacaaacaccatctagttatagacaaggcaatcctgagccaagccgaagtagtaattagtaagttaacaatagatgacttacaactaatcggaaggtgcagagactcgacgggagctaccctaacgtcaagacgagggtaaagagagagtccaattctcaaagccaataggcagtagcgaaagctgcaagagaatgaaaatccgtggctcgcagcaaacaccaaacaaaacaaacacaaaccaacaaaaattaaaacagcctgtgggttgatcccacccacaggcccattgggcgctagcactctggtatcacggtacctttgtgcgcctgttttataccccctcccccaactgtaacttagaagtaacacacaccgatcaacagtcagcgtggcacaccagccacgttttgatcaagcacttctgttaccccggactgagtatcaatagactgctcacgcggttgaaggagaaagcgttcgttatccggccaactacttcgaaaaacctagtaacaccgtggaagttgcagagtgtttcgctcagcactaccccagtgtagatcaggtcgatgagtcaccgcattccccacgggcgaccgtggcggtggctgcgttggcggcctgcccatggggaaacccatgggacgctctaatacagacatggtgcgaagagtctattgagctagttggtagtcctccggcccctgaatgcggctaatcctaactgcggagcacacaccctcaagccagagggcagtgtgtcgtaacgggcaactctgcagcggaaccgactactttgggtgtccgtgtttcattttattcctatactggctgcttatggtgacaattgagagatcgttaccatatagctattggattggccatccggtgactaatagagctattatatatccctttgttgggtttataccacttagcttgaaagaggttaaaacattacaattcattgttaagttgaatacagcaaaatggaagatgccaagaacatcaagaagggccctgctccattctaccctctggaagatggaacagccggcgagcagctgcacaaggccatgaagagatatgccctggtgcctggcacaatcgccttcacagatgcccacatcgaggtggacatcacctacgccgagtacttcgagatgtctgtgcggctggccgaagctatgaagcgctacggcctgaacaccaaccaccggatcgtcgtgtgcagcgagaacagcctgcagttcttcatgcctgtgctgggcgccctgttcatcggagttgctgtggcccctgccaacgacatctacaacgagcgcgagctgctgaacagcatgggcatctctcagcccaccgtggtgttcgtgtccaagaagggactgcagaaaatcctgaacgtgcagaagaagctgcccatcatccagaaaatcatcatcatggacagcaagaccgactaccagggcttccagagcatgtacaccttcgtgaccagccatctgccacctggcttcaacgagtacgacttcgtgcccgagagcttcgaccgggacaagacaatcgccctgatcatgaacagcagcggctctaccggactgcccaaaggtgttgccctgcctcatagaactgcctgcgtgcggtttagccacgccagagatcccatcttcggcaaccagatcatccccgacacagccatcctgagcgtggtgccttttcaccacggcttcggcatgttcaccacactgggctacctgatctgcggcttcagagtggtgctgatgtaccgcttcgaggaagaactgttcctgcggagcctgcaggactacaagatccagtctgctctgctggtgcctactctgttcagcttctttgccaagagcaccctgatcgataagtacgacctgagcaacctgcacgagatcgcctctggcggagcccctctgtctaaagaagtgggagaagccgtcgccaagcggttccatctgcctggcatcagacaaggctatggcctgaccgagacaaccagcgccattctgattacccctgagggcgacgataagcctggcgctgtgggaaaagtggtgccattcttcgaggccaaggtggtggatctggacaccggcaaaacactgggcgttaaccagaggggcgagctgtgtgttagaggccctatgatcatgagcggctacgtgaacaaccccgaggccacaaacgctctgatcgacaaggatggatggctgcacagcggcgacattgcctactgggacgaagatgagcacttcttcatcgtggaccggctgaagtccctgatcaagtacaagggctaccaggtggccccagccgagctggaatctattctgctgcaacaccccaacatcttcgatgccggcgttgcaggactgcccgatgatgatgctggcgaactgccagctgctgtggtggtgctggaacacggcaagaccatgaccgagaaagaaatcgtggactacgtggccagccaagtgaccaccgccaagaaactgagaggcggcgtggtgtttgtggacgaggtgccaaaaggcctgacaggcaagctggacgcccggaagatcagagagatcctgattaaggccaagaaaggcggcaagatcgccgtgtaatagctaactagacaaaacaccaaacaaacaagctgcgagccacggacttaaataattgagccttaaagaagaaattctttaagtggatgctctcaaactcagggaaacctaaaaaaacaaccaaaaaaaatctagatatcggatcccggg

SEQ ID NO: 3293 - DNA, 2831 bp, synthetic construct
  source 1..2831: mol_type = other DNA; note = Ana1.72
taatacgactcactatagggagaccctcgaaaaaaaacacaaacacctctagttatagacaaggcaatcctgagccaagccgaagtagtaattagtaagttaacaatagatgacttacaactaatcggaaggtgcagagactcgacgggagctaccctaacgtcaagacgagggtaaagagagagtccaattctcaaagccaataggcagtagcgaaagctgcaagagaatgaaaatccgtggctcgcagcaaacaccaaacaaaacaaacacaaaccaacaaaaattaaaacagcctgtgggttgatcccacccacaggcccattgggcgctagcactctggtatcacggtacctttgtgcgcctgttttataccccctcccccaactgtaacttagaagtaacacacaccgatcaacagtcagcgtggcacaccagccacgttttgatcaagcacttctgttaccccggactgagtatcaatagactgctcacgcggttgaaggagaaagcgttcgttatccggccaactacttcgaaaaacctagtaacaccgtggaagttgcagagtgtttcgctcagcactaccccagtgtagatcaggtcgatgagtcaccgcattccccacgggcgaccgtggcggtggctgcgttggcggcctgcccatggggaaacccatgggacgctctaatacagacatggtgcgaagagtctattgagctagttggtagtcctccggcccctgaatgcggctaatcctaactgcggagcacacaccctcaagccagagggcagtgtgtcgtaacgggcaactctgcagcggaaccgactactttgggtgtccgtgtttcattttattcctatactggctgcttatggtgacaattgagagatcgttaccatatagctattggattggccatccggtgactaatagagctattatatatccctttgttgggtttataccacttagcttgaaagaggttaaaacattacaattcattgttaagttgaatacagcaaaatggaagatgccaagaacatcaagaagggccctgctccattctaccctctggaagatggaacagccggcgagcagctgcacaaggccatgaagagatatgccctggtgcctggcacaatcgccttcacagatgcccacatcgaggtggacatcacctacgccgagtacttcgagatgtctgtgcggctggccgaagctatgaagcgctacggcctgaacaccaaccaccggatcgtcgtgtgcagcgagaacagcctgcagttcttcatgcctgtgctgggcgccctgttcatcggagttgctgtggcccctgccaacgacatctacaacgagcgcgagctgctgaacagcatgggcatctctcagcccaccgtggtgttcgtgtccaagaagggactgcagaaaatcctgaacgtgcagaagaagctgcccatcatccagaaaatcatcatcatggacagcaagaccgactaccagggcttccagagcatgtacaccttcgtgaccagccatctgccacctggcttcaacgagtacgacttcgtgcccgagagcttcgaccgggacaagacaatcgccctgatcatgaacagcagcggctctaccggactgcccaaaggtgttgccctgcctcatagaactgcctgcgtgcggtttagccacgccagagatcccatcttcggcaaccagatcatccccgacacagccatcctgagcgtggtgccttttcaccacggcttcggcatgttcaccacactgggctacctgatctgcggcttcagagtggtgctgatgtaccgcttcgaggaagaactgttcctgcggagcctgcaggactacaagatccagtctgctctgctggtgcctactctgttcagcttctttgccaagagcaccctgatcgataagtacgacctgagcaacctgcacgagatcgcctctggcggagcccctctgtctaaagaagtgggagaagccgtcgccaagcggttccatctgcctggcatcagacaaggctatggcctgaccgagacaaccagcgccattctgattacccctgagggcgacgataagcctggcgctgtgggaaaagtggtgccattcttcgaggccaaggtggtggatctggacaccggcaaaacactgggcgttaaccagaggggcgagctgtgtgttagaggccctatgatcatgagcggctacgtgaacaaccccgaggccacaaacgctctgatcgacaaggatggatggctgcacagcggcgacattgcctactgggacgaagatgagcacttcttcatcgtggaccggctgaagtccctgatcaagtacaagggctaccaggtggccccagccgagctggaatctattctgctgcaacaccccaacatcttcgatgccggcgttgcaggactgcccgatgatgatgctggcgaactgccagctgctgtggtggtgctggaacacggcaagaccatgaccgagaaagaaatcgtggactacgtggccagccaagtgaccaccgccaagaaactgagaggcggcgtggtgtttgtggacgaggtgccaaaaggcctgacaggcaagctggacgcccggaagatcagagagatcctgattaaggccaagaaaggcggcaagatcgccgtgtaatagctaactagacaaaacaccaaacaaacaagctgcgagccacggacttaaataattgagccttaaagaagaaattctttaagtggatgctctcaaactcagggaaacctaaaaaaaacaaccaaaaaaaatctagatatcggatcccggg

SEQ ID NO: 3294 - DNA, 2831 bp, synthetic construct
  source 1..2831: mol_type = other DNA; note = Ana1.73
taatacgactcactatagggagaccctcgaaaaaaaacacaaacaccctagttatagacaaggcaatcctgagccaagccgaagtagtaattagtaagttaacaatagatgacttacaactaatcggaaggtgcagagactcgacgggagctaccctaacgtcaagacgagggtaaagagagagtccaattctcaaagccaataggcagtagcgaaagctgcaagagaatgaaaatccgtggctcgcagcaaacaccaaacaaaacaaacacaaaccaacaaaaattaaaacagcctgtgggttgatcccacccacaggcccattgggcgctagcactctggtatcacggtacctttgtgcgcctgttttataccccctcccccaactgtaacttagaagtaacacacaccgatcaacagtcagcgtggcacaccagccacgttttgatcaagcacttctgttaccccggactgagtatcaatagactgctcacgcggttgaaggagaaagcgttcgttatccggccaactacttcgaaaaacctagtaacaccgtggaagttgcagagtgtttcgctcagcactaccccagtgtagatcaggtcgatgagtcaccgcattccccacgggcgaccgtggcggtggctgcgttggcggcctgcccatggggaaacccatgggacgctctaatacagacatggtgcgaagagtctattgagctagttggtagtcctccggcccctgaatgcggctaatcctaactgcggagcacacaccctcaagccagagggcagtgtgtcgtaacgggcaactctgcagcggaaccgactactttgggtgtccgtgtttcattttattcctatactggctgcttatggtgacaattgagagatcgttaccatatagctattggattggccatccggtgactaatagagctattatatatccctttgttgggtttataccacttagcttgaaagaggttaaaacattacaattcattgttaagttgaatacagcaaaatggaagatgccaagaacatcaagaagggccctgctccattctaccctctggaagatggaacagccggcgagcagctgcacaaggccatgaagagatatgccctggtgcctggcacaatcgccttcacagatgcccacatcgaggtggacatcacctacgccgagtacttcgagatgtctgtgcggctggccgaagctatgaagcgctacggcctgaacaccaaccaccggatcgtcgtgtgcagcgagaacagcctgcagttcttcatgcctgtgctgggcgccctgttcatcggagttgctgtggcccctgccaacgacatctacaacgagcgcgagctgctgaacagcatgggcatctctcagcccaccgtggtgttcgtgtccaagaagggactgcagaaaatcctgaacgtgcagaagaagctgcccatcatccagaaaatcatcatcatggacagcaagaccgactaccagggcttccagagcatgtacaccttcgtgaccagccatctgccacctggcttcaacgagtacgacttcgtgcccgagagcttcgaccgggacaagacaatcgccctgatcatgaacagcagcggctctaccggactgcccaaaggtgttgccctgcctcatagaactgcctgcgtgcggtttagccacgccagagatcccatcttcggcaaccagatcatccccgacacagccatcctgagcgtggtgccttttcaccacggcttcggcatgttcaccacactgggctacctgatctgcggcttcagagtggtgctgatgtaccgcttcgaggaagaactgttcctgcggagcctgcaggactacaagatccagtctgctctgctggtgcctactctgttcagcttctttgccaagagcaccctgatcgataagtacgacctgagcaacctgcacgagatcgcctctggcggagcccctctgtctaaagaagtgggagaagccgtcgccaagcggttccatctgcctggcatcagacaaggctatggcctgaccgagacaaccagcgccattctgattacccctgagggcgacgataagcctggcgctgtgggaaaagtggtgccattcttcgaggccaaggtggtggatctggacaccggcaaaacactgggcgttaaccagaggggcgagctgtgtgttagaggccctatgatcatgagcggctacgtgaacaaccccgaggccacaaacgctctgatcgacaaggatggatggctgcacagcggcgacattgcctactgggacgaagatgagcacttcttcatcgtggaccggctgaagtccctgatcaagtacaagggctaccaggtggccccagccgagctggaatctattctgctgcaacaccccaacatcttcgatgccggcgttgcaggactgcccgatgatgatgctggcgaactgccagctgctgtggtggtgctggaacacggcaagaccatgaccgagaaagaaatcgtggactacgtggccagccaagtgaccaccgccaagaaactgagaggcggcgtggtgtttgtggacgaggtgccaaaaggcctgacaggcaagctggacgcccggaagatcagagagatcctgattaaggccaagaaaggcggcaagatcgccgtgtaatagctaactagacaaaacaccaaacaaacaagctgcgagccacggacttaaataattgagccttaaagaagaaattctttaagtggatgctctcaaactcagggaaacctaaataaaaacaaccaaaaaaaatctagatatcggatcccggg

SEQ ID NO: 3295 - DNA, 2831 bp, synthetic construct
  source 1..2831: mol_type = other DNA; note = Ana1.74
taatacgactcactatagggagaccctcgaaaaaaaacacaaacacctagttatagacaaggcaatcctgagccaagccgaagtagtaattagtaagttaacaatagatgacttacaactaatcggaaggtgcagagactcgacgggagctaccctaacgtcaagacgagggtaaagagagagtccaattctcaaagccaataggcagtagcgaaagctgcaagagaatgaaaatccgtggctcgcagcaaacaccaaacaaaacaaacacaaaccaacaaaaattaaaacagcctgtgggttgatcccacccacaggcccattgggcgctagcactctggtatcacggtacctttgtgcgcctgttttataccccctcccccaactgtaacttagaagtaacacacaccgatcaacagtcagcgtggcacaccagccacgttttgatcaagcacttctgttaccccggactgagtatcaatagactgctcacgcggttgaaggagaaagcgttcgttatccggccaactacttcgaaaaacctagtaacaccgtggaagttgcagagtgtttcgctcagcactaccccagtgtagatcaggtcgatgagtcaccgcattccccacgggcgaccgtggcggtggctgcgttggcggcctgcccatggggaaacccatgggacgctctaatacagacatggtgcgaagagtctattgagctagttggtagtcctccggcccctgaatgcggctaatcctaactgcggagcacacaccctcaagccagagggcagtgtgtcgtaacgggcaactctgcagcggaaccgactactttgggtgtccgtgtttcattttattcctatactggctgcttatggtgacaattgagagatcgttaccatatagctattggattggccatccggtgactaatagagctattatatatccctttgttgggtttataccacttagcttgaaagaggttaaaacattacaattcattgttaagttgaatacagcaaaatggaagatgccaagaacatcaagaagggccctgctccattctaccctctggaagatggaacagccggcgagcagctgcacaaggccatgaagagatatgccctggtgcctggcacaatcgccttcacagatgcccacatcgaggtggacatcacctacgccgagtacttcgagatgtctgtgcggctggccgaagctatgaagcgctacggcctgaacaccaaccaccggatcgtcgtgtgcagcgagaacagcctgcagttcttcatgcctgtgctgggcgccctgttcatcggagttgctgtggcccctgccaacgacatctacaacgagcgcgagctgctgaacagcatgggcatctctcagcccaccgtggtgttcgtgtccaagaagggactgcagaaaatcctgaacgtgcagaagaagctgcccatcatccagaaaatcatcatcatggacagcaagaccgactaccagggcttccagagcatgtacaccttcgtgaccagccatctgccacctggcttcaacgagtacgacttcgtgcccgagagcttcgaccgggacaagacaatcgccctgatcatgaacagcagcggctctaccggactgcccaaaggtgttgccctgcctcatagaactgcctgcgtgcggtttagccacgccagagatcccatcttcggcaaccagatcatccccgacacagccatcctgagcgtggtgccttttcaccacggcttcggcatgttcaccacactgggctacctgatctgcggcttcagagtggtgctgatgtaccgcttcgaggaagaactgttcctgcggagcctgcaggactacaagatccagtctgctctgctggtgcctactctgttcagcttctttgccaagagcaccctgatcgataagtacgacctgagcaacctgcacgagatcgcctctggcggagcccctctgtctaaagaagtgggagaagccgtcgccaagcggttccatctgcctggcatcagacaaggctatggcctgaccgagacaaccagcgccattctgattacccctgagggcgacgataagcctggcgctgtgggaaaagtggtgccattcttcgaggccaaggtggtggatctggacaccggcaaaacactgggcgttaaccagaggggcgagctgtgtgttagaggccctatgatcatgagcggctacgtgaacaaccccgaggccacaaacgctctgatcgacaaggatggatggctgcacagcggcgacattgcctactgggacgaagatgagcacttcttcatcgtggaccggctgaagtccctgatcaagtacaagggctaccaggtggccccagccgagctggaatctattctgctgcaacaccccaacatcttcgatgccggcgttgcaggactgcccgatgatgatgctggcgaactgccagctgctgtggtggtgctggaacacggcaagaccatgaccgagaaagaaatcgtggactacgtggccagccaagtgaccaccgccaagaaactgagaggcggcgtggtgtttgtggacgaggtgccaaaaggcctgacaggcaagctggacgcccggaagatcagagagatcctgattaaggccaagaaaggcggcaagatcgccgtgtaatagctaactagacaaaacaccaaacaaacaagctgcgagccacggacttaaataattgagccttaaagaagaaattctttaagtggatgctctcaaactcagggaaacctaaatcaaaaacaaccaaaaaaaatctagatatcggatcccggg

SEQ ID NO: 3296 - DNA, 2831 bp, synthetic construct
  source 1..2831: mol_type = other DNA; note = Ana1.75
taatacgactcactatagggagaccctcgaaaaaaaacacaaacaccagttatagacaaggcaatcctgagccaagccgaagtagtaattagtaagttaacaatagatgacttacaactaatcggaaggtgcagagactcgacgggagctaccctaacgtcaagacgagggtaaagagagagtccaattctcaaagccaataggcagtagcgaaagctgcaagagaatgaaaatccgtggctcgcagcaaacaccaaacaaaacaaacacaaaccaacaaaaattaaaacagcctgtgggttgatcccacccacaggcccattgggcgctagcactctggtatcacggtacctttgtgcgcctgttttataccccctcccccaactgtaacttagaagtaacacacaccgatcaacagtcagcgtggcacaccagccacgttttgatcaagcacttctgttaccccggactgagtatcaatagactgctcacgcggttgaaggagaaagcgttcgttatccggccaactacttcgaaaaacctagtaacaccgtggaagttgcagagtgtttcgctcagcactaccccagtgtagatcaggtcgatgagtcaccgcattccccacgggcgaccgtggcggtggctgcgttggcggcctgcccatggggaaacccatgggacgctctaatacagacatggtgcgaagagtctattgagctagttggtagtcctccggcccctgaatgcggctaatcctaactgcggagcacacaccctcaagccagagggcagtgtgtcgtaacgggcaactctgcagcggaaccgactactttgggtgtccgtgtttcattttattcctatactggctgcttatggtgacaattgagagatcgttaccatatagctattggattggccatccggtgactaatagagctattatatatccctttgttgggtttataccacttagcttgaaagaggttaaaacattacaattcattgttaagttgaatacagcaaaatggaagatgccaagaacatcaagaagggccctgctccattctaccctctggaagatggaacagccggcgagcagctgcacaaggccatgaagagatatgccctggtgcctggcacaatcgccttcacagatgcccacatcgaggtggacatcacctacgccgagtacttcgagatgtctgtgcggctggccgaagctatgaagcgctacggcctgaacaccaaccaccggatcgtcgtgtgcagcgagaacagcctgcagttcttcatgcctgtgctgggcgccctgttcatcggagttgctgtggcccctgccaacgacatctacaacgagcgcgagctgctgaacagcatgggcatctctcagcccaccgtggtgttcgtgtccaagaagggactgcagaaaatcctgaacgtgcagaagaagctgcccatcatccagaaaatcatcatcatggacagcaagaccgactaccagggcttccagagcatgtacaccttcgtgaccagccatctgccacctggcttcaacgagtacgacttcgtgcccgagagcttcgaccgggacaagacaatcgccctgatcatgaacagcagcggctctaccggactgcccaaaggtgttgccctgcctcatagaactgcctgcgtgcggtttagccacgccagagatcccatcttcggcaaccagatcatccccgacacagccatcctgagcgtggtgccttttcaccacggcttcggcatgttcaccacactgggctacctgatctgcggcttcagagtggtgctgatgtaccgcttcgaggaagaactgttcctgcggagcctgcaggactacaagatccagtctgctctgctggtgcctactctgttcagcttctttgccaagagcaccctgatcgataagtacgacctgagcaacctgcacgagatcgcctctggcggagcccctctgtctaaagaagtgggagaagccgtcgccaagcggttccatctgcctggcatcagacaaggctatggcctgaccgagacaaccagcgccattctgattacccctgagggcgacgataagcctggcgctgtgggaaaagtggtgccattcttcgaggccaaggtggtggatctggacaccggcaaaacactgggcgttaaccagaggggcgagctgtgtgttagaggccctatgatcatgagcggctacgtgaacaaccccgaggccacaaacgctctgatcgacaaggatggatggctgcacagcggcgacattgcctactgggacgaagatgagcacttcttcatcgtggaccggctgaagtccctgatcaagtacaagggctaccaggtggccccagccgagctggaatctattctgctgcaacaccccaacatcttcgatgccggcgttgcaggactgcccgatgatgatgctggcgaactgccagctgctgtggtggtgctggaacacggcaagaccatgaccgagaaagaaatcgtggactacgtggccagccaagtgaccaccgccaagaaactgagaggcggcgtggtgtttgtggacgaggtgccaaaaggcctgacaggcaagctggacgcccggaagatcagagagatcctgattaaggccaagaaaggcggcaagatcgccgtgtaatagctaactagacaaaacaccaaacaaacaagctgcgagccacggacttaaataattgagccttaaagaagaaattctttaagtggatgctctcaaactcagggaaacctaaatctaaaaacaaccaaaaaaaatctagatatcggatcccggg

SEQ ID NO: 3297 - DNA, 2831 bp, synthetic construct
  source 1..2831: mol_type = other DNA; note = Ana1.76
taatacgactcactatagggagaccctcgaaaaaaaacacaaacaccgttatagacaaggcaatcctgagccaagccgaagtagtaattagtaagttaacaatagatgacttacaactaatcggaaggtgcagagactcgacgggagctaccctaacgtcaagacgagggtaaagagagagtccaattctcaaagccaataggcagtagcgaaagctgcaagagaatgaaaatccgtggctcgcagcaaacaccaaacaaaacaaacacaaaccaacaaaaattaaaacagcctgtgggttgatcccacccacaggcccattgggcgctagcactctggtatcacggtacctttgtgcgcctgttttataccccctcccccaactgtaacttagaagtaacacacaccgatcaacagtcagcgtggcacaccagccacgttttgatcaagcacttctgttaccccggactgagtatcaatagactgctcacgcggttgaaggagaaagcgttcgttatccggccaactacttcgaaaaacctagtaacaccgtggaagttgcagagtgtttcgctcagcactaccccagtgtagatcaggtcgatgagtcaccgcattccccacgggcgaccgtggcggtggctgcgttggcggcctgcccatggggaaacccatgggacgctctaatacagacatggtgcgaagagtctattgagctagttggtagtcctccggcccctgaatgcggctaatcctaactgcggagcacacaccctcaagccagagggcagtgtgtcgtaacgggcaactctgcagcggaaccgactactttgggtgtccgtgtttcattttattcctatactggctgcttatggtgacaattgagagatcgttaccatatagctattggattggccatccggtgactaatagagctattatatatccctttgttgggtttataccacttagcttgaaagaggttaaaacattacaattcattgttaagttgaatacagcaaaatggaagatgccaagaacatcaagaagggccctgctccattctaccctctggaagatggaacagccggcgagcagctgcacaaggccatgaagagatatgccctggtgcctggcacaatcgccttcacagatgcccacatcgaggtggacatcacctacgccgagtacttcgagatgtctgtgcggctggccgaagctatgaagcgctacggcctgaacaccaaccaccggatcgtcgtgtgcagcgagaacagcctgcagttcttcatgcctgtgctgggcgccctgttcatcggagttgctgtggcccctgccaacgacatctacaacgagcgcgagctgctgaacagcatgggcatctctcagcccaccgtggtgttcgtgtccaagaagggactgcagaaaatcctgaacgtgcagaagaagctgcccatcatccagaaaatcatcatcatggacagcaagaccgactaccagggcttccagagcatgtacaccttcgtgaccagccatctgccacctggcttcaacgagtacgacttcgtgcccgagagcttcgaccgggacaagacaatcgccctgatcatgaacagcagcggctctaccggactgcccaaaggtgttgccctgcctcatagaactgcctgcgtgcggtttagccacgccagagatcccatcttcggcaaccagatcatccccgacacagccatcctgagcgtggtgccttttcaccacggcttcggcatgttcaccacactgggctacctgatctgcggcttcagagtggtgctgatgtaccgcttcgaggaagaactgttcctgcggagcctgcaggactacaagatccagtctgctctgctggtgcctactctgttcagcttctttgccaagagcaccctgatcgataagtacgacctgagcaacctgcacgagatcgcctctggcggagcccctctgtctaaagaagtgggagaagccgtcgccaagcggttccatctgcctggcatcagacaaggctatggcctgaccgagacaaccagcgccattctgattacccctgagggcgacgataagcctggcgctgtgggaaaagtggtgccattcttcgaggccaaggtggtggatctggacaccggcaaaacactgggcgttaaccagaggggcgagctgtgtgttagaggccctatgatcatgagcggctacgtgaacaaccccgaggccacaaacgctctgatcgacaaggatggatggctgcacagcggcgacattgcctactgggacgaagatgagcacttcttcatcgtggaccggctgaagtccctgatcaagtacaagggctaccaggtggccccagccgagctggaatctattctgctgcaacaccccaacatcttcgatgccggcgttgcaggactgcccgatgatgatgctggcgaactgccagctgctgtggtggtgctggaacacggcaagaccatgaccgagaaagaaatcgtggactacgtggccagccaagtgaccaccgccaagaaactgagaggcggcgtggtgtttgtggacgaggtgccaaaaggcctgacaggcaagctggacgcccggaagatcagagagatcctgattaaggccaagaaaggcggcaagatcgccgtgtaatagctaactagacaaaacaccaaacaaacaagctgcgagccacggacttaaataattgagccttaaagaagaaattctttaagtggatgctctcaaactcagggaaacctaaatctaaaaaacaaccaaaaaaaatctagatatcggatcccggg

SEQ ID NO: 3298 - DNA, 2831 bp, synthetic construct
  source 1..2831: mol_type = other DNA; note = Ana1.77
taatacgactcactatagggagaccctcgaaaaaaaacacaaacaccttatagacaaggcaatcctgagccaagccgaagtagtaattagtaagttaacaatagatgacttacaactaatcggaaggtgcagagactcgacgggagctaccctaacgtcaagacgagggtaaagagagagtccaattctcaaagccaataggcagtagcgaaagctgcaagagaatgaaaatccgtggctcgcagcaaacaccaaacaaaacaaacacaaaccaacaaaaattaaaacagcctgtgggttgatcccacccacaggcccattgggcgctagcactctggtatcacggtacctttgtgcgcctgttttataccccctcccccaactgtaacttagaagtaacacacaccgatcaacagtcagcgtggcacaccagccacgttttgatcaagcacttctgttaccccggactgagtatcaatagactgctcacgcggttgaaggagaaagcgttcgttatccggccaactacttcgaaaaacctagtaacaccgtggaagttgcagagtgtttcgctcagcactaccccagtgtagatcaggtcgatgagtcaccgcattccccacgggcgaccgtggcggtggctgcgttggcggcctgcccatggggaaacccatgggacgctctaatacagacatggtgcgaagagtctattgagctagttggtagtcctccggcccctgaatgcggctaatcctaactgcggagcacacaccctcaagccagagggcagtgtgtcgtaacgggcaactctgcagcggaaccgactactttgggtgtccgtgtttcattttattcctatactggctgcttatggtgacaattgagagatcgttaccatatagctattggattggccatccggtgactaatagagctattatatatccctttgttgggtttataccacttagcttgaaagaggttaaaacattacaattcattgttaagttgaatacagcaaaatggaagatgccaagaacatcaagaagggccctgctccattctaccctctggaagatggaacagccggcgagcagctgcacaaggccatgaagagatatgccctggtgcctggcacaatcgccttcacagatgcccacatcgaggtggacatcacctacgccgagtacttcgagatgtctgtgcggctggccgaagctatgaagcgctacggcctgaacaccaaccaccggatcgtcgtgtgcagcgagaacagcctgcagttcttcatgcctgtgctgggcgccctgttcatcggagttgctgtggcccctgccaacgacatctacaacgagcgcgagctgctgaacagcatgggcatctctcagcccaccgtggtgttcgtgtccaagaagggactgcagaaaatcctgaacgtgcagaagaagctgcccatcatccagaaaatcatcatcatggacagcaagaccgactaccagggcttccagagcatgtacaccttcgtgaccagccatctgccacctggcttcaacgagtacgacttcgtgcccgagagcttcgaccgggacaagacaatcgccctgatcatgaacagcagcggctctaccggactgcccaaaggtgttgccctgcctcatagaactgcctgcgtgcggtttagccacgccagagatcccatcttcggcaaccagatcatccccgacacagccatcctgagcgtggtgccttttcaccacggcttcggcatgttcaccacactgggctacctgatctgcggcttcagagtggtgctgatgtaccgcttcgaggaagaactgttcctgcggagcctgcaggactacaagatccagtctgctctgctggtgcctactctgttcagcttctttgccaagagcaccctgatcgataagtacgacctgagcaacctgcacgagatcgcctctggcggagcccctctgtctaaagaagtgggagaagccgtcgccaagcggttccatctgcctggcatcagacaaggctatggcctgaccgagacaaccagcgccattctgattacccctgagggcgacgataagcctggcgctgtgggaaaagtggtgccattcttcgaggccaaggtggtggatctggacaccggcaaaacactgggcgttaaccagaggggcgagctgtgtgttagaggccctatgatcatgagcggctacgtgaacaaccccgaggccacaaacgctctgatcgacaaggatggatggctgcacagcggcgacattgcctactgggacgaagatgagcacttcttcatcgtggaccggctgaagtccctgatcaagtacaagggctaccaggtggccccagccgagctggaatctattctgctgcaacaccccaacatcttcgatgccggcgttgcaggactgcccgatgatgatgctggcgaactgccagctgctgtggtggtgctggaacacggcaagaccatgaccgagaaagaaatcgtggactacgtggccagccaagtgaccaccgccaagaaactgagaggcggcgtggtgtttgtggacgaggtgccaaaaggcctgacaggcaagctggacgcccggaagatcagagagatcctgattaaggccaagaaaggcggcaagatcgccgtgtaatagctaactagacaaaacaccaaacaaacaagctgcgagccacggacttaaataattgagccttaaagaagaaattctttaagtggatgctctcaaactcagggaaacctaaatctagaaaaacaaccaaaaaaaatctagatatcggatcccggg

SEQ ID NO: 3299 - DNA, 2831 bp, synthetic construct
  source 1..2831: mol_type = other DNA; note = Ana1.78
taatacgactcactatagggagaccctcgaaaaaaaacacaaacacctatagacaaggcaatcctgagccaagccgaagtagtaattagtaagttaacaatagatgacttacaactaatcggaaggtgcagagactcgacgggagctaccctaacgtcaagacgagggtaaagagagagtccaattctcaaagccaataggcagtagcgaaagctgcaagagaatgaaaatccgtggctcgcagcaaacaccaaacaaaacaaacacaaaccaacaaaaattaaaacagcctgtgggttgatcccacccacaggcccattgggcgctagcactctggtatcacggtacctttgtgcgcctgttttataccccctcccccaactgtaacttagaagtaacacacaccgatcaacagtcagcgtggcacaccagccacgttttgatcaagcacttctgttaccccggactgagtatcaatagactgctcacgcggttgaaggagaaagcgttcgttatccggccaactacttcgaaaaacctagtaacaccgtggaagttgcagagtgtttcgctcagcactaccccagtgtagatcaggtcgatgagtcaccgcattccccacgggcgaccgtggcggtggctgcgttggcggcctgcccatggggaaacccatgggacgctctaatacagacatggtgcgaagagtctattgagctagttggtagtcctccggcccctgaatgcggctaatcctaactgcggagcacacaccctcaagccagagggcagtgtgtcgtaacgggcaactctgcagcggaaccgactactttgggtgtccgtgtttcattttattcctatactggctgcttatggtgacaattgagagatcgttaccatatagctattggattggccatccggtgactaatagagctattatatatccctttgttgggtttataccacttagcttgaaagaggttaaaacattacaattcattgttaagttgaatacagcaaaatggaagatgccaagaacatcaagaagggccctgctccattctaccctctggaagatggaacagccggcgagcagctgcacaaggccatgaagagatatgccctggtgcctggcacaatcgccttcacagatgcccacatcgaggtggacatcacctacgccgagtacttcgagatgtctgtgcggctggccgaagctatgaagcgctacggcctgaacaccaaccaccggatcgtcgtgtgcagcgagaacagcctgcagttcttcatgcctgtgctgggcgccctgttcatcggagttgctgtggcccctgccaacgacatctacaacgagcgcgagctgctgaacagcatgggcatctctcagcccaccgtggtgttcgtgtccaagaagggactgcagaaaatcctgaacgtgcagaagaagctgcccatcatccagaaaatcatcatcatggacagcaagaccgactaccagggcttccagagcatgtacaccttcgtgaccagccatctgccacctggcttcaacgagtacgacttcgtgcccgagagcttcgaccgggacaagacaatcgccctgatcatgaacagcagcggctctaccggactgcccaaaggtgttgccctgcctcatagaactgcctgcgtgcggtttagccacgccagagatcccatcttcggcaaccagatcatccccgacacagccatcctgagcgtggtgccttttcaccacggcttcggcatgttcaccacactgggctacctgatctgcggcttcagagtggtgctgatgtaccgcttcgaggaagaactgttcctgcggagcctgcaggactacaagatccagtctgctctgctggtgcctactctgttcagcttctttgccaagagcaccctgatcgataagtacgacctgagcaacctgcacgagatcgcctctggcggagcccctctgtctaaagaagtgggagaagccgtcgccaagcggttccatctgcctggcatcagacaaggctatggcctgaccgagacaaccagcgccattctgattacccctgagggcgacgataagcctggcgctgtgggaaaagtggtgccattcttcgaggccaaggtggtggatctggacaccggcaaaacactgggcgttaaccagaggggcgagctgtgtgttagaggccctatgatcatgagcggctacgtgaacaaccccgaggccacaaacgctctgatcgacaaggatggatggctgcacagcggcgacattgcctactgggacgaagatgagcacttcttcatcgtggaccggctgaagtccctgatcaagtacaagggctaccaggtggccccagccgagctggaatctattctgctgcaacaccccaacatcttcgatgccggcgttgcaggactgcccgatgatgatgctggcgaactgccagctgctgtggtggtgctggaacacggcaagaccatgaccgagaaagaaatcgtggactacgtggccagccaagtgaccaccgccaagaaactgagaggcggcgtggtgtttgtggacgaggtgccaaaaggcctgacaggcaagctggacgcccggaagatcagagagatcctgattaaggccaagaaaggcggcaagatcgccgtgtaatagctaactagacaaaacaccaaacaaacaagctgcgagccacggacttaaataattgagccttaaagaagaaattctttaagtggatgctctcaaactcagggaaacctaaatctagtaaaaacaaccaaaaaaaatctagatatcggatcccggg

SEQ ID NO: 3300 - DNA, 2831 bp, synthetic construct
  source 1..2831: mol_type = other DNA; note = Ana1.79
taatacgactcactatagggagaccctcgaaaaaaaacacaaacaccatagacaaggcaatcctgagccaagccgaagtagtaattagtaagttaacaatagatgacttacaactaatcggaaggtgcagagactcgacgggagctaccctaacgtcaagacgagggtaaagagagagtccaattctcaaagccaataggcagtagcgaaagctgcaagagaatgaaaatccgtggctcgcagcaaacaccaaacaaaacaaacacaaaccaacaaaaattaaaacagcctgtgggttgatcccacccacaggcccattgggcgctagcactctggtatcacggtacctttgtgcgcctgttttataccccctcccccaactgtaacttagaagtaacacacaccgatcaacagtcagcgtggcacaccagccacgttttgatcaagcacttctgttaccccggactgagtatcaatagactgctcacgcggttgaaggagaaagcgttcgttatccggccaactacttcgaaaaacctagtaacaccgtggaagttgcagagtgtttcgctcagcactaccccagtgtagatcaggtcgatgagtcaccgcattccccacgggcgaccgtggcggtggctgcgttggcggcctgcccatggggaaacccatgggacgctctaatacagacatggtgcgaagagtctattgagctagttggtagtcctccggcccctgaatgcggctaatcctaactgcggagcacacaccctcaagccagagggcagtgtgtcgtaacgggcaactctgcagcggaaccgactactttgggtgtccgtgtttcattttattcctatactggctgcttatggtgacaattgagagatcgttaccatatagctattggattggccatccggtgactaatagagctattatatatccctttgttgggtttataccacttagcttgaaagaggttaaaacattacaattcattgttaagttgaatacagcaaaatggaagatgccaagaacatcaagaagggccctgctccattctaccctctggaagatggaacagccggcgagcagctgcacaaggccatgaagagatatgccctggtgcctggcacaatcgccttcacagatgcccacatcgaggtggacatcacctacgccgagtacttcgagatgtctgtgcggctggccgaagctatgaagcgctacggcctgaacaccaaccaccggatcgtcgtgtgcagcgagaacagcctgcagttcttcatgcctgtgctgggcgccctgttcatcggagttgctgtggcccctgccaacgacatctacaacgagcgcgagctgctgaacagcatgggcatctctcagcccaccgtggtgttcgtgtccaagaagggactgcagaaaatcctgaacgtgcagaagaagctgcccatcatccagaaaatcatcatcatggacagcaagaccgactaccagggcttccagagcatgtacaccttcgtgaccagccatctgccacctggcttcaacgagtacgacttcgtgcccgagagcttcgaccgggacaagacaatcgccctgatcatgaacagcagcggctctaccggactgcccaaaggtgttgccctgcctcatagaactgcctgcgtgcggtttagccacgccagagatcccatcttcggcaaccagatcatccccgacacagccatcctgagcgtggtgccttttcaccacggcttcggcatgttcaccacactgggctacctgatctgcggcttcagagtggtgctgatgtaccgcttcgaggaagaactgttcctgcggagcctgcaggactacaagatccagtctgctctgctggtgcctactctgttcagcttctttgccaagagcaccctgatcgataagtacgacctgagcaacctgcacgagatcgcctctggcggagcccctctgtctaaagaagtgggagaagccgtcgccaagcggttccatctgcctggcatcagacaaggctatggcctgaccgagacaaccagcgccattctgattacccctgagggcgacgataagcctggcgctgtgggaaaagtggtgccattcttcgaggccaaggtggtggatctggacaccggcaaaacactgggcgttaaccagaggggcgagctgtgtgttagaggccctatgatcatgagcggctacgtgaacaaccccgaggccacaaacgctctgatcgacaaggatggatggctgcacagcggcgacattgcctactgggacgaagatgagcacttcttcatcgtggaccggctgaagtccctgatcaagtacaagggctaccaggtggccccagccgagctggaatctattctgctgcaacaccccaacatcttcgatgccggcgttgcaggactgcccgatgatgatgctggcgaactgccagctgctgtggtggtgctggaacacggcaagaccatgaccgagaaagaaatcgtggactacgtggccagccaagtgaccaccgccaagaaactgagaggcggcgtggtgtttgtggacgaggtgccaaaaggcctgacaggcaagctggacgcccggaagatcagagagatcctgattaaggccaagaaaggcggcaagatcgccgtgtaatagctaactagacaaaacaccaaacaaacaagctgcgagccacggacttaaataattgagccttaaagaagaaattctttaagtggatgctctcaaactcagggaaacctaaatctagttaaaaacaaccaaaaaaaatctagatatcggatcccggg

SEQ ID NO: 3301 - DNA, 2831 bp, synthetic construct
  source 1..2831: mol_type = other DNA; note = Ana1.80
taatacgactcactatagggagaccctcgaaaaaaaacacaaacacctagacaaggcaatcctgagccaagccgaagtagtaattagtaagttaacaatagatgacttacaactaatcggaaggtgcagagactcgacgggagctaccctaacgtcaagacgagggtaaagagagagtccaattctcaaagccaataggcagtagcgaaagctgcaagagaatgaaaatccgtggctcgcagcaaacaccaaacaaaacaaacacaaaccaacaaaaattaaaacagcctgtgggttgatcccacccacaggcccattgggcgctagcactctggtatcacggtacctttgtgcgcctgttttataccccctcccccaactgtaacttagaagtaacacacaccgatcaacagtcagcgtggcacaccagccacgttttgatcaagcacttctgttaccccggactgagtatcaatagactgctcacgcggttgaaggagaaagcgttcgttatccggccaactacttcgaaaaacctagtaacaccgtggaagttgcagagtgtttcgctcagcactaccccagtgtagatcaggtcgatgagtcaccgcattccccacgggcgaccgtggcggtggctgcgttggcggcctgcccatggggaaacccatgggacgctctaatacagacatggtgcgaagagtctattgagctagttggtagtcctccggcccctgaatgcggctaatcctaactgcggagcacacaccctcaagccagagggcagtgtgtcgtaacgggcaactctgcagcggaaccgactactttgggtgtccgtgtttcattttattcctatactggctgcttatggtgacaattgagagatcgttaccatatagctattggattggccatccggtgactaatagagctattatatatccctttgttgggtttataccacttagcttgaaagaggttaaaacattacaattcattgttaagttgaatacagcaaaatggaagatgccaagaacatcaagaagggccctgctccattctaccctctggaagatggaacagccggcgagcagctgcacaaggccatgaagagatatgccctggtgcctggcacaatcgccttcacagatgcccacatcgaggtggacatcacctacgccgagtacttcgagatgtctgtgcggctggccgaagctatgaagcgctacggcctgaacaccaaccaccggatcgtcgtgtgcagcgagaacagcctgcagttcttcatgcctgtgctgggcgccctgttcatcggagttgctgtggcccctgccaacgacatctacaacgagcgcgagctgctgaacagcatgggcatctctcagcccaccgtggtgttcgtgtccaagaagggactgcagaaaatcctgaacgtgcagaagaagctgcccatcatccagaaaatcatcatcatggacagcaagaccgactaccagggcttccagagcatgtacaccttcgtgaccagccatctgccacctggcttcaacgagtacgacttcgtgcccgagagcttcgaccgggacaagacaatcgccctgatcatgaacagcagcggctctaccggactgcccaaaggtgttgccctgcctcatagaactgcctgcgtgcggtttagccacgccagagatcccatcttcggcaaccagatcatccccgacacagccatcctgagcgtggtgccttttcaccacggcttcggcatgttcaccacactgggctacctgatctgcggcttcagagtggtgctgatgtaccgcttcgaggaagaactgttcctgcggagcctgcaggactacaagatccagtctgctctgctggtgcctactctgttcagcttctttgccaagagcaccctgatcgataagtacgacctgagcaacctgcacgagatcgcctctggcggagcccctctgtctaaagaagtgggagaagccgtcgccaagcggttccatctgcctggcatcagacaaggctatggcctgaccgagacaaccagcgccattctgattacccctgagggcgacgataagcctggcgctgtgggaaaagtggtgccattcttcgaggccaaggtggtggatctggacaccggcaaaacactgggcgttaaccagaggggcgagctgtgtgttagaggccctatgatcatgagcggctacgtgaacaaccccgaggccacaaacgctctgatcgacaaggatggatggctgcacagcggcgacattgcctactgggacgaagatgagcacttcttcatcgtggaccggctgaagtccctgatcaagtacaagggctaccaggtggccccagccgagctggaatctattctgctgcaacaccccaacatcttcgatgccggcgttgcaggactgcccgatgatgatgctggcgaactgccagctgctgtggtggtgctggaacacggcaagaccatgaccgagaaagaaatcgtggactacgtggccagccaagtgaccaccgccaagaaactgagaggcggcgtggtgtttgtggacgaggtgccaaaaggcctgacaggcaagctggacgcccggaagatcagagagatcctgattaaggccaagaaaggcggcaagatcgccgtgtaatagctaactagacaaaacaccaaacaaacaagctgcgagccacggacttaaataattgagccttaaagaagaaattctttaagtggatgctctcaaactcagggaaacctaaatctagttaaaaaacaaccaaaaaaaatctagatatcggatcccggg

SEQ ID NO: 3302 - DNA, 2831 bp, synthetic construct
  source 1..2831: mol_type = other DNA; note = Ana1.81
taatacgactcactatagggagaccctcgaaaaaaaacacaaacaccagacaaggcaatcctgagccaagccgaagtagtaattagtaagttaacaatagatgacttacaactaatcggaaggtgcagagactcgacgggagctaccctaacgtcaagacgagggtaaagagagagtccaattctcaaagccaataggcagtagcgaaagctgcaagagaatgaaaatccgtggctcgcagcaaacaccaaacaaaacaaacacaaaccaacaaaaattaaaacagcctgtgggttgatcccacccacaggcccattgggcgctagcactctggtatcacggtacctttgtgcgcctgttttataccccctcccccaactgtaacttagaagtaacacacaccgatcaacagtcagcgtggcacaccagccacgttttgatcaagcacttctgttaccccggactgagtatcaatagactgctcacgcggttgaaggagaaagcgttcgttatccggccaactacttcgaaaaacctagtaacaccgtggaagttgcagagtgtttcgctcagcactaccccagtgtagatcaggtcgatgagtcaccgcattccccacgggcgaccgtggcggtggctgcgttggcggcctgcccatggggaaacccatgggacgctctaatacagacatggtgcgaagagtctattgagctagttggtagtcctccggcccctgaatgcggctaatcctaactgcggagcacacaccctcaagccagagggcagtgtgtcgtaacgggcaactctgcagcggaaccgactactttgggtgtccgtgtttcattttattcctatactggctgcttatggtgacaattgagagatcgttaccatatagctattggattggccatccggtgactaatagagctattatatatccctttgttgggtttataccacttagcttgaaagaggttaaaacattacaattcattgttaagttgaatacagcaaaatggaagatgccaagaacatcaagaagggccctgctccattctaccctctggaagatggaacagccggcgagcagctgcacaaggccatgaagagatatgccctggtgcctggcacaatcgccttcacagatgcccacatcgaggtggacatcacctacgccgagtacttcgagatgtctgtgcggctggccgaagctatgaagcgctacggcctgaacaccaaccaccggatcgtcgtgtgcagcgagaacagcctgcagttcttcatgcctgtgctgggcgccctgttcatcggagttgctgtggcccctgccaacgacatctacaacgagcgcgagctgctgaacagcatgggcatctctcagcccaccgtggtgttcgtgtccaagaagggactgcagaaaatcctgaacgtgcagaagaagctgcccatcatccagaaaatcatcatcatggacagcaagaccgactaccagggcttccagagcatgtacaccttcgtgaccagccatctgccacctggcttcaacgagtacgacttcgtgcccgagagcttcgaccgggacaagacaatcgccctgatcatgaacagcagcggctctaccggactgcccaaaggtgttgccctgcctcatagaactgcctgcgtgcggtttagccacgccagagatcccatcttcggcaaccagatcatccccgacacagccatcctgagcgtggtgccttttcaccacggcttcggcatgttcaccacactgggctacctgatctgcggcttcagagtggtgctgatgtaccgcttcgaggaagaactgttcctgcggagcctgcaggactacaagatccagtctgctctgctggtgcctactctgttcagcttctttgccaagagcaccctgatcgataagtacgacctgagcaacctgcacgagatcgcctctggcggagcccctctgtctaaagaagtgggagaagccgtcgccaagcggttccatctgcctggcatcagacaaggctatggcctgaccgagacaaccagcgccattctgattacccctgagggcgacgataagcctggcgctgtgggaaaagtggtgccattcttcgaggccaaggtggtggatctggacaccggcaaaacactgggcgttaaccagaggggcgagctgtgtgttagaggccctatgatcatgagcggctacgtgaacaaccccgaggccacaaacgctctgatcgacaaggatggatggctgcacagcggcgacattgcctactgggacgaagatgagcacttcttcatcgtggaccggctgaagtccctgatcaagtacaagggctaccaggtggccccagccgagctggaatctattctgctgcaacaccccaacatcttcgatgccggcgttgcaggactgcccgatgatgatgctggcgaactgccagctgctgtggtggtgctggaacacggcaagaccatgaccgagaaagaaatcgtggactacgtggccagccaagtgaccaccgccaagaaactgagaggcggcgtggtgtttgtggacgaggtgccaaaaggcctgacaggcaagctggacgcccggaagatcagagagatcctgattaaggccaagaaaggcggcaagatcgccgtgtaatagctaactagacaaaacaccaaacaaacaagctgcgagccacggacttaaataattgagccttaaagaagaaattctttaagtggatgctctcaaactcagggaaacctaaatctagttataaaaacaaccaaaaaaaatctagatatcggatcccggg

SEQ ID NO: 3303 - DNA, 2831 bp, synthetic construct
  source 1..2831: mol_type = other DNA; note = Ana1.82
taatacgactcactatagggagaccctcgaaaaaaaacacaaacaccgacaaggcaatcctgagccaagccgaagtagtaattagtaagttaacaatagatgacttacaactaatcggaaggtgcagagactcgacgggagctaccctaacgtcaagacgagggtaaagagagagtccaattctcaaagccaataggcagtagcgaaagctgcaagagaatgaaaatccgtggctcgcagcaaacaccaaacaaaacaaacacaaaccaacaaaaattaaaacagcctgtgggttgatcccacccacaggcccattgggcgctagcactctggtatcacggtacctttgtgcgcctgttttataccccctcccccaactgtaacttagaagtaacacacaccgatcaacagtcagcgtggcacaccagccacgttttgatcaagcacttctgttaccccggactgagtatcaatagactgctcacgcggttgaaggagaaagcgttcgttatccggccaactacttcgaaaaacctagtaacaccgtggaagttgcagagtgtttcgctcagcactaccccagtgtagatcaggtcgatgagtcaccgcattccccacgggcgaccgtggcggtggctgcgttggcggcctgcccatggggaaacccatgggacgctctaatacagacatggtgcgaagagtctattgagctagttggtagtcctccggcccctgaatgcggctaatcctaactgcggagcacacaccctcaagccagagggcagtgtgtcgtaacgggcaactctgcagcggaaccgactactttgggtgtccgtgtttcattttattcctatactggctgcttatggtgacaattgagagatcgttaccatatagctattggattggccatccggtgactaatagagctattatatatccctttgttgggtttataccacttagcttgaaagaggttaaaacattacaattcattgttaagttgaatacagcaaaatggaagatgccaagaacatcaagaagggccctgctccattctaccctctggaagatggaacagccggcgagcagctgcacaaggccatgaagagatatgccctggtgcctggcacaatcgccttcacagatgcccacatcgaggtggacatcacctacgccgagtacttcgagatgtctgtgcggctggccgaagctatgaagcgctacggcctgaacaccaaccaccggatcgtcgtgtgcagcgagaacagcctgcagttcttcatgcctgtgctgggcgccctgttcatcggagttgctgtggcccctgccaacgacatctacaacgagcgcgagctgctgaacagcatgggcatctctcagcccaccgtggtgttcgtgtccaagaagggactgcagaaaatcctgaacgtgcagaagaagctgcccatcatccagaaaatcatcatcatggacagcaagaccgactaccagggcttccagagcatgtacaccttcgtgaccagccatctgccacctggcttcaacgagtacgacttcgtgcccgagagcttcgaccgggacaagacaatcgccctgatcatgaacagcagcggctctaccggactgcccaaaggtgttgccctgcctcatagaactgcctgcgtgcggtttagccacgccagagatcccatcttcggcaaccagatcatccccgacacagccatcctgagcgtggtgccttttcaccacggcttcggcatgttcaccacactgggctacctgatctgcggcttcagagtggtgctgatgtaccgcttcgaggaagaactgttcctgcggagcctgcaggactacaagatccagtctgctctgctggtgcctactctgttcagcttctttgccaagagcaccctgatcgataagtacgacctgagcaacctgcacgagatcgcctctggcggagcccctctgtctaaagaagtgggagaagccgtcgccaagcggttccatctgcctggcatcagacaaggctatggcctgaccgagacaaccagcgccattctgattacccctgagggcgacgataagcctggcgctgtgggaaaagtggtgccattcttcgaggccaaggtggtggatctggacaccggcaaaacactgggcgttaaccagaggggcgagctgtgtgttagaggccctatgatcatgagcggctacgtgaacaaccccgaggccacaaacgctctgatcgacaaggatggatggctgcacagcggcgacattgcctactgggacgaagatgagcacttcttcatcgtggaccggctgaagtccctgatcaagtacaagggctaccaggtggccccagccgagctggaatctattctgctgcaacaccccaacatcttcgatgccggcgttgcaggactgcccgatgatgatgctggcgaactgccagctgctgtggtggtgctggaacacggcaagaccatgaccgagaaagaaatcgtggactacgtggccagccaagtgaccaccgccaagaaactgagaggcggcgtggtgtttgtggacgaggtgccaaaaggcctgacaggcaagctggacgcccggaagatcagagagatcctgattaaggccaagaaaggcggcaagatcgccgtgtaatagctaactagacaaaacaccaaacaaacaagctgcgagccacggacttaaataattgagccttaaagaagaaattctttaagtggatgctctcaaactcagggaaacctaaatctagttataaaaaacaaccaaaaaaaatctagatatcggatcccggg

SEQ ID NO: 3304 - DNA, 2831 bp, synthetic construct
  source 1..2831: mol_type = other DNA; note = Ana1.83
taatacgactcactatagggagaccctcgaaaaaaaacacaaacaccacaaggcaatcctgagccaagccgaagtagtaattagtaagttaacaatagatgacttacaactaatcggaaggtgcagagactcgacgggagctaccctaacgtcaagacgagggtaaagagagagtccaattctcaaagccaataggcagtagcgaaagctgcaagagaatgaaaatccgtggctcgcagcaaacaccaaacaaaacaaacacaaaccaacaaaaattaaaacagcctgtgggttgatcccacccacaggcccattgggcgctagcactctggtatcacggtacctttgtgcgcctgttttataccccctcccccaactgtaacttagaagtaacacacaccgatcaacagtcagcgtggcacaccagccacgttttgatcaagcacttctgttaccccggactgagtatcaatagactgctcacgcggttgaaggagaaagcgttcgttatccggccaactacttcgaaaaacctagtaacaccgtggaagttgcagagtgtttcgctcagcactaccccagtgtagatcaggtcgatgagtcaccgcattccccacgggcgaccgtggcggtggctgcgttggcggcctgcccatggggaaacccatgggacgctctaatacagacatggtgcgaagagtctattgagctagttggtagtcctccggcccctgaatgcggctaatcctaactgcggagcacacaccctcaagccagagggcagtgtgtcgtaacgggcaactctgcagcggaaccgactactttgggtgtccgtgtttcattttattcctatactggctgcttatggtgacaattgagagatcgttaccatatagctattggattggccatccggtgactaatagagctattatatatccctttgttgggtttataccacttagcttgaaagaggttaaaacattacaattcattgttaagttgaatacagcaaaatggaagatgccaagaacatcaagaagggccctgctccattctaccctctggaagatggaacagccggcgagcagctgcacaaggccatgaagagatatgccctggtgcctggcacaatcgccttcacagatgcccacatcgaggtggacatcacctacgccgagtacttcgagatgtctgtgcggctggccgaagctatgaagcgctacggcctgaacaccaaccaccggatcgtcgtgtgcagcgagaacagcctgcagttcttcatgcctgtgctgggcgccctgttcatcggagttgctgtggcccctgccaacgacatctacaacgagcgcgagctgctgaacagcatgggcatctctcagcccaccgtggtgttcgtgtccaagaagggactgcagaaaatcctgaacgtgcagaagaagctgcccatcatccagaaaatcatcatcatggacagcaagaccgactaccagggcttccagagcatgtacaccttcgtgaccagccatctgccacctggcttcaacgagtacgacttcgtgcccgagagcttcgaccgggacaagacaatcgccctgatcatgaacagcagcggctctaccggactgcccaaaggtgttgccctgcctcatagaactgcctgcgtgcggtttagccacgccagagatcccatcttcggcaaccagatcatccccgacacagccatcctgagcgtggtgccttttcaccacggcttcggcatgttcaccacactgggctacctgatctgcggcttcagagtggtgctgatgtaccgcttcgaggaagaactgttcctgcggagcctgcaggactacaagatccagtctgctctgctggtgcctactctgttcagcttctttgccaagagcaccctgatcgataagtacgacctgagcaacctgcacgagatcgcctctggcggagcccctctgtctaaagaagtgggagaagccgtcgccaagcggttccatctgcctggcatcagacaaggctatggcctgaccgagacaaccagcgccattctgattacccctgagggcgacgataagcctggcgctgtgggaaaagtggtgccattcttcgaggccaaggtggtggatctggacaccggcaaaacactgggcgttaaccagaggggcgagctgtgtgttagaggccctatgatcatgagcggctacgtgaacaaccccgaggccacaaacgctctgatcgacaaggatggatggctgcacagcggcgacattgcctactgggacgaagatgagcacttcttcatcgtggaccggctgaagtccctgatcaagtacaagggctaccaggtggccccagccgagctggaatctattctgctgcaacaccccaacatcttcgatgccggcgttgcaggactgcccgatgatgatgctggcgaactgccagctgctgtggtggtgctggaacacggcaagaccatgaccgagaaagaaatcgtggactacgtggccagccaagtgaccaccgccaagaaactgagaggcggcgtggtgtttgtggacgaggtgccaaaaggcctgacaggcaagctggacgcccggaagatcagagagatcctgattaaggccaagaaaggcggcaagatcgccgtgtaatagctaactagacaaaacaccaaacaaacaagctgcgagccacggacttaaataattgagccttaaagaagaaattctttaagtggatgctctcaaactcagggaaacctaaatctagttatagaaaaacaaccaaaaaaaatctagatatcggatcccggg

SEQ ID NO: 3305 - DNA, 2831 bp, synthetic construct
  source 1..2831: mol_type = other DNA; note = Ana1.84
taatacgactcactatagggagaccctcgaaaaaaaacacaaacacccaaggcaatcctgagccaagccgaagtagtaattagtaagttaacaatagatgacttacaactaatcggaaggtgcagagactcgacgggagctaccctaacgtcaagacgagggtaaagagagagtccaattctcaaagccaataggcagtagcgaaagctgcaagagaatgaaaatccgtggctcgcagcaaacaccaaacaaaacaaacacaaaccaacaaaaattaaaacagcctgtgggttgatcccacccacaggcccattgggcgctagcactctggtatcacggtacctttgtgcgcctgttttataccccctcccccaactgtaacttagaagtaacacacaccgatcaacagtcagcgtggcacaccagccacgttttgatcaagcacttctgttaccccggactgagtatcaatagactgctcacgcggttgaaggagaaagcgttcgttatccggccaactacttcgaaaaacctagtaacaccgtggaagttgcagagtgtttcgctcagcactaccccagtgtagatcaggtcgatgagtcaccgcattccccacgggcgaccgtggcggtggctgcgttggcggcctgcccatggggaaacccatgggacgctctaatacagacatggtgcgaagagtctattgagctagttggtagtcctccggcccctgaatgcggctaatcctaactgcggagcacacaccctcaagccagagggcagtgtgtcgtaacgggcaactctgcagcggaaccgactactttgggtgtccgtgtttcattttattcctatactggctgcttatggtgacaattgagagatcgttaccatatagctattggattggccatccggtgactaatagagctattatatatccctttgttgggtttataccacttagcttgaaagaggttaaaacattacaattcattgttaagttgaatacagcaaaatggaagatgccaagaacatcaagaagggccctgctccattctaccctctggaagatggaacagccggcgagcagctgcacaaggccatgaagagatatgccctggtgcctggcacaatcgccttcacagatgcccacatcgaggtggacatcacctacgccgagtacttcgagatgtctgtgcggctggccgaagctatgaagcgctacggcctgaacaccaaccaccggatcgtcgtgtgcagcgagaacagcctgcagttcttcatgcctgtgctgggcgccctgttcatcggagttgctgtggcccctgccaacgacatctacaacgagcgcgagctgctgaacagcatgggcatctctcagcccaccgtggtgttcgtgtccaagaagggactgcagaaaatcctgaacgtgcagaagaagctgcccatcatccagaaaatcatcatcatggacagcaagaccgactaccagggcttccagagcatgtacaccttcgtgaccagccatctgccacctggcttcaacgagtacgacttcgtgcccgagagcttcgaccgggacaagacaatcgccctgatcatgaacagcagcggctctaccggactgcccaaaggtgttgccctgcctcatagaactgcctgcgtgcggtttagccacgccagagatcccatcttcggcaaccagatcatccccgacacagccatcctgagcgtggtgccttttcaccacggcttcggcatgttcaccacactgggctacctgatctgcggcttcagagtggtgctgatgtaccgcttcgaggaagaactgttcctgcggagcctgcaggactacaagatccagtctgctctgctggtgcctactctgttcagcttctttgccaagagcaccctgatcgataagtacgacctgagcaacctgcacgagatcgcctctggcggagcccctctgtctaaagaagtgggagaagccgtcgccaagcggttccatctgcctggcatcagacaaggctatggcctgaccgagacaaccagcgccattctgattacccctgagggcgacgataagcctggcgctgtgggaaaagtggtgccattcttcgaggccaaggtggtggatctggacaccggcaaaacactgggcgttaaccagaggggcgagctgtgtgttagaggccctatgatcatgagcggctacgtgaacaaccccgaggccacaaacgctctgatcgacaaggatggatggctgcacagcggcgacattgcctactgggacgaagatgagcacttcttcatcgtggaccggctgaagtccctgatcaagtacaagggctaccaggtggccccagccgagctggaatctattctgctgcaacaccccaacatcttcgatgccggcgttgcaggactgcccgatgatgatgctggcgaactgccagctgctgtggtggtgctggaacacggcaagaccatgaccgagaaagaaatcgtggactacgtggccagccaagtgaccaccgccaagaaactgagaggcggcgtggtgtttgtggacgaggtgccaaaaggcctgacaggcaagctggacgcccggaagatcagagagatcctgattaaggccaagaaaggcggcaagatcgccgtgtaatagctaactagacaaaacaccaaacaaacaagctgcgagccacggacttaaataattgagccttaaagaagaaattctttaagtggatgctctcaaactcagggaaacctaaatctagttatagaaaaaacaaccaaaaaaaatctagatatcggatcccggg

SEQ ID NO: 3306 - DNA, 2831 bp, synthetic construct
  source 1..2831: mol_type = other DNA; note = Ana1.85
taatacgactcactatagggagaccctcgaaaaaaaacacaaacaccaaggcaatcctgagccaagccgaagtagtaattagtaagttaacaatagatgacttacaactaatcggaaggtgcagagactcgacgggagctaccctaacgtcaagacgagggtaaagagagagtccaattctcaaagccaataggcagtagcgaaagctgcaagagaatgaaaatccgtggctcgcagcaaacaccaaacaaaacaaacacaaaccaacaaaaattaaaacagcctgtgggttgatcccacccacaggcccattgggcgctagcactctggtatcacggtacctttgtgcgcctgttttataccccctcccccaactgtaacttagaagtaacacacaccgatcaacagtcagcgtggcacaccagccacgttttgatcaagcacttctgttaccccggactgagtatcaatagactgctcacgcggttgaaggagaaagcgttcgttatccggccaactacttcgaaaaacctagtaacaccgtggaagttgcagagtgtttcgctcagcactaccccagtgtagatcaggtcgatgagtcaccgcattccccacgggcgaccgtggcggtggctgcgttggcggcctgcccatggggaaacccatgggacgctctaatacagacatggtgcgaagagtctattgagctagttggtagtcctccggcccctgaatgcggctaatcctaactgcggagcacacaccctcaagccagagggcagtgtgtcgtaacgggcaactctgcagcggaaccgactactttgggtgtccgtgtttcattttattcctatactggctgcttatggtgacaattgagagatcgttaccatatagctattggattggccatccggtgactaatagagctattatatatccctttgttgggtttataccacttagcttgaaagaggttaaaacattacaattcattgttaagttgaatacagcaaaatggaagatgccaagaacatcaagaagggccctgctccattctaccctctggaagatggaacagccggcgagcagctgcacaaggccatgaagagatatgccctggtgcctggcacaatcgccttcacagatgcccacatcgaggtggacatcacctacgccgagtacttcgagatgtctgtgcggctggccgaagctatgaagcgctacggcctgaacaccaaccaccggatcgtcgtgtgcagcgagaacagcctgcagttcttcatgcctgtgctgggcgccctgttcatcggagttgctgtggcccctgccaacgacatctacaacgagcgcgagctgctgaacagcatgggcatctctcagcccaccgtggtgttcgtgtccaagaagggactgcagaaaatcctgaacgtgcagaagaagctgcccatcatccagaaaatcatcatcatggacagcaagaccgactaccagggcttccagagcatgtacaccttcgtgaccagccatctgccacctggcttcaacgagtacgacttcgtgcccgagagcttcgaccgggacaagacaatcgccctgatcatgaacagcagcggctctaccggactgcccaaaggtgttgccctgcctcatagaactgcctgcgtgcggtttagccacgccagagatcccatcttcggcaaccagatcatccccgacacagccatcctgagcgtggtgccttttcaccacggcttcggcatgttcaccacactgggctacctgatctgcggcttcagagtggtgctgatgtaccgcttcgaggaagaactgttcctgcggagcctgcaggactacaagatccagtctgctctgctggtgcctactctgttcagcttctttgccaagagcaccctgatcgataagtacgacctgagcaacctgcacgagatcgcctctggcggagcccctctgtctaaagaagtgggagaagccgtcgccaagcggttccatctgcctggcatcagacaaggctatggcctgaccgagacaaccagcgccattctgattacccctgagggcgacgataagcctggcgctgtgggaaaagtggtgccattcttcgaggccaaggtggtggatctggacaccggcaaaacactgggcgttaaccagaggggcgagctgtgtgttagaggccctatgatcatgagcggctacgtgaacaaccccgaggccacaaacgctctgatcgacaaggatggatggctgcacagcggcgacattgcctactgggacgaagatgagcacttcttcatcgtggaccggctgaagtccctgatcaagtacaagggctaccaggtggccccagccgagctggaatctattctgctgcaacaccccaacatcttcgatgccggcgttgcaggactgcccgatgatgatgctggcgaactgccagctgctgtggtggtgctggaacacggcaagaccatgaccgagaaagaaatcgtggactacgtggccagccaagtgaccaccgccaagaaactgagaggcggcgtggtgtttgtggacgaggtgccaaaaggcctgacaggcaagctggacgcccggaagatcagagagatcctgattaaggccaagaaaggcggcaagatcgccgtgtaatagctaactagacaaaacaccaaacaaacaagctgcgagccacggacttaaataattgagccttaaagaagaaattctttaagtggatgctctcaaactcagggaaacctaaatctagttatagacaaaaacaaccaaaaaaaatctagatatcggatcccggg

SEQ ID NO: 3307 - DNA, 2831 bp, synthetic construct
  source 1..2831: mol_type = other DNA; note = Ana1.86
taatacgactcactatagggagaccctcgaaaaaaaacacaaacaccaggcaatcctgagccaagccgaagtagtaattagtaagttaacaatagatgacttacaactaatcggaaggtgcagagactcgacgggagctaccctaacgtcaagacgagggtaaagagagagtccaattctcaaagccaataggcagtagcgaaagctgcaagagaatgaaaatccgtggctcgcagcaaacaccaaacaaaacaaacacaaaccaacaaaaattaaaacagcctgtgggttgatcccacccacaggcccattgggcgctagcactctggtatcacggtacctttgtgcgcctgttttataccccctcccccaactgtaacttagaagtaacacacaccgatcaacagtcagcgtggcacaccagccacgttttgatcaagcacttctgttaccccggactgagtatcaatagactgctcacgcggttgaaggagaaagcgttcgttatccggccaactacttcgaaaaacctagtaacaccgtggaagttgcagagtgtttcgctcagcactaccccagtgtagatcaggtcgatgagtcaccgcattccccacgggcgaccgtggcggtggctgcgttggcggcctgcccatggggaaacccatgggacgctctaatacagacatggtgcgaagagtctattgagctagttggtagtcctccggcccctgaatgcggctaatcctaactgcggagcacacaccctcaagccagagggcagtgtgtcgtaacgggcaactctgcagcggaaccgactactttgggtgtccgtgtttcattttattcctatactggctgcttatggtgacaattgagagatcgttaccatatagctattggattggccatccggtgactaatagagctattatatatccctttgttgggtttataccacttagcttgaaagaggttaaaacattacaattcattgttaagttgaatacagcaaaatggaagatgccaagaacatcaagaagggccctgctccattctaccctctggaagatggaacagccggcgagcagctgcacaaggccatgaagagatatgccctggtgcctggcacaatcgccttcacagatgcccacatcgaggtggacatcacctacgccgagtacttcgagatgtctgtgcggctggccgaagctatgaagcgctacggcctgaacaccaaccaccggatcgtcgtgtgcagcgagaacagcctgcagttcttcatgcctgtgctgggcgccctgttcatcggagttgctgtggcccctgccaacgacatctacaacgagcgcgagctgctgaacagcatgggcatctctcagcccaccgtggtgttcgtgtccaagaagggactgcagaaaatcctgaacgtgcagaagaagctgcccatcatccagaaaatcatcatcatggacagcaagaccgactaccagggcttccagagcatgtacaccttcgtgaccagccatctgccacctggcttcaacgagtacgacttcgtgcccgagagcttcgaccgggacaagacaatcgccctgatcatgaacagcagcggctctaccggactgcccaaaggtgttgccctgcctcatagaactgcctgcgtgcggtttagccacgccagagatcccatcttcggcaaccagatcatccccgacacagccatcctgagcgtggtgccttttcaccacggcttcggcatgttcaccacactgggctacctgatctgcggcttcagagtggtgctgatgtaccgcttcgaggaagaactgttcctgcggagcctgcaggactacaagatccagtctgctctgctggtgcctactctgttcagcttctttgccaagagcaccctgatcgataagtacgacctgagcaacctgcacgagatcgcctctggcggagcccctctgtctaaagaagtgggagaagccgtcgccaagcggttccatctgcctggcatcagacaaggctatggcctgaccgagacaaccagcgccattctgattacccctgagggcgacgataagcctggcgctgtgggaaaagtggtgccattcttcgaggccaaggtggtggatctggacaccggcaaaacactgggcgttaaccagaggggcgagctgtgtgttagaggccctatgatcatgagcggctacgtgaacaaccccgaggccacaaacgctctgatcgacaaggatggatggctgcacagcggcgacattgcctactgggacgaagatgagcacttcttcatcgtggaccggctgaagtccctgatcaagtacaagggctaccaggtggccccagccgagctggaatctattctgctgcaacaccccaacatcttcgatgccggcgttgcaggactgcccgatgatgatgctggcgaactgccagctgctgtggtggtgctggaacacggcaagaccatgaccgagaaagaaatcgtggactacgtggccagccaagtgaccaccgccaagaaactgagaggcggcgtggtgtttgtggacgaggtgccaaaaggcctgacaggcaagctggacgcccggaagatcagagagatcctgattaaggccaagaaaggcggcaagatcgccgtgtaatagctaactagacaaaacaccaaacaaacaagctgcgagccacggacttaaataattgagccttaaagaagaaattctttaagtggatgctctcaaactcagggaaacctaaatctagttatagacaaaaaacaaccaaaaaaaatctagatatcggatcccggg

SEQ ID NO: 3308 - DNA, 2831 bp, synthetic construct
  source 1..2831: mol_type = other DNA; note = Ana1.87
taatacgactcactatagggagaccctcgaaaaaaaacacaaacaccggcaatcctgagccaagccgaagtagtaattagtaagttaacaatagatgacttacaactaatcggaaggtgcagagactcgacgggagctaccctaacgtcaagacgagggtaaagagagagtccaattctcaaagccaataggcagtagcgaaagctgcaagagaatgaaaatccgtggctcgcagcaaacaccaaacaaaacaaacacaaaccaacaaaaattaaaacagcctgtgggttgatcccacccacaggcccattgggcgctagcactctggtatcacggtacctttgtgcgcctgttttataccccctcccccaactgtaacttagaagtaacacacaccgatcaacagtcagcgtggcacaccagccacgttttgatcaagcacttctgttaccccggactgagtatcaatagactgctcacgcggttgaaggagaaagcgttcgttatccggccaactacttcgaaaaacctagtaacaccgtggaagttgcagagtgtttcgctcagcactaccccagtgtagatcaggtcgatgagtcaccgcattccccacgggcgaccgtggcggtggctgcgttggcggcctgcccatggggaaacccatgggacgctctaatacagacatggtgcgaagagtctattgagctagttggtagtcctccggcccctgaatgcggctaatcctaactgcggagcacacaccctcaagccagagggcagtgtgtcgtaacgggcaactctgcagcggaaccgactactttgggtgtccgtgtttcattttattcctatactggctgcttatggtgacaattgagagatcgttaccatatagctattggattggccatccggtgactaatagagctattatatatccctttgttgggtttataccacttagcttgaaagaggttaaaacattacaattcattgttaagttgaatacagcaaaatggaagatgccaagaacatcaagaagggccctgctccattctaccctctggaagatggaacagccggcgagcagctgcacaaggccatgaagagatatgccctggtgcctggcacaatcgccttcacagatgcccacatcgaggtggacatcacctacgccgagtacttcgagatgtctgtgcggctggccgaagctatgaagcgctacggcctgaacaccaaccaccggatcgtcgtgtgcagcgagaacagcctgcagttcttcatgcctgtgctgggcgccctgttcatcggagttgctgtggcccctgccaacgacatctacaacgagcgcgagctgctgaacagcatgggcatctctcagcccaccgtggtgttcgtgtccaagaagggactgcagaaaatcctgaacgtgcagaagaagctgcccatcatccagaaaatcatcatcatggacagcaagaccgactaccagggcttccagagcatgtacaccttcgtgaccagccatctgccacctggcttcaacgagtacgacttcgtgcccgagagcttcgaccgggacaagacaatcgccctgatcatgaacagcagcggctctaccggactgcccaaaggtgttgccctgcctcatagaactgcctgcgtgcggtttagccacgccagagatcccatcttcggcaaccagatcatccccgacacagccatcctgagcgtggtgccttttcaccacggcttcggcatgttcaccacactgggctacctgatctgcggcttcagagtggtgctgatgtaccgcttcgaggaagaactgttcctgcggagcctgcaggactacaagatccagtctgctctgctggtgcctactctgttcagcttctttgccaagagcaccctgatcgataagtacgacctgagcaacctgcacgagatcgcctctggcggagcccctctgtctaaagaagtgggagaagccgtcgccaagcggttccatctgcctggcatcagacaaggctatggcctgaccgagacaaccagcgccattctgattacccctgagggcgacgataagcctggcgctgtgggaaaagtggtgccattcttcgaggccaaggtggtggatctggacaccggcaaaacactgggcgttaaccagaggggcgagctgtgtgttagaggccctatgatcatgagcggctacgtgaacaaccccgaggccacaaacgctctgatcgacaaggatggatggctgcacagcggcgacattgcctactgggacgaagatgagcacttcttcatcgtggaccggctgaagtccctgatcaagtacaagggctaccaggtggccccagccgagctggaatctattctgctgcaacaccccaacatcttcgatgccggcgttgcaggactgcccgatgatgatgctggcgaactgccagctgctgtggtggtgctggaacacggcaagaccatgaccgagaaagaaatcgtggactacgtggccagccaagtgaccaccgccaagaaactgagaggcggcgtggtgtttgtggacgaggtgccaaaaggcctgacaggcaagctggacgcccggaagatcagagagatcctgattaaggccaagaaaggcggcaagatcgccgtgtaatagctaactagacaaaacaccaaacaaacaagctgcgagccacggacttaaataattgagccttaaagaagaaattctttaagtggatgctctcaaactcagggaaacctaaatctagttatagacaaaaaaacaaccaaaaaaaatctagatatcggatcccggg

SEQ ID NO: 3309 - DNA, 2831 bp, synthetic construct
  source 1..2831: mol_type = other DNA; note = Ana1.88
taatacgactcactatagggagaccctcgaaaaaaaacacaaacaccgcaatcctgagccaagccgaagtagtaattagtaagttaacaatagatgacttacaactaatcggaaggtgcagagactcgacgggagctaccctaacgtcaagacgagggtaaagagagagtccaattctcaaagccaataggcagtagcgaaagctgcaagagaatgaaaatccgtggctcgcagcaaacaccaaacaaaacaaacacaaaccaacaaaaattaaaacagcctgtgggttgatcccacccacaggcccattgggcgctagcactctggtatcacggtacctttgtgcgcctgttttataccccctcccccaactgtaacttagaagtaacacacaccgatcaacagtcagcgtggcacaccagccacgttttgatcaagcacttctgttaccccggactgagtatcaatagactgctcacgcggttgaaggagaaagcgttcgttatccggccaactacttcgaaaaacctagtaacaccgtggaagttgcagagtgtttcgctcagcactaccccagtgtagatcaggtcgatgagtcaccgcattccccacgggcgaccgtggcggtggctgcgttggcggcctgcccatggggaaacccatgggacgctctaatacagacatggtgcgaagagtctattgagctagttggtagtcctccggcccctgaatgcggctaatcctaactgcggagcacacaccctcaagccagagggcagtgtgtcgtaacgggcaactctgcagcggaaccgactactttgggtgtccgtgtttcattttattcctatactggctgcttatggtgacaattgagagatcgttaccatatagctattggattggccatccggtgactaatagagctattatatatccctttgttgggtttataccacttagcttgaaagaggttaaaacattacaattcattgttaagttgaatacagcaaaatggaagatgccaagaacatcaagaagggccctgctccattctaccctctggaagatggaacagccggcgagcagctgcacaaggccatgaagagatatgccctggtgcctggcacaatcgccttcacagatgcccacatcgaggtggacatcacctacgccgagtacttcgagatgtctgtgcggctggccgaagctatgaagcgctacggcctgaacaccaaccaccggatcgtcgtgtgcagcgagaacagcctgcagttcttcatgcctgtgctgggcgccctgttcatcggagttgctgtggcccctgccaacgacatctacaacgagcgcgagctgctgaacagcatgggcatctctcagcccaccgtggtgttcgtgtccaagaagggactgcagaaaatcctgaacgtgcagaagaagctgcccatcatccagaaaatcatcatcatggacagcaagaccgactaccagggcttccagagcatgtacaccttcgtgaccagccatctgccacctggcttcaacgagtacgacttcgtgcccgagagcttcgaccgggacaagacaatcgccctgatcatgaacagcagcggctctaccggactgcccaaaggtgttgccctgcctcatagaactgcctgcgtgcggtttagccacgccagagatcccatcttcggcaaccagatcatccccgacacagccatcctgagcgtggtgccttttcaccacggcttcggcatgttcaccacactgggctacctgatctgcggcttcagagtggtgctgatgtaccgcttcgaggaagaactgttcctgcggagcctgcaggactacaagatccagtctgctctgctggtgcctactctgttcagcttctttgccaagagcaccctgatcgataagtacgacctgagcaacctgcacgagatcgcctctggcggagcccctctgtctaaagaagtgggagaagccgtcgccaagcggttccatctgcctggcatcagacaaggctatggcctgaccgagacaaccagcgccattctgattacccctgagggcgacgataagcctggcgctgtgggaaaagtggtgccattcttcgaggccaaggtggtggatctggacaccggcaaaacactgggcgttaaccagaggggcgagctgtgtgttagaggccctatgatcatgagcggctacgtgaacaaccccgaggccacaaacgctctgatcgacaaggatggatggctgcacagcggcgacattgcctactgggacgaagatgagcacttcttcatcgtggaccggctgaagtccctgatcaagtacaagggctaccaggtggccccagccgagctggaatctattctgctgcaacaccccaacatcttcgatgccggcgttgcaggactgcccgatgatgatgctggcgaactgccagctgctgtggtggtgctggaacacggcaagaccatgaccgagaaagaaatcgtggactacgtggccagccaagtgaccaccgccaagaaactgagaggcggcgtggtgtttgtggacgaggtgccaaaaggcctgacaggcaagctggacgcccggaagatcagagagatcctgattaaggccaagaaaggcggcaagatcgccgtgtaatagctaactagacaaaacaccaaacaaacaagctgcgagccacggacttaaataattgagccttaaagaagaaattctttaagtggatgctctcaaactcagggaaacctaaatctagttatagacaagaaaaacaaccaaaaaaaatctagatatcggatcccggg

SEQ ID NO: 3310 - DNA, 2831 bp, synthetic construct
  source 1..2831: mol_type = other DNA; note = Ana1.89
taatacgactcactatagggagaccctcgaaaaaaaacacaaacacccaatcctgagccaagccgaagtagtaattagtaagttaacaatagatgacttacaactaatcggaaggtgcagagactcgacgggagctaccctaacgtcaagacgagggtaaagagagagtccaattctcaaagccaataggcagtagcgaaagctgcaagagaatgaaaatccgtggctcgcagcaaacaccaaacaaaacaaacacaaaccaacaaaaattaaaacagcctgtgggttgatcccacccacaggcccattgggcgctagcactctggtatcacggtacctttgtgcgcctgttttataccccctcccccaactgtaacttagaagtaacacacaccgatcaacagtcagcgtggcacaccagccacgttttgatcaagcacttctgttaccccggactgagtatcaatagactgctcacgcggttgaaggagaaagcgttcgttatccggccaactacttcgaaaaacctagtaacaccgtggaagttgcagagtgtttcgctcagcactaccccagtgtagatcaggtcgatgagtcaccgcattccccacgggcgaccgtggcggtggctgcgttggcggcctgcccatggggaaacccatgggacgctctaatacagacatggtgcgaagagtctattgagctagttggtagtcctccggcccctgaatgcggctaatcctaactgcggagcacacaccctcaagccagagggcagtgtgtcgtaacgggcaactctgcagcggaaccgactactttgggtgtccgtgtttcattttattcctatactggctgcttatggtgacaattgagagatcgttaccatatagctattggattggccatccggtgactaatagagctattatatatccctttgttgggtttataccacttagcttgaaagaggttaaaacattacaattcattgttaagttgaatacagcaaaatggaagatgccaagaacatcaagaagggccctgctccattctaccctctggaagatggaacagccggcgagcagctgcacaaggccatgaagagatatgccctggtgcctggcacaatcgccttcacagatgcccacatcgaggtggacatcacctacgccgagtacttcgagatgtctgtgcggctggccgaagctatgaagcgctacggcctgaacaccaaccaccggatcgtcgtgtgcagcgagaacagcctgcagttcttcatgcctgtgctgggcgccctgttcatcggagttgctgtggcccctgccaacgacatctacaacgagcgcgagctgctgaacagcatgggcatctctcagcccaccgtggtgttcgtgtccaagaagggactgcagaaaatcctgaacgtgcagaagaagctgcccatcatccagaaaatcatcatcatggacagcaagaccgactaccagggcttccagagcatgtacaccttcgtgaccagccatctgccacctggcttcaacgagtacgacttcgtgcccgagagcttcgaccgggacaagacaatcgccctgatcatgaacagcagcggctctaccggactgcccaaaggtgttgccctgcctcatagaactgcctgcgtgcggtttagccacgccagagatcccatcttcggcaaccagatcatccccgacacagccatcctgagcgtggtgccttttcaccacggcttcggcatgttcaccacactgggctacctgatctgcggcttcagagtggtgctgatgtaccgcttcgaggaagaactgttcctgcggagcctgcaggactacaagatccagtctgctctgctggtgcctactctgttcagcttctttgccaagagcaccctgatcgataagtacgacctgagcaacctgcacgagatcgcctctggcggagcccctctgtctaaagaagtgggagaagccgtcgccaagcggttccatctgcctggcatcagacaaggctatggcctgaccgagacaaccagcgccattctgattacccctgagggcgacgataagcctggcgctgtgggaaaagtggtgccattcttcgaggccaaggtggtggatctggacaccggcaaaacactgggcgttaaccagaggggcgagctgtgtgttagaggccctatgatcatgagcggctacgtgaacaaccccgaggccacaaacgctctgatcgacaaggatggatggctgcacagcggcgacattgcctactgggacgaagatgagcacttcttcatcgtggaccggctgaagtccctgatcaagtacaagggctaccaggtggccccagccgagctggaatctattctgctgcaacaccccaacatcttcgatgccggcgttgcaggactgcccgatgatgatgctggcgaactgccagctgctgtggtggtgctggaacacggcaagaccatgaccgagaaagaaatcgtggactacgtggccagccaagtgaccaccgccaagaaactgagaggcggcgtggtgtttgtggacgaggtgccaaaaggcctgacaggcaagctggacgcccggaagatcagagagatcctgattaaggccaagaaaggcggcaagatcgccgtgtaatagctaactagacaaaacaccaaacaaacaagctgcgagccacggacttaaataattgagccttaaagaagaaattctttaagtggatgctctcaaactcagggaaacctaaatctagttatagacaaggaaaaacaaccaaaaaaaatctagatatcggatcccggg

SEQ ID NO: 3311 - DNA, 2831 bp, synthetic construct
  source 1..2831: mol_type = other DNA; note = Ana1.90
taatacgactcactatagggagaccctcgaaaaaaaacacaaacaccaatcctgagccaagccgaagtagtaattagtaagttaacaatagatgacttacaactaatcggaaggtgcagagactcgacgggagctaccctaacgtcaagacgagggtaaagagagagtccaattctcaaagccaataggcagtagcgaaagctgcaagagaatgaaaatccgtggctcgcagcaaacaccaaacaaaacaaacacaaaccaacaaaaattaaaacagcctgtgggttgatcccacccacaggcccattgggcgctagcactctggtatcacggtacctttgtgcgcctgttttataccccctcccccaactgtaacttagaagtaacacacaccgatcaacagtcagcgtggcacaccagccacgttttgatcaagcacttctgttaccccggactgagtatcaatagactgctcacgcggttgaaggagaaagcgttcgttatccggccaactacttcgaaaaacctagtaacaccgtggaagttgcagagtgtttcgctcagcactaccccagtgtagatcaggtcgatgagtcaccgcattccccacgggcgaccgtggcggtggctgcgttggcggcctgcccatggggaaacccatgggacgctctaatacagacatggtgcgaagagtctattgagctagttggtagtcctccggcccctgaatgcggctaatcctaactgcggagcacacaccctcaagccagagggcagtgtgtcgtaacgggcaactctgcagcggaaccgactactttgggtgtccgtgtttcattttattcctatactggctgcttatggtgacaattgagagatcgttaccatatagctattggattggccatccggtgactaatagagctattatatatccctttgttgggtttataccacttagcttgaaagaggttaaaacattacaattcattgttaagttgaatacagcaaaatggaagatgccaagaacatcaagaagggccctgctccattctaccctctggaagatggaacagccggcgagcagctgcacaaggccatgaagagatatgccctggtgcctggcacaatcgccttcacagatgcccacatcgaggtggacatcacctacgccgagtacttcgagatgtctgtgcggctggccgaagctatgaagcgctacggcctgaacaccaaccaccggatcgtcgtgtgcagcgagaacagcctgcagttcttcatgcctgtgctgggcgccctgttcatcggagttgctgtggcccctgccaacgacatctacaacgagcgcgagctgctgaacagcatgggcatctctcagcccaccgtggtgttcgtgtccaagaagggactgcagaaaatcctgaacgtgcagaagaagctgcccatcatccagaaaatcatcatcatggacagcaagaccgactaccagggcttccagagcatgtacaccttcgtgaccagccatctgccacctggcttcaacgagtacgacttcgtgcccgagagcttcgaccgggacaagacaatcgccctgatcatgaacagcagcggctctaccggactgcccaaaggtgttgccctgcctcatagaactgcctgcgtgcggtttagccacgccagagatcccatcttcggcaaccagatcatccccgacacagccatcctgagcgtggtgccttttcaccacggcttcggcatgttcaccacactgggctacctgatctgcggcttcagagtggtgctgatgtaccgcttcgaggaagaactgttcctgcggagcctgcaggactacaagatccagtctgctctgctggtgcctactctgttcagcttctttgccaagagcaccctgatcgataagtacgacctgagcaacctgcacgagatcgcctctggcggagcccctctgtctaaagaagtgggagaagccgtcgccaagcggttccatctgcctggcatcagacaaggctatggcctgaccgagacaaccagcgccattctgattacccctgagggcgacgataagcctggcgctgtgggaaaagtggtgccattcttcgaggccaaggtggtggatctggacaccggcaaaacactgggcgttaaccagaggggcgagctgtgtgttagaggccctatgatcatgagcggctacgtgaacaaccccgaggccacaaacgctctgatcgacaaggatggatggctgcacagcggcgacattgcctactgggacgaagatgagcacttcttcatcgtggaccggctgaagtccctgatcaagtacaagggctaccaggtggccccagccgagctggaatctattctgctgcaacaccccaacatcttcgatgccggcgttgcaggactgcccgatgatgatgctggcgaactgccagctgctgtggtggtgctggaacacggcaagaccatgaccgagaaagaaatcgtggactacgtggccagccaagtgaccaccgccaagaaactgagaggcggcgtggtgtttgtggacgaggtgccaaaaggcctgacaggcaagctggacgcccggaagatcagagagatcctgattaaggccaagaaaggcggcaagatcgccgtgtaatagctaactagacaaaacaccaaacaaacaagctgcgagccacggacttaaataattgagccttaaagaagaaattctttaagtggatgctctcaaactcagggaaacctaaatctagttatagacaaggcaaaaacaaccaaaaaaaatctagatatcggatcccggg

SEQ ID NO: 3312 - DNA, 2831 bp, synthetic construct
  source 1..2831: mol_type = other DNA; note = Ana1.91
taatacgactcactatagggagaccctcgaaaaaaaacacaaacaccatcctgagccaagccgaagtagtaattagtaagttaacaatagatgacttacaactaatcggaaggtgcagagactcgacgggagctaccctaacgtcaagacgagggtaaagagagagtccaattctcaaagccaataggcagtagcgaaagctgcaagagaatgaaaatccgtggctcgcagcaaacaccaaacaaaacaaacacaaaccaacaaaaattaaaacagcctgtgggttgatcccacccacaggcccattgggcgctagcactctggtatcacggtacctttgtgcgcctgttttataccccctcccccaactgtaacttagaagtaacacacaccgatcaacagtcagcgtggcacaccagccacgttttgatcaagcacttctgttaccccggactgagtatcaatagactgctcacgcggttgaaggagaaagcgttcgttatccggccaactacttcgaaaaacctagtaacaccgtggaagttgcagagtgtttcgctcagcactaccccagtgtagatcaggtcgatgagtcaccgcattccccacgggcgaccgtggcggtggctgcgttggcggcctgcccatggggaaacccatgggacgctctaatacagacatggtgcgaagagtctattgagctagttggtagtcctccggcccctgaatgcggctaatcctaactgcggagcacacaccctcaagccagagggcagtgtgtcgtaacgggcaactctgcagcggaaccgactactttgggtgtccgtgtttcattttattcctatactggctgcttatggtgacaattgagagatcgttaccatatagctattggattggccatccggtgactaatagagctattatatatccctttgttgggtttataccacttagcttgaaagaggttaaaacattacaattcattgttaagttgaatacagcaaaatggaagatgccaagaacatcaagaagggccctgctccattctaccctctggaagatggaacagccggcgagcagctgcacaaggccatgaagagatatgccctggtgcctggcacaatcgccttcacagatgcccacatcgaggtggacatcacctacgccgagtacttcgagatgtctgtgcggctggccgaagctatgaagcgctacggcctgaacaccaaccaccggatcgtcgtgtgcagcgagaacagcctgcagttcttcatgcctgtgctgggcgccctgttcatcggagttgctgtggcccctgccaacgacatctacaacgagcgcgagctgctgaacagcatgggcatctctcagcccaccgtggtgttcgtgtccaagaagggactgcagaaaatcctgaacgtgcagaagaagctgcccatcatccagaaaatcatcatcatggacagcaagaccgactaccagggcttccagagcatgtacaccttcgtgaccagccatctgccacctggcttcaacgagtacgacttcgtgcccgagagcttcgaccgggacaagacaatcgccctgatcatgaacagcagcggctctaccggactgcccaaaggtgttgccctgcctcatagaactgcctgcgtgcggtttagccacgccagagatcccatcttcggcaaccagatcatccccgacacagccatcctgagcgtggtgccttttcaccacggcttcggcatgttcaccacactgggctacctgatctgcggcttcagagtggtgctgatgtaccgcttcgaggaagaactgttcctgcggagcctgcaggactacaagatccagtctgctctgctggtgcctactctgttcagcttctttgccaagagcaccctgatcgataagtacgacctgagcaacctgcacgagatcgcctctggcggagcccctctgtctaaagaagtgggagaagccgtcgccaagcggttccatctgcctggcatcagacaaggctatggcctgaccgagacaaccagcgccattctgattacccctgagggcgacgataagcctggcgctgtgggaaaagtggtgccattcttcgaggccaaggtggtggatctggacaccggcaaaacactgggcgttaaccagaggggcgagctgtgtgttagaggccctatgatcatgagcggctacgtgaacaaccccgaggccacaaacgctctgatcgacaaggatggatggctgcacagcggcgacattgcctactgggacgaagatgagcacttcttcatcgtggaccggctgaagtccctgatcaagtacaagggctaccaggtggccccagccgagctggaatctattctgctgcaacaccccaacatcttcgatgccggcgttgcaggactgcccgatgatgatgctggcgaactgccagctgctgtggtggtgctggaacacggcaagaccatgaccgagaaagaaatcgtggactacgtggccagccaagtgaccaccgccaagaaactgagaggcggcgtggtgtttgtggacgaggtgccaaaaggcctgacaggcaagctggacgcccggaagatcagagagatcctgattaaggccaagaaaggcggcaagatcgccgtgtaatagctaactagacaaaacaccaaacaaacaagctgcgagccacggacttaaataattgagccttaaagaagaaattctttaagtggatgctctcaaactcagggaaacctaaatctagttatagacaaggcaaaaaacaaccaaaaaaaatctagatatcggatcccggg

SEQ ID NO: 3313 - DNA, 2831 bp, synthetic construct
  source 1..2831: mol_type = other DNA; note = Ana1.92
taatacgactcactatagggagaccctcgaaaaaaaacacaaacacctcctgagccaagccgaagtagtaattagtaagttaacaatagatgacttacaactaatcggaaggtgcagagactcgacgggagctaccctaacgtcaagacgagggtaaagagagagtccaattctcaaagccaataggcagtagcgaaagctgcaagagaatgaaaatccgtggctcgcagcaaacaccaaacaaaacaaacacaaaccaacaaaaattaaaacagcctgtgggttgatcccacccacaggcccattgggcgctagcactctggtatcacggtacctttgtgcgcctgttttataccccctcccccaactgtaacttagaagtaacacacaccgatcaacagtcagcgtggcacaccagccacgttttgatcaagcacttctgttaccccggactgagtatcaatagactgctcacgcggttgaaggagaaagcgttcgttatccggccaactacttcgaaaaacctagtaacaccgtggaagttgcagagtgtttcgctcagcactaccccagtgtagatcaggtcgatgagtcaccgcattccccacgggcgaccgtggcggtggctgcgttggcggcctgcccatggggaaacccatgggacgctctaatacagacatggtgcgaagagtctattgagctagttggtagtcctccggcccctgaatgcggctaatcctaactgcggagcacacaccctcaagccagagggcagtgtgtcgtaacgggcaactctgcagcggaaccgactactttgggtgtccgtgtttcattttattcctatactggctgcttatggtgacaattgagagatcgttaccatatagctattggattggccatccggtgactaatagagctattatatatccctttgttgggtttataccacttagcttgaaagaggttaaaacattacaattcattgttaagttgaatacagcaaaatggaagatgccaagaacatcaagaagggccctgctccattctaccctctggaagatggaacagccggcgagcagctgcacaaggccatgaagagatatgccctggtgcctggcacaatcgccttcacagatgcccacatcgaggtggacatcacctacgccgagtacttcgagatgtctgtgcggctggccgaagctatgaagcgctacggcctgaacaccaaccaccggatcgtcgtgtgcagcgagaacagcctgcagttcttcatgcctgtgctgggcgccctgttcatcggagttgctgtggcccctgccaacgacatctacaacgagcgcgagctgctgaacagcatgggcatctctcagcccaccgtggtgttcgtgtccaagaagggactgcagaaaatcctgaacgtgcagaagaagctgcccatcatccagaaaatcatcatcatggacagcaagaccgactaccagggcttccagagcatgtacaccttcgtgaccagccatctgccacctggcttcaacgagtacgacttcgtgcccgagagcttcgaccgggacaagacaatcgccctgatcatgaacagcagcggctctaccggactgcccaaaggtgttgccctgcctcatagaactgcctgcgtgcggtttagccacgccagagatcccatcttcggcaaccagatcatccccgacacagccatcctgagcgtggtgccttttcaccacggcttcggcatgttcaccacactgggctacctgatctgcggcttcagagtggtgctgatgtaccgcttcgaggaagaactgttcctgcggagcctgcaggactacaagatccagtctgctctgctggtgcctactctgttcagcttctttgccaagagcaccctgatcgataagtacgacctgagcaacctgcacgagatcgcctctggcggagcccctctgtctaaagaagtgggagaagccgtcgccaagcggttccatctgcctggcatcagacaaggctatggcctgaccgagacaaccagcgccattctgattacccctgagggcgacgataagcctggcgctgtgggaaaagtggtgccattcttcgaggccaaggtggtggatctggacaccggcaaaacactgggcgttaaccagaggggcgagctgtgtgttagaggccctatgatcatgagcggctacgtgaacaaccccgaggccacaaacgctctgatcgacaaggatggatggctgcacagcggcgacattgcctactgggacgaagatgagcacttcttcatcgtggaccggctgaagtccctgatcaagtacaagggctaccaggtggccccagccgagctggaatctattctgctgcaacaccccaacatcttcgatgccggcgttgcaggactgcccgatgatgatgctggcgaactgccagctgctgtggtggtgctggaacacggcaagaccatgaccgagaaagaaatcgtggactacgtggccagccaagtgaccaccgccaagaaactgagaggcggcgtggtgtttgtggacgaggtgccaaaaggcctgacaggcaagctggacgcccggaagatcagagagatcctgattaaggccaagaaaggcggcaagatcgccgtgtaatagctaactagacaaaacaccaaacaaacaagctgcgagccacggacttaaataattgagccttaaagaagaaattctttaagtggatgctctcaaactcagggaaacctaaatctagttatagacaaggcaaaaaaacaaccaaaaaaaatctagatatcggatcccggg

SEQ ID NO: 3314 - DNA, 2831 bp, synthetic construct
  source 1..2831: mol_type = other DNA; note = Ana1.93
taatacgactcactatagggagaccctcgaaaaaaaacacaaacacccctgagccaagccgaagtagtaattagtaagttaacaatagatgacttacaactaatcggaaggtgcagagactcgacgggagctaccctaacgtcaagacgagggtaaagagagagtccaattctcaaagccaataggcagtagcgaaagctgcaagagaatgaaaatccgtggctcgcagcaaacaccaaacaaaacaaacacaaaccaacaaaaattaaaacagcctgtgggttgatcccacccacaggcccattgggcgctagcactctggtatcacggtacctttgtgcgcctgttttataccccctcccccaactgtaacttagaagtaacacacaccgatcaacagtcagcgtggcacaccagccacgttttgatcaagcacttctgttaccccggactgagtatcaatagactgctcacgcggttgaaggagaaagcgttcgttatccggccaactacttcgaaaaacctagtaacaccgtggaagttgcagagtgtttcgctcagcactaccccagtgtagatcaggtcgatgagtcaccgcattccccacgggcgaccgtggcggtggctgcgttggcggcctgcccatggggaaacccatgggacgctctaatacagacatggtgcgaagagtctattgagctagttggtagtcctccggcccctgaatgcggctaatcctaactgcggagcacacaccctcaagccagagggcagtgtgtcgtaacgggcaactctgcagcggaaccgactactttgggtgtccgtgtttcattttattcctatactggctgcttatggtgacaattgagagatcgttaccatatagctattggattggccatccggtgactaatagagctattatatatccctttgttgggtttataccacttagcttgaaagaggttaaaacattacaattcattgttaagttgaatacagcaaaatggaagatgccaagaacatcaagaagggccctgctccattctaccctctggaagatggaacagccggcgagcagctgcacaaggccatgaagagatatgccctggtgcctggcacaatcgccttcacagatgcccacatcgaggtggacatcacctacgccgagtacttcgagatgtctgtgcggctggccgaagctatgaagcgctacggcctgaacaccaaccaccggatcgtcgtgtgcagcgagaacagcctgcagttcttcatgcctgtgctgggcgccctgttcatcggagttgctgtggcccctgccaacgacatctacaacgagcgcgagctgctgaacagcatgggcatctctcagcccaccgtggtgttcgtgtccaagaagggactgcagaaaatcctgaacgtgcagaagaagctgcccatcatccagaaaatcatcatcatggacagcaagaccgactaccagggcttccagagcatgtacaccttcgtgaccagccatctgccacctggcttcaacgagtacgacttcgtgcccgagagcttcgaccgggacaagacaatcgccctgatcatgaacagcagcggctctaccggactgcccaaaggtgttgccctgcctcatagaactgcctgcgtgcggtttagccacgccagagatcccatcttcggcaaccagatcatccccgacacagccatcctgagcgtggtgccttttcaccacggcttcggcatgttcaccacactgggctacctgatctgcggcttcagagtggtgctgatgtaccgcttcgaggaagaactgttcctgcggagcctgcaggactacaagatccagtctgctctgctggtgcctactctgttcagcttctttgccaagagcaccctgatcgataagtacgacctgagcaacctgcacgagatcgcctctggcggagcccctctgtctaaagaagtgggagaagccgtcgccaagcggttccatctgcctggcatcagacaaggctatggcctgaccgagacaaccagcgccattctgattacccctgagggcgacgataagcctggcgctgtgggaaaagtggtgccattcttcgaggccaaggtggtggatctggacaccggcaaaacactgggcgttaaccagaggggcgagctgtgtgttagaggccctatgatcatgagcggctacgtgaacaaccccgaggccacaaacgctctgatcgacaaggatggatggctgcacagcggcgacattgcctactgggacgaagatgagcacttcttcatcgtggaccggctgaagtccctgatcaagtacaagggctaccaggtggccccagccgagctggaatctattctgctgcaacaccccaacatcttcgatgccggcgttgcaggactgcccgatgatgatgctggcgaactgccagctgctgtggtggtgctggaacacggcaagaccatgaccgagaaagaaatcgtggactacgtggccagccaagtgaccaccgccaagaaactgagaggcggcgtggtgtttgtggacgaggtgccaaaaggcctgacaggcaagctggacgcccggaagatcagagagatcctgattaaggccaagaaaggcggcaagatcgccgtgtaatagctaactagacaaaacaccaaacaaacaagctgcgagccacggacttaaataattgagccttaaagaagaaattctttaagtggatgctctcaaactcagggaaacctaaatctagttatagacaaggcaataaaaacaaccaaaaaaaatctagatatcggatcccggg

SEQ ID NO: 3315 - DNA, 2831 bp, synthetic construct
  source 1..2831: mol_type = other DNA; note = Ana1.94
taatacgactcactatagggagaccctcgaaaaaaaacacaaacaccctgagccaagccgaagtagtaattagtaagttaacaatagatgacttacaactaatcggaaggtgcagagactcgacgggagctaccctaacgtcaagacgagggtaaagagagagtccaattctcaaagccaataggcagtagcgaaagctgcaagagaatgaaaatccgtggctcgcagcaaacaccaaacaaaacaaacacaaaccaacaaaaattaaaacagcctgtgggttgatcccacccacaggcccattgggcgctagcactctggtatcacggtacctttgtgcgcctgttttataccccctcccccaactgtaacttagaagtaacacacaccgatcaacagtcagcgtggcacaccagccacgttttgatcaagcacttctgttaccccggactgagtatcaatagactgctcacgcggttgaaggagaaagcgttcgttatccggccaactacttcgaaaaacctagtaacaccgtggaagttgcagagtgtttcgctcagcactaccccagtgtagatcaggtcgatgagtcaccgcattccccacgggcgaccgtggcggtggctgcgttggcggcctgcccatggggaaacccatgggacgctctaatacagacatggtgcgaagagtctattgagctagttggtagtcctccggcccctgaatgcggctaatcctaactgcggagcacacaccctcaagccagagggcagtgtgtcgtaacgggcaactctgcagcggaaccgactactttgggtgtccgtgtttcattttattcctatactggctgcttatggtgacaattgagagatcgttaccatatagctattggattggccatccggtgactaatagagctattatatatccctttgttgggtttataccacttagcttgaaagaggttaaaacattacaattcattgttaagttgaatacagcaaaatggaagatgccaagaacatcaagaagggccctgctccattctaccctctggaagatggaacagccggcgagcagctgcacaaggccatgaagagatatgccctggtgcctggcacaatcgccttcacagatgcccacatcgaggtggacatcacctacgccgagtacttcgagatgtctgtgcggctggccgaagctatgaagcgctacggcctgaacaccaaccaccggatcgtcgtgtgcagcgagaacagcctgcagttcttcatgcctgtgctgggcgccctgttcatcggagttgctgtggcccctgccaacgacatctacaacgagcgcgagctgctgaacagcatgggcatctctcagcccaccgtggtgttcgtgtccaagaagggactgcagaaaatcctgaacgtgcagaagaagctgcccatcatccagaaaatcatcatcatggacagcaagaccgactaccagggcttccagagcatgtacaccttcgtgaccagccatctgccacctggcttcaacgagtacgacttcgtgcccgagagcttcgaccgggacaagacaatcgccctgatcatgaacagcagcggctctaccggactgcccaaaggtgttgccctgcctcatagaactgcctgcgtgcggtttagccacgccagagatcccatcttcggcaaccagatcatccccgacacagccatcctgagcgtggtgccttttcaccacggcttcggcatgttcaccacactgggctacctgatctgcggcttcagagtggtgctgatgtaccgcttcgaggaagaactgttcctgcggagcctgcaggactacaagatccagtctgctctgctggtgcctactctgttcagcttctttgccaagagcaccctgatcgataagtacgacctgagcaacctgcacgagatcgcctctggcggagcccctctgtctaaagaagtgggagaagccgtcgccaagcggttccatctgcctggcatcagacaaggctatggcctgaccgagacaaccagcgccattctgattacccctgagggcgacgataagcctggcgctgtgggaaaagtggtgccattcttcgaggccaaggtggtggatctggacaccggcaaaacactgggcgttaaccagaggggcgagctgtgtgttagaggccctatgatcatgagcggctacgtgaacaaccccgaggccacaaacgctctgatcgacaaggatggatggctgcacagcggcgacattgcctactgggacgaagatgagcacttcttcatcgtggaccggctgaagtccctgatcaagtacaagggctaccaggtggccccagccgagctggaatctattctgctgcaacaccccaacatcttcgatgccggcgttgcaggactgcccgatgatgatgctggcgaactgccagctgctgtggtggtgctggaacacggcaagaccatgaccgagaaagaaatcgtggactacgtggccagccaagtgaccaccgccaagaaactgagaggcggcgtggtgtttgtggacgaggtgccaaaaggcctgacaggcaagctggacgcccggaagatcagagagatcctgattaaggccaagaaaggcggcaagatcgccgtgtaatagctaactagacaaaacaccaaacaaacaagctgcgagccacggacttaaataattgagccttaaagaagaaattctttaagtggatgctctcaaactcagggaaacctaaatctagttatagacaaggcaatcaaaaacaaccaaaaaaaatctagatatcggatcccggg

SEQ ID NO: 3316 - DNA, 2831 bp, synthetic construct
  source 1..2831: mol_type = other DNA; note = Ana1.95
taatacgactcactatagggagaccctcgaaaaaaaacacaaacacctgagccaagccgaagtagtaattagtaagttaacaatagatgacttacaactaatcggaaggtgcagagactcgacgggagctaccctaacgtcaagacgagggtaaagagagagtccaattctcaaagccaataggcagtagcgaaagctgcaagagaatgaaaatccgtggctcgcagcaaacaccaaacaaaacaaacacaaaccaacaaaaattaaaacagcctgtgggttgatcccacccacaggcccattgggcgctagcactctggtatcacggtacctttgtgcgcctgttttataccccctcccccaactgtaacttagaagtaacacacaccgatcaacagtcagcgtggcacaccagccacgttttgatcaagcacttctgttaccccggactgagtatcaatagactgctcacgcggttgaaggagaaagcgttcgttatccggccaactacttcgaaaaacctagtaacaccgtggaagttgcagagtgtttcgctcagcactaccccagtgtagatcaggtcgatgagtcaccgcattccccacgggcgaccgtggcggtggctgcgttggcggcctgcccatggggaaacccatgggacgctctaatacagacatggtgcgaagagtctattgagctagttggtagtcctccggcccctgaatgcggctaatcctaactgcggagcacacaccctcaagccagagggcagtgtgtcgtaacgggcaactctgcagcggaaccgactactttgggtgtccgtgtttcattttattcctatactggctgcttatggtgacaattgagagatcgttaccatatagctattggattggccatccggtgactaatagagctattatatatccctttgttgggtttataccacttagcttgaaagaggttaaaacattacaattcattgttaagttgaatacagcaaaatggaagatgccaagaacatcaagaagggccctgctccattctaccctctggaagatggaacagccggcgagcagctgcacaaggccatgaagagatatgccctggtgcctggcacaatcgccttcacagatgcccacatcgaggtggacatcacctacgccgagtacttcgagatgtctgtgcggctggccgaagctatgaagcgctacggcctgaacaccaaccaccggatcgtcgtgtgcagcgagaacagcctgcagttcttcatgcctgtgctgggcgccctgttcatcggagttgctgtggcccctgccaacgacatctacaacgagcgcgagctgctgaacagcatgggcatctctcagcccaccgtggtgttcgtgtccaagaagggactgcagaaaatcctgaacgtgcagaagaagctgcccatcatccagaaaatcatcatcatggacagcaagaccgactaccagggcttccagagcatgtacaccttcgtgaccagccatctgccacctggcttcaacgagtacgacttcgtgcccgagagcttcgaccgggacaagacaatcgccctgatcatgaacagcagcggctctaccggactgcccaaaggtgttgccctgcctcatagaactgcctgcgtgcggtttagccacgccagagatcccatcttcggcaaccagatcatccccgacacagccatcctgagcgtggtgccttttcaccacggcttcggcatgttcaccacactgggctacctgatctgcggcttcagagtggtgctgatgtaccgcttcgaggaagaactgttcctgcggagcctgcaggactacaagatccagtctgctctgctggtgcctactctgttcagcttctttgccaagagcaccctgatcgataagtacgacctgagcaacctgcacgagatcgcctctggcggagcccctctgtctaaagaagtgggagaagccgtcgccaagcggttccatctgcctggcatcagacaaggctatggcctgaccgagacaaccagcgccattctgattacccctgagggcgacgataagcctggcgctgtgggaaaagtggtgccattcttcgaggccaaggtggtggatctggacaccggcaaaacactgggcgttaaccagaggggcgagctgtgtgttagaggccctatgatcatgagcggctacgtgaacaaccccgaggccacaaacgctctgatcgacaaggatggatggctgcacagcggcgacattgcctactgggacgaagatgagcacttcttcatcgtggaccggctgaagtccctgatcaagtacaagggctaccaggtggccccagccgagctggaatctattctgctgcaacaccccaacatcttcgatgccggcgttgcaggactgcccgatgatgatgctggcgaactgccagctgctgtggtggtgctggaacacggcaagaccatgaccgagaaagaaatcgtggactacgtggccagccaagtgaccaccgccaagaaactgagaggcggcgtggtgtttgtggacgaggtgccaaaaggcctgacaggcaagctggacgcccggaagatcagagagatcctgattaaggccaagaaaggcggcaagatcgccgtgtaatagctaactagacaaaacaccaaacaaacaagctgcgagccacggacttaaataattgagccttaaagaagaaattctttaagtggatgctctcaaactcagggaaacctaaatctagttatagacaaggcaatccaaaaacaaccaaaaaaaatctagatatcggatcccggg

SEQ ID NO: 3317 - DNA, 2831 bp, synthetic construct
  source 1..2831: mol_type = other DNA; note = Ana1.96
taatacgactcactatagggagaccctcgaaaaaaaacacaaacaccgagccaagccgaagtagtaattagtaagttaacaatagatgacttacaactaatcggaaggtgcagagactcgacgggagctaccctaacgtcaagacgagggtaaagagagagtccaattctcaaagccaataggcagtagcgaaagctgcaagagaatgaaaatccgtggctcgcagcaaacaccaaacaaaacaaacacaaaccaacaaaaattaaaacagcctgtgggttgatcccacccacaggcccattgggcgctagcactctggtatcacggtacctttgtgcgcctgttttataccccctcccccaactgtaacttagaagtaacacacaccgatcaacagtcagcgtggcacaccagccacgttttgatcaagcacttctgttaccccggactgagtatcaatagactgctcacgcggttgaaggagaaagcgttcgttatccggccaactacttcgaaaaacctagtaacaccgtggaagttgcagagtgtttcgctcagcactaccccagtgtagatcaggtcgatgagtcaccgcattccccacgggcgaccgtggcggtggctgcgttggcggcctgcccatggggaaacccatgggacgctctaatacagacatggtgcgaagagtctattgagctagttggtagtcctccggcccctgaatgcggctaatcctaactgcggagcacacaccctcaagccagagggcagtgtgtcgtaacgggcaactctgcagcggaaccgactactttgggtgtccgtgtttcattttattcctatactggctgcttatggtgacaattgagagatcgttaccatatagctattggattggccatccggtgactaatagagctattatatatccctttgttgggtttataccacttagcttgaaagaggttaaaacattacaattcattgttaagttgaatacagcaaaatggaagatgccaagaacatcaagaagggccctgctccattctaccctctggaagatggaacagccggcgagcagctgcacaaggccatgaagagatatgccctggtgcctggcacaatcgccttcacagatgcccacatcgaggtggacatcacctacgccgagtacttcgagatgtctgtgcggctggccgaagctatgaagcgctacggcctgaacaccaaccaccggatcgtcgtgtgcagcgagaacagcctgcagttcttcatgcctgtgctgggcgccctgttcatcggagttgctgtggcccctgccaacgacatctacaacgagcgcgagctgctgaacagcatgggcatctctcagcccaccgtggtgttcgtgtccaagaagggactgcagaaaatcctgaacgtgcagaagaagctgcccatcatccagaaaatcatcatcatggacagcaagaccgactaccagggcttccagagcatgtacaccttcgtgaccagccatctgccacctggcttcaacgagtacgacttcgtgcccgagagcttcgaccgggacaagacaatcgccctgatcatgaacagcagcggctctaccggactgcccaaaggtgttgccctgcctcatagaactgcctgcgtgcggtttagccacgccagagatcccatcttcggcaaccagatcatccccgacacagccatcctgagcgtggtgccttttcaccacggcttcggcatgttcaccacactgggctacctgatctgcggcttcagagtggtgctgatgtaccgcttcgaggaagaactgttcctgcggagcctgcaggactacaagatccagtctgctctgctggtgcctactctgttcagcttctttgccaagagcaccctgatcgataagtacgacctgagcaacctgcacgagatcgcctctggcggagcccctctgtctaaagaagtgggagaagccgtcgccaagcggttccatctgcctggcatcagacaaggctatggcctgaccgagacaaccagcgccattctgattacccctgagggcgacgataagcctggcgctgtgggaaaagtggtgccattcttcgaggccaaggtggtggatctggacaccggcaaaacactgggcgttaaccagaggggcgagctgtgtgttagaggccctatgatcatgagcggctacgtgaacaaccccgaggccacaaacgctctgatcgacaaggatggatggctgcacagcggcgacattgcctactgggacgaagatgagcacttcttcatcgtggaccggctgaagtccctgatcaagtacaagggctaccaggtggccccagccgagctggaatctattctgctgcaacaccccaacatcttcgatgccggcgttgcaggactgcccgatgatgatgctggcgaactgccagctgctgtggtggtgctggaacacggcaagaccatgaccgagaaagaaatcgtggactacgtggccagccaagtgaccaccgccaagaaactgagaggcggcgtggtgtttgtggacgaggtgccaaaaggcctgacaggcaagctggacgcccggaagatcagagagatcctgattaaggccaagaaaggcggcaagatcgccgtgtaatagctaactagacaaaacaccaaacaaacaagctgcgagccacggacttaaataattgagccttaaagaagaaattctttaagtggatgctctcaaactcagggaaacctaaatctagttatagacaaggcaatcctaaaaacaaccaaaaaaaatctagatatcggatcccggg

SEQ ID NO: 3318 - DNA, 2831 bp, synthetic construct
  source 1..2831: mol_type = other DNA; note = Ana1.97
taatacgactcactatagggagaccctcgaaaaaaaacacaaacaccagccaagccgaagtagtaattagtaagttaacaatagatgacttacaactaatcggaaggtgcagagactcgacgggagctaccctaacgtcaagacgagggtaaagagagagtccaattctcaaagccaataggcagtagcgaaagctgcaagagaatgaaaatccgtggctcgcagcaaacaccaaacaaaacaaacacaaaccaacaaaaattaaaacagcctgtgggttgatcccacccacaggcccattgggcgctagcactctggtatcacggtacctttgtgcgcctgttttataccccctcccccaactgtaacttagaagtaacacacaccgatcaacagtcagcgtggcacaccagccacgttttgatcaagcacttctgttaccccggactgagtatcaatagactgctcacgcggttgaaggagaaagcgttcgttatccggccaactacttcgaaaaacctagtaacaccgtggaagttgcagagtgtttcgctcagcactaccccagtgtagatcaggtcgatgagtcaccgcattccccacgggcgaccgtggcggtggctgcgttggcggcctgcccatggggaaacccatgggacgctctaatacagacatggtgcgaagagtctattgagctagttggtagtcctccggcccctgaatgcggctaatcctaactgcggagcacacaccctcaagccagagggcagtgtgtcgtaacgggcaactctgcagcggaaccgactactttgggtgtccgtgtttcattttattcctatactggctgcttatggtgacaattgagagatcgttaccatatagctattggattggccatccggtgactaatagagctattatatatccctttgttgggtttataccacttagcttgaaagaggttaaaacattacaattcattgttaagttgaatacagcaaaatggaagatgccaagaacatcaagaagggccctgctccattctaccctctggaagatggaacagccggcgagcagctgcacaaggccatgaagagatatgccctggtgcctggcacaatcgccttcacagatgcccacatcgaggtggacatcacctacgccgagtacttcgagatgtctgtgcggctggccgaagctatgaagcgctacggcctgaacaccaaccaccggatcgtcgtgtgcagcgagaacagcctgcagttcttcatgcctgtgctgggcgccctgttcatcggagttgctgtggcccctgccaacgacatctacaacgagcgcgagctgctgaacagcatgggcatctctcagcccaccgtggtgttcgtgtccaagaagggactgcagaaaatcctgaacgtgcagaagaagctgcccatcatccagaaaatcatcatcatggacagcaagaccgactaccagggcttccagagcatgtacaccttcgtgaccagccatctgccacctggcttcaacgagtacgacttcgtgcccgagagcttcgaccgggacaagacaatcgccctgatcatgaacagcagcggctctaccggactgcccaaaggtgttgccctgcctcatagaactgcctgcgtgcggtttagccacgccagagatcccatcttcggcaaccagatcatccccgacacagccatcctgagcgtggtgccttttcaccacggcttcggcatgttcaccacactgggctacctgatctgcggcttcagagtggtgctgatgtaccgcttcgaggaagaactgttcctgcggagcctgcaggactacaagatccagtctgctctgctggtgcctactctgttcagcttctttgccaagagcaccctgatcgataagtacgacctgagcaacctgcacgagatcgcctctggcggagcccctctgtctaaagaagtgggagaagccgtcgccaagcggttccatctgcctggcatcagacaaggctatggcctgaccgagacaaccagcgccattctgattacccctgagggcgacgataagcctggcgctgtgggaaaagtggtgccattcttcgaggccaaggtggtggatctggacaccggcaaaacactgggcgttaaccagaggggcgagctgtgtgttagaggccctatgatcatgagcggctacgtgaacaaccccgaggccacaaacgctctgatcgacaaggatggatggctgcacagcggcgacattgcctactgggacgaagatgagcacttcttcatcgtggaccggctgaagtccctgatcaagtacaagggctaccaggtggccccagccgagctggaatctattctgctgcaacaccccaacatcttcgatgccggcgttgcaggactgcccgatgatgatgctggcgaactgccagctgctgtggtggtgctggaacacggcaagaccatgaccgagaaagaaatcgtggactacgtggccagccaagtgaccaccgccaagaaactgagaggcggcgtggtgtttgtggacgaggtgccaaaaggcctgacaggcaagctggacgcccggaagatcagagagatcctgattaaggccaagaaaggcggcaagatcgccgtgtaatagctaactagacaaaacaccaaacaaacaagctgcgagccacggacttaaataattgagccttaaagaagaaattctttaagtggatgctctcaaactcagggaaacctaaatctagttatagacaaggcaatcctgaaaaacaaccaaaaaaaatctagatatcggatcccggg

SEQ ID NO: 3319 - DNA, 2831 bp, synthetic construct
  source 1..2831: mol_type = other DNA; note = Ana1.98
taatacgactcactatagggagaccctcgaaaaaaaacacaaacaccgccaagccgaagtagtaattagtaagttaacaatagatgacttacaactaatcggaaggtgcagagactcgacgggagctaccctaacgtcaagacgagggtaaagagagagtccaattctcaaagccaataggcagtagcgaaagctgcaagagaatgaaaatccgtggctcgcagcaaacaccaaacaaaacaaacacaaaccaacaaaaattaaaacagcctgtgggttgatcccacccacaggcccattgggcgctagcactctggtatcacggtacctttgtgcgcctgttttataccccctcccccaactgtaacttagaagtaacacacaccgatcaacagtcagcgtggcacaccagccacgttttgatcaagcacttctgttaccccggactgagtatcaatagactgctcacgcggttgaaggagaaagcgttcgttatccggccaactacttcgaaaaacctagtaacaccgtggaagttgcagagtgtttcgctcagcactaccccagtgtagatcaggtcgatgagtcaccgcattccccacgggcgaccgtggcggtggctgcgttggcggcctgcccatggggaaacccatgggacgctctaatacagacatggtgcgaagagtctattgagctagttggtagtcctccggcccctgaatgcggctaatcctaactgcggagcacacaccctcaagccagagggcagtgtgtcgtaacgggcaactctgcagcggaaccgactactttgggtgtccgtgtttcattttattcctatactggctgcttatggtgacaattgagagatcgttaccatatagctattggattggccatccggtgactaatagagctattatatatccctttgttgggtttataccacttagcttgaaagaggttaaaacattacaattcattgttaagttgaatacagcaaaatggaagatgccaagaacatcaagaagggccctgctccattctaccctctggaagatggaacagccggcgagcagctgcacaaggccatgaagagatatgccctggtgcctggcacaatcgccttcacagatgcccacatcgaggtggacatcacctacgccgagtacttcgagatgtctgtgcggctggccgaagctatgaagcgctacggcctgaacaccaaccaccggatcgtcgtgtgcagcgagaacagcctgcagttcttcatgcctgtgctgggcgccctgttcatcggagttgctgtggcccctgccaacgacatctacaacgagcgcgagctgctgaacagcatgggcatctctcagcccaccgtggtgttcgtgtccaagaagggactgcagaaaatcctgaacgtgcagaagaagctgcccatcatccagaaaatcatcatcatggacagcaagaccgactaccagggcttccagagcatgtacaccttcgtgaccagccatctgccacctggcttcaacgagtacgacttcgtgcccgagagcttcgaccgggacaagacaatcgccctgatcatgaacagcagcggctctaccggactgcccaaaggtgttgccctgcctcatagaactgcctgcgtgcggtttagccacgccagagatcccatcttcggcaaccagatcatccccgacacagccatcctgagcgtggtgccttttcaccacggcttcggcatgttcaccacactgggctacctgatctgcggcttcagagtggtgctgatgtaccgcttcgaggaagaactgttcctgcggagcctgcaggactacaagatccagtctgctctgctggtgcctactctgttcagcttctttgccaagagcaccctgatcgataagtacgacctgagcaacctgcacgagatcgcctctggcggagcccctctgtctaaagaagtgggagaagccgtcgccaagcggttccatctgcctggcatcagacaaggctatggcctgaccgagacaaccagcgccattctgattacccctgagggcgacgataagcctggcgctgtgggaaaagtggtgccattcttcgaggccaaggtggtggatctggacaccggcaaaacactgggcgttaaccagaggggcgagctgtgtgttagaggccctatgatcatgagcggctacgtgaacaaccccgaggccacaaacgctctgatcgacaaggatggatggctgcacagcggcgacattgcctactgggacgaagatgagcacttcttcatcgtggaccggctgaagtccctgatcaagtacaagggctaccaggtggccccagccgagctggaatctattctgctgcaacaccccaacatcttcgatgccggcgttgcaggactgcccgatgatgatgctggcgaactgccagctgctgtggtggtgctggaacacggcaagaccatgaccgagaaagaaatcgtggactacgtggccagccaagtgaccaccgccaagaaactgagaggcggcgtggtgtttgtggacgaggtgccaaaaggcctgacaggcaagctggacgcccggaagatcagagagatcctgattaaggccaagaaaggcggcaagatcgccgtgtaatagctaactagacaaaacaccaaacaaacaagctgcgagccacggacttaaataattgagccttaaagaagaaattctttaagtggatgctctcaaactcagggaaacctaaatctagttatagacaaggcaatcctgaaaaaacaaccaaaaaaaatctagatatcggatcccggg

SEQ ID NO: 3320 - DNA, 2831 bp, synthetic construct
  source 1..2831: mol_type = other DNA; note = Ana1.99
taatacgactcactatagggagaccctcgaaaaaaaacacaaacaccccaagccgaagtagtaattagtaagttaacaatagatgacttacaactaatcggaaggtgcagagactcgacgggagctaccctaacgtcaagacgagggtaaagagagagtccaattctcaaagccaataggcagtagcgaaagctgcaagagaatgaaaatccgtggctcgcagcaaacaccaaacaaaacaaacacaaaccaacaaaaattaaaacagcctgtgggttgatcccacccacaggcccattgggcgctagcactctggtatcacggtacctttgtgcgcctgttttataccccctcccccaactgtaacttagaagtaacacacaccgatcaacagtcagcgtggcacaccagccacgttttgatcaagcacttctgttaccccggactgagtatcaatagactgctcacgcggttgaaggagaaagcgttcgttatccggccaactacttcgaaaaacctagtaacaccgtggaagttgcagagtgtttcgctcagcactaccccagtgtagatcaggtcgatgagtcaccgcattccccacgggcgaccgtggcggtggctgcgttggcggcctgcccatggggaaacccatgggacgctctaatacagacatggtgcgaagagtctattgagctagttggtagtcctccggcccctgaatgcggctaatcctaactgcggagcacacaccctcaagccagagggcagtgtgtcgtaacgggcaactctgcagcggaaccgactactttgggtgtccgtgtttcattttattcctatactggctgcttatggtgacaattgagagatcgttaccatatagctattggattggccatccggtgactaatagagctattatatatccctttgttgggtttataccacttagcttgaaagaggttaaaacattacaattcattgttaagttgaatacagcaaaatggaagatgccaagaacatcaagaagggccctgctccattctaccctctggaagatggaacagccggcgagcagctgcacaaggccatgaagagatatgccctggtgcctggcacaatcgccttcacagatgcccacatcgaggtggacatcacctacgccgagtacttcgagatgtctgtgcggctggccgaagctatgaagcgctacggcctgaacaccaaccaccggatcgtcgtgtgcagcgagaacagcctgcagttcttcatgcctgtgctgggcgccctgttcatcggagttgctgtggcccctgccaacgacatctacaacgagcgcgagctgctgaacagcatgggcatctctcagcccaccgtggtgttcgtgtccaagaagggactgcagaaaatcctgaacgtgcagaagaagctgcccatcatccagaaaatcatcatcatggacagcaagaccgactaccagggcttccagagcatgtacaccttcgtgaccagccatctgccacctggcttcaacgagtacgacttcgtgcccgagagcttcgaccgggacaagacaatcgccctgatcatgaacagcagcggctctaccggactgcccaaaggtgttgccctgcctcatagaactgcctgcgtgcggtttagccacgccagagatcccatcttcggcaaccagatcatccccgacacagccatcctgagcgtggtgccttttcaccacggcttcggcatgttcaccacactgggctacctgatctgcggcttcagagtggtgctgatgtaccgcttcgaggaagaactgttcctgcggagcctgcaggactacaagatccagtctgctctgctggtgcctactctgttcagcttctttgccaagagcaccctgatcgataagtacgacctgagcaacctgcacgagatcgcctctggcggagcccctctgtctaaagaagtgggagaagccgtcgccaagcggttccatctgcctggcatcagacaaggctatggcctgaccgagacaaccagcgccattctgattacccctgagggcgacgataagcctggcgctgtgggaaaagtggtgccattcttcgaggccaaggtggtggatctggacaccggcaaaacactgggcgttaaccagaggggcgagctgtgtgttagaggccctatgatcatgagcggctacgtgaacaaccccgaggccacaaacgctctgatcgacaaggatggatggctgcacagcggcgacattgcctactgggacgaagatgagcacttcttcatcgtggaccggctgaagtccctgatcaagtacaagggctaccaggtggccccagccgagctggaatctattctgctgcaacaccccaacatcttcgatgccggcgttgcaggactgcccgatgatgatgctggcgaactgccagctgctgtggtggtgctggaacacggcaagaccatgaccgagaaagaaatcgtggactacgtggccagccaagtgaccaccgccaagaaactgagaggcggcgtggtgtttgtggacgaggtgccaaaaggcctgacaggcaagctggacgcccggaagatcagagagatcctgattaaggccaagaaaggcggcaagatcgccgtgtaatagctaactagacaaaacaccaaacaaacaagctgcgagccacggacttaaataattgagccttaaagaagaaattctttaagtggatgctctcaaactcagggaaacctaaatctagttatagacaaggcaatcctgagaaaaacaaccaaaaaaaatctagatatcggatcccggg

SEQ ID NO: 3321 - DNA, 2831 bp, synthetic construct
  source 1..2831: mol_type = other DNA; note = Ana1.100
taatacgactcactatagggagaccctcgaaaaaaaacacaaacacccaagccgaagtagtaattagtaagttaacaatagatgacttacaactaatcggaaggtgcagagactcgacgggagctaccctaacgtcaagacgagggtaaagagagagtccaattctcaaagccaataggcagtagcgaaagctgcaagagaatgaaaatccgtggctcgcagcaaacaccaaacaaaacaaacacaaaccaacaaaaattaaaacagcctgtgggttgatcccacccacaggcccattgggcgctagcactctggtatcacggtacctttgtgcgcctgttttataccccctcccccaactgtaacttagaagtaacacacaccgatcaacagtcagcgtggcacaccagccacgttttgatcaagcacttctgttaccccggactgagtatcaatagactgctcacgcggttgaaggagaaagcgttcgttatccggccaactacttcgaaaaacctagtaacaccgtggaagttgcagagtgtttcgctcagcactaccccagtgtagatcaggtcgatgagtcaccgcattccccacgggcgaccgtggcggtggctgcgttggcggcctgcccatggggaaacccatgggacgctctaatacagacatggtgcgaagagtctattgagctagttggtagtcctccggcccctgaatgcggctaatcctaactgcggagcacacaccctcaagccagagggcagtgtgtcgtaacgggcaactctgcagcggaaccgactactttgggtgtccgtgtttcattttattcctatactggctgcttatggtgacaattgagagatcgttaccatatagctattggattggccatccggtgactaatagagctattatatatccctttgttgggtttataccacttagcttgaaagaggttaaaacattacaattcattgttaagttgaatacagcaaaatggaagatgccaagaacatcaagaagggccctgctccattctaccctctggaagatggaacagccggcgagcagctgcacaaggccatgaagagatatgccctggtgcctggcacaatcgccttcacagatgcccacatcgaggtggacatcacctacgccgagtacttcgagatgtctgtgcggctggccgaagctatgaagcgctacggcctgaacaccaaccaccggatcgtcgtgtgcagcgagaacagcctgcagttcttcatgcctgtgctgggcgccctgttcatcggagttgctgtggcccctgccaacgacatctacaacgagcgcgagctgctgaacagcatgggcatctctcagcccaccgtggtgttcgtgtccaagaagggactgcagaaaatcctgaacgtgcagaagaagctgcccatcatccagaaaatcatcatcatggacagcaagaccgactaccagggcttccagagcatgtacaccttcgtgaccagccatctgccacctggcttcaacgagtacgacttcgtgcccgagagcttcgaccgggacaagacaatcgccctgatcatgaacagcagcggctctaccggactgcccaaaggtgttgccctgcctcatagaactgcctgcgtgcggtttagccacgccagagatcccatcttcggcaaccagatcatccccgacacagccatcctgagcgtggtgccttttcaccacggcttcggcatgttcaccacactgggctacctgatctgcggcttcagagtggtgctgatgtaccgcttcgaggaagaactgttcctgcggagcctgcaggactacaagatccagtctgctctgctggtgcctactctgttcagcttctttgccaagagcaccctgatcgataagtacgacctgagcaacctgcacgagatcgcctctggcggagcccctctgtctaaagaagtgggagaagccgtcgccaagcggttccatctgcctggcatcagacaaggctatggcctgaccgagacaaccagcgccattctgattacccctgagggcgacgataagcctggcgctgtgggaaaagtggtgccattcttcgaggccaaggtggtggatctggacaccggcaaaacactgggcgttaaccagaggggcgagctgtgtgttagaggccctatgatcatgagcggctacgtgaacaaccccgaggccacaaacgctctgatcgacaaggatggatggctgcacagcggcgacattgcctactgggacgaagatgagcacttcttcatcgtggaccggctgaagtccctgatcaagtacaagggctaccaggtggccccagccgagctggaatctattctgctgcaacaccccaacatcttcgatgccggcgttgcaggactgcccgatgatgatgctggcgaactgccagctgctgtggtggtgctggaacacggcaagaccatgaccgagaaagaaatcgtggactacgtggccagccaagtgaccaccgccaagaaactgagaggcggcgtggtgtttgtggacgaggtgccaaaaggcctgacaggcaagctggacgcccggaagatcagagagatcctgattaaggccaagaaaggcggcaagatcgccgtgtaatagctaactagacaaaacaccaaacaaacaagctgcgagccacggacttaaataattgagccttaaagaagaaattctttaagtggatgctctcaaactcagggaaacctaaatctagttatagacaaggcaatcctgagcaaaaacaaccaaaaaaaatctagatatcggatcccggg

SEQ ID NO: 3322 - DNA, 2831 bp, synthetic construct
  source 1..2831: mol_type = other DNA; note = Ana1.101
taatacgactcactatagggagaccctcgaaaaaaaacacaaacaccaagccgaagtagtaattagtaagttaacaatagatgacttacaactaatcggaaggtgcagagactcgacgggagctaccctaacgtcaagacgagggtaaagagagagtccaattctcaaagccaataggcagtagcgaaagctgcaagagaatgaaaatccgtggctcgcagcaaacaccaaacaaaacaaacacaaaccaacaaaaattaaaacagcctgtgggttgatcccacccacaggcccattgggcgctagcactctggtatcacggtacctttgtgcgcctgttttataccccctcccccaactgtaacttagaagtaacacacaccgatcaacagtcagcgtggcacaccagccacgttttgatcaagcacttctgttaccccggactgagtatcaatagactgctcacgcggttgaaggagaaagcgttcgttatccggccaactacttcgaaaaacctagtaacaccgtggaagttgcagagtgtttcgctcagcactaccccagtgtagatcaggtcgatgagtcaccgcattccccacgggcgaccgtggcggtggctgcgttggcggcctgcccatggggaaacccatgggacgctctaatacagacatggtgcgaagagtctattgagctagttggtagtcctccggcccctgaatgcggctaatcctaactgcggagcacacaccctcaagccagagggcagtgtgtcgtaacgggcaactctgcagcggaaccgactactttgggtgtccgtgtttcattttattcctatactggctgcttatggtgacaattgagagatcgttaccatatagctattggattggccatccggtgactaatagagctattatatatccctttgttgggtttataccacttagcttgaaagaggttaaaacattacaattcattgttaagttgaatacagcaaaatggaagatgccaagaacatcaagaagggccctgctccattctaccctctggaagatggaacagccggcgagcagctgcacaaggccatgaagagatatgccctggtgcctggcacaatcgccttcacagatgcccacatcgaggtggacatcacctacgccgagtacttcgagatgtctgtgcggctggccgaagctatgaagcgctacggcctgaacaccaaccaccggatcgtcgtgtgcagcgagaacagcctgcagttcttcatgcctgtgctgggcgccctgttcatcggagttgctgtggcccctgccaacgacatctacaacgagcgcgagctgctgaacagcatgggcatctctcagcccaccgtggtgttcgtgtccaagaagggactgcagaaaatcctgaacgtgcagaagaagctgcccatcatccagaaaatcatcatcatggacagcaagaccgactaccagggcttccagagcatgtacaccttcgtgaccagccatctgccacctggcttcaacgagtacgacttcgtgcccgagagcttcgaccgggacaagacaatcgccctgatcatgaacagcagcggctctaccggactgcccaaaggtgttgccctgcctcatagaactgcctgcgtgcggtttagccacgccagagatcccatcttcggcaaccagatcatccccgacacagccatcctgagcgtggtgccttttcaccacggcttcggcatgttcaccacactgggctacctgatctgcggcttcagagtggtgctgatgtaccgcttcgaggaagaactgttcctgcggagcctgcaggactacaagatccagtctgctctgctggtgcctactctgttcagcttctttgccaagagcaccctgatcgataagtacgacctgagcaacctgcacgagatcgcctctggcggagcccctctgtctaaagaagtgggagaagccgtcgccaagcggttccatctgcctggcatcagacaaggctatggcctgaccgagacaaccagcgccattctgattacccctgagggcgacgataagcctggcgctgtgggaaaagtggtgccattcttcgaggccaaggtggtggatctggacaccggcaaaacactgggcgttaaccagaggggcgagctgtgtgttagaggccctatgatcatgagcggctacgtgaacaaccccgaggccacaaacgctctgatcgacaaggatggatggctgcacagcggcgacattgcctactgggacgaagatgagcacttcttcatcgtggaccggctgaagtccctgatcaagtacaagggctaccaggtggccccagccgagctggaatctattctgctgcaacaccccaacatcttcgatgccggcgttgcaggactgcccgatgatgatgctggcgaactgccagctgctgtggtggtgctggaacacggcaagaccatgaccgagaaagaaatcgtggactacgtggccagccaagtgaccaccgccaagaaactgagaggcggcgtggtgtttgtggacgaggtgccaaaaggcctgacaggcaagctggacgcccggaagatcagagagatcctgattaaggccaagaaaggcggcaagatcgccgtgtaatagctaactagacaaaacaccaaacaaacaagctgcgagccacggacttaaataattgagccttaaagaagaaattctttaagtggatgctctcaaactcagggaaacctaaatctagttatagacaaggcaatcctgagccaaaaacaaccaaaaaaaatctagatatcggatcccggg

SEQ ID NO: 3323 - DNA, 2831 bp, synthetic construct
  source 1..2831: mol_type = other DNA; note = Ana1.102
taatacgactcactatagggagaccctcgaaaaaaaacacaaacaccagccgaagtagtaattagtaagttaacaatagatgacttacaactaatcggaaggtgcagagactcgacgggagctaccctaacgtcaagacgagggtaaagagagagtccaattctcaaagccaataggcagtagcgaaagctgcaagagaatgaaaatccgtggctcgcagcaaacaccaaacaaaacaaacacaaaccaacaaaaattaaaacagcctgtgggttgatcccacccacaggcccattgggcgctagcactctggtatcacggtacctttgtgcgcctgttttataccccctcccccaactgtaacttagaagtaacacacaccgatcaacagtcagcgtggcacaccagccacgttttgatcaagcacttctgttaccccggactgagtatcaatagactgctcacgcggttgaaggagaaagcgttcgttatccggccaactacttcgaaaaacctagtaacaccgtggaagttgcagagtgtttcgctcagcactaccccagtgtagatcaggtcgatgagtcaccgcattccccacgggcgaccgtggcggtggctgcgttggcggcctgcccatggggaaacccatgggacgctctaatacagacatggtgcgaagagtctattgagctagttggtagtcctccggcccctgaatgcggctaatcctaactgcggagcacacaccctcaagccagagggcagtgtgtcgtaacgggcaactctgcagcggaaccgactactttgggtgtccgtgtttcattttattcctatactggctgcttatggtgacaattgagagatcgttaccatatagctattggattggccatccggtgactaatagagctattatatatccctttgttgggtttataccacttagcttgaaagaggttaaaacattacaattcattgttaagttgaatacagcaaaatggaagatgccaagaacatcaagaagggccctgctccattctaccctctggaagatggaacagccggcgagcagctgcacaaggccatgaagagatatgccctggtgcctggcacaatcgccttcacagatgcccacatcgaggtggacatcacctacgccgagtacttcgagatgtctgtgcggctggccgaagctatgaagcgctacggcctgaacaccaaccaccggatcgtcgtgtgcagcgagaacagcctgcagttcttcatgcctgtgctgggcgccctgttcatcggagttgctgtggcccctgccaacgacatctacaacgagcgcgagctgctgaacagcatgggcatctctcagcccaccgtggtgttcgtgtccaagaagggactgcagaaaatcctgaacgtgcagaagaagctgcccatcatccagaaaatcatcatcatggacagcaagaccgactaccagggcttccagagcatgtacaccttcgtgaccagccatctgccacctggcttcaacgagtacgacttcgtgcccgagagcttcgaccgggacaagacaatcgccctgatcatgaacagcagcggctctaccggactgcccaaaggtgttgccctgcctcatagaactgcctgcgtgcggtttagccacgccagagatcccatcttcggcaaccagatcatccccgacacagccatcctgagcgtggtgccttttcaccacggcttcggcatgttcaccacactgggctacctgatctgcggcttcagagtggtgctgatgtaccgcttcgaggaagaactgttcctgcggagcctgcaggactacaagatccagtctgctctgctggtgcctactctgttcagcttctttgccaagagcaccctgatcgataagtacgacctgagcaacctgcacgagatcgcctctggcggagcccctctgtctaaagaagtgggagaagccgtcgccaagcggttccatctgcctggcatcagacaaggctatggcctgaccgagacaaccagcgccattctgattacccctgagggcgacgataagcctggcgctgtgggaaaagtggtgccattcttcgaggccaaggtggtggatctggacaccggcaaaacactgggcgttaaccagaggggcgagctgtgtgttagaggccctatgatcatgagcggctacgtgaacaaccccgaggccacaaacgctctgatcgacaaggatggatggctgcacagcggcgacattgcctactgggacgaagatgagcacttcttcatcgtggaccggctgaagtccctgatcaagtacaagggctaccaggtggccccagccgagctggaatctattctgctgcaacaccccaacatcttcgatgccggcgttgcaggactgcccgatgatgatgctggcgaactgccagctgctgtggtggtgctggaacacggcaagaccatgaccgagaaagaaatcgtggactacgtggccagccaagtgaccaccgccaagaaactgagaggcggcgtggtgtttgtggacgaggtgccaaaaggcctgacaggcaagctggacgcccggaagatcagagagatcctgattaaggccaagaaaggcggcaagatcgccgtgtaatagctaactagacaaaacaccaaacaaacaagctgcgagccacggacttaaataattgagccttaaagaagaaattctttaagtggatgctctcaaactcagggaaacctaaatctagttatagacaaggcaatcctgagccaaaaaacaaccaaaaaaaatctagatatcggatcccggg

SEQ ID NO: 3324 - DNA, 2831 bp, synthetic construct
  source 1..2831: mol_type = other DNA; note = Ana1.103
taatacgactcactatagggagaccctcgaaaaaaaacacaaacaccgccgaagtagtaattagtaagttaacaatagatgacttacaactaatcggaaggtgcagagactcgacgggagctaccctaacgtcaagacgagggtaaagagagagtccaattctcaaagccaataggcagtagcgaaagctgcaagagaatgaaaatccgtggctcgcagcaaacaccaaacaaaacaaacacaaaccaacaaaaattaaaacagcctgtgggttgatcccacccacaggcccattgggcgctagcactctggtatcacggtacctttgtgcgcctgttttataccccctcccccaactgtaacttagaagtaacacacaccgatcaacagtcagcgtggcacaccagccacgttttgatcaagcacttctgttaccccggactgagtatcaatagactgctcacgcggttgaaggagaaagcgttcgttatccggccaactacttcgaaaaacctagtaacaccgtggaagttgcagagtgtttcgctcagcactaccccagtgtagatcaggtcgatgagtcaccgcattccccacgggcgaccgtggcggtggctgcgttggcggcctgcccatggggaaacccatgggacgctctaatacagacatggtgcgaagagtctattgagctagttggtagtcctccggcccctgaatgcggctaatcctaactgcggagcacacaccctcaagccagagggcagtgtgtcgtaacgggcaactctgcagcggaaccgactactttgggtgtccgtgtttcattttattcctatactggctgcttatggtgacaattgagagatcgttaccatatagctattggattggccatccggtgactaatagagctattatatatccctttgttgggtttataccacttagcttgaaagaggttaaaacattacaattcattgttaagttgaatacagcaaaatggaagatgccaagaacatcaagaagggccctgctccattctaccctctggaagatggaacagccggcgagcagctgcacaaggccatgaagagatatgccctggtgcctggcacaatcgccttcacagatgcccacatcgaggtggacatcacctacgccgagtacttcgagatgtctgtgcggctggccgaagctatgaagcgctacggcctgaacaccaaccaccggatcgtcgtgtgcagcgagaacagcctgcagttcttcatgcctgtgctgggcgccctgttcatcggagttgctgtggcccctgccaacgacatctacaacgagcgcgagctgctgaacagcatgggcatctctcagcccaccgtggtgttcgtgtccaagaagggactgcagaaaatcctgaacgtgcagaagaagctgcccatcatccagaaaatcatcatcatggacagcaagaccgactaccagggcttccagagcatgtacaccttcgtgaccagccatctgccacctggcttcaacgagtacgacttcgtgcccgagagcttcgaccgggacaagacaatcgccctgatcatgaacagcagcggctctaccggactgcccaaaggtgttgccctgcctcatagaactgcctgcgtgcggtttagccacgccagagatcccatcttcggcaaccagatcatccccgacacagccatcctgagcgtggtgccttttcaccacggcttcggcatgttcaccacactgggctacctgatctgcggcttcagagtggtgctgatgtaccgcttcgaggaagaactgttcctgcggagcctgcaggactacaagatccagtctgctctgctggtgcctactctgttcagcttctttgccaagagcaccctgatcgataagtacgacctgagcaacctgcacgagatcgcctctggcggagcccctctgtctaaagaagtgggagaagccgtcgccaagcggttccatctgcctggcatcagacaaggctatggcctgaccgagacaaccagcgccattctgattacccctgagggcgacgataagcctggcgctgtgggaaaagtggtgccattcttcgaggccaaggtggtggatctggacaccggcaaaacactgggcgttaaccagaggggcgagctgtgtgttagaggccctatgatcatgagcggctacgtgaacaaccccgaggccacaaacgctctgatcgacaaggatggatggctgcacagcggcgacattgcctactgggacgaagatgagcacttcttcatcgtggaccggctgaagtccctgatcaagtacaagggctaccaggtggccccagccgagctggaatctattctgctgcaacaccccaacatcttcgatgccggcgttgcaggactgcccgatgatgatgctggcgaactgccagctgctgtggtggtgctggaacacggcaagaccatgaccgagaaagaaatcgtggactacgtggccagccaagtgaccaccgccaagaaactgagaggcggcgtggtgtttgtggacgaggtgccaaaaggcctgacaggcaagctggacgcccggaagatcagagagatcctgattaaggccaagaaaggcggcaagatcgccgtgtaatagctaactagacaaaacaccaaacaaacaagctgcgagccacggacttaaataattgagccttaaagaagaaattctttaagtggatgctctcaaactcagggaaacctaaatctagttatagacaaggcaatcctgagccaaaaaaacaaccaaaaaaaatctagatatcggatcccggg

SEQ ID NO: 3325 - DNA, 2831 bp, synthetic construct
  source 1..2831: mol_type = other DNA; note = Ana1.104
taatacgactcactatagggagaccctcgaaaaaaaacacaaacaccccgaagtagtaattagtaagttaacaatagatgacttacaactaatcggaaggtgcagagactcgacgggagctaccctaacgtcaagacgagggtaaagagagagtccaattctcaaagccaataggcagtagcgaaagctgcaagagaatgaaaatccgtggctcgcagcaaacaccaaacaaaacaaacacaaaccaacaaaaattaaaacagcctgtgggttgatcccacccacaggcccattgggcgctagcactctggtatcacggtacctttgtgcgcctgttttataccccctcccccaactgtaacttagaagtaacacacaccgatcaacagtcagcgtggcacaccagccacgttttgatcaagcacttctgttaccccggactgagtatcaatagactgctcacgcggttgaaggagaaagcgttcgttatccggccaactacttcgaaaaacctagtaacaccgtggaagttgcagagtgtttcgctcagcactaccccagtgtagatcaggtcgatgagtcaccgcattccccacgggcgaccgtggcggtggctgcgttggcggcctgcccatggggaaacccatgggacgctctaatacagacatggtgcgaagagtctattgagctagttggtagtcctccggcccctgaatgcggctaatcctaactgcggagcacacaccctcaagccagagggcagtgtgtcgtaacgggcaactctgcagcggaaccgactactttgggtgtccgtgtttcattttattcctatactggctgcttatggtgacaattgagagatcgttaccatatagctattggattggccatccggtgactaatagagctattatatatccctttgttgggtttataccacttagcttgaaagaggttaaaacattacaattcattgttaagttgaatacagcaaaatggaagatgccaagaacatcaagaagggccctgctccattctaccctctggaagatggaacagccggcgagcagctgcacaaggccatgaagagatatgccctggtgcctggcacaatcgccttcacagatgcccacatcgaggtggacatcacctacgccgagtacttcgagatgtctgtgcggctggccgaagctatgaagcgctacggcctgaacaccaaccaccggatcgtcgtgtgcagcgagaacagcctgcagttcttcatgcctgtgctgggcgccctgttcatcggagttgctgtggcccctgccaacgacatctacaacgagcgcgagctgctgaacagcatgggcatctctcagcccaccgtggtgttcgtgtccaagaagggactgcagaaaatcctgaacgtgcagaagaagctgcccatcatccagaaaatcatcatcatggacagcaagaccgactaccagggcttccagagcatgtacaccttcgtgaccagccatctgccacctggcttcaacgagtacgacttcgtgcccgagagcttcgaccgggacaagacaatcgccctgatcatgaacagcagcggctctaccggactgcccaaaggtgttgccctgcctcatagaactgcctgcgtgcggtttagccacgccagagatcccatcttcggcaaccagatcatccccgacacagccatcctgagcgtggtgccttttcaccacggcttcggcatgttcaccacactgggctacctgatctgcggcttcagagtggtgctgatgtaccgcttcgaggaagaactgttcctgcggagcctgcaggactacaagatccagtctgctctgctggtgcctactctgttcagcttctttgccaagagcaccctgatcgataagtacgacctgagcaacctgcacgagatcgcctctggcggagcccctctgtctaaagaagtgggagaagccgtcgccaagcggttccatctgcctggcatcagacaaggctatggcctgaccgagacaaccagcgccattctgattacccctgagggcgacgataagcctggcgctgtgggaaaagtggtgccattcttcgaggccaaggtggtggatctggacaccggcaaaacactgggcgttaaccagaggggcgagctgtgtgttagaggccctatgatcatgagcggctacgtgaacaaccccgaggccacaaacgctctgatcgacaaggatggatggctgcacagcggcgacattgcctactgggacgaagatgagcacttcttcatcgtggaccggctgaagtccctgatcaagtacaagggctaccaggtggccccagccgagctggaatctattctgctgcaacaccccaacatcttcgatgccggcgttgcaggactgcccgatgatgatgctggcgaactgccagctgctgtggtggtgctggaacacggcaagaccatgaccgagaaagaaatcgtggactacgtggccagccaagtgaccaccgccaagaaactgagaggcggcgtggtgtttgtggacgaggtgccaaaaggcctgacaggcaagctggacgcccggaagatcagagagatcctgattaaggccaagaaaggcggcaagatcgccgtgtaatagctaactagacaaaacaccaaacaaacaagctgcgagccacggacttaaataattgagccttaaagaagaaattctttaagtggatgctctcaaactcagggaaacctaaatctagttatagacaaggcaatcctgagccaagaaaaacaaccaaaaaaaatctagatatcggatcccggg

SEQ ID NO: 3326 - DNA, 2831 bp, synthetic construct
  source 1..2831: mol_type = other DNA; note = Ana1.105
taatacgactcactatagggagaccctcgaaaaaaaacacaaacacccgaagtagtaattagtaagttaacaatagatgacttacaactaatcggaaggtgcagagactcgacgggagctaccctaacgtcaagacgagggtaaagagagagtccaattctcaaagccaataggcagtagcgaaagctgcaagagaatgaaaatccgtggctcgcagcaaacaccaaacaaaacaaacacaaaccaacaaaaattaaaacagcctgtgggttgatcccacccacaggcccattgggcgctagcactctggtatcacggtacctttgtgcgcctgttttataccccctcccccaactgtaacttagaagtaacacacaccgatcaacagtcagcgtggcacaccagccacgttttgatcaagcacttctgttaccccggactgagtatcaatagactgctcacgcggttgaaggagaaagcgttcgttatccggccaactacttcgaaaaacctagtaacaccgtggaagttgcagagtgtttcgctcagcactaccccagtgtagatcaggtcgatgagtcaccgcattccccacgggcgaccgtggcggtggctgcgttggcggcctgcccatggggaaacccatgggacgctctaatacagacatggtgcgaagagtctattgagctagttggtagtcctccggcccctgaatgcggctaatcctaactgcggagcacacaccctcaagccagagggcagtgtgtcgtaacgggcaactctgcagcggaaccgactactttgggtgtccgtgtttcattttattcctatactggctgcttatggtgacaattgagagatcgttaccatatagctattggattggccatccggtgactaatagagctattatatatccctttgttgggtttataccacttagcttgaaagaggttaaaacattacaattcattgttaagttgaatacagcaaaatggaagatgccaagaacatcaagaagggccctgctccattctaccctctggaagatggaacagccggcgagcagctgcacaaggccatgaagagatatgccctggtgcctggcacaatcgccttcacagatgcccacatcgaggtggacatcacctacgccgagtacttcgagatgtctgtgcggctggccgaagctatgaagcgctacggcctgaacaccaaccaccggatcgtcgtgtgcagcgagaacagcctgcagttcttcatgcctgtgctgggcgccctgttcatcggagttgctgtggcccctgccaacgacatctacaacgagcgcgagctgctgaacagcatgggcatctctcagcccaccgtggtgttcgtgtccaagaagggactgcagaaaatcctgaacgtgcagaagaagctgcccatcatccagaaaatcatcatcatggacagcaagaccgactaccagggcttccagagcatgtacaccttcgtgaccagccatctgccacctggcttcaacgagtacgacttcgtgcccgagagcttcgaccgggacaagacaatcgccctgatcatgaacagcagcggctctaccggactgcccaaaggtgttgccctgcctcatagaactgcctgcgtgcggtttagccacgccagagatcccatcttcggcaaccagatcatccccgacacagccatcctgagcgtggtgccttttcaccacggcttcggcatgttcaccacactgggctacctgatctgcggcttcagagtggtgctgatgtaccgcttcgaggaagaactgttcctgcggagcctgcaggactacaagatccagtctgctctgctggtgcctactctgttcagcttctttgccaagagcaccctgatcgataagtacgacctgagcaacctgcacgagatcgcctctggcggagcccctctgtctaaagaagtgggagaagccgtcgccaagcggttccatctgcctggcatcagacaaggctatggcctgaccgagacaaccagcgccattctgattacccctgagggcgacgataagcctggcgctgtgggaaaagtggtgccattcttcgaggccaaggtggtggatctggacaccggcaaaacactgggcgttaaccagaggggcgagctgtgtgttagaggccctatgatcatgagcggctacgtgaacaaccccgaggccacaaacgctctgatcgacaaggatggatggctgcacagcggcgacattgcctactgggacgaagatgagcacttcttcatcgtggaccggctgaagtccctgatcaagtacaagggctaccaggtggccccagccgagctggaatctattctgctgcaacaccccaacatcttcgatgccggcgttgcaggactgcccgatgatgatgctggcgaactgccagctgctgtggtggtgctggaacacggcaagaccatgaccgagaaagaaatcgtggactacgtggccagccaagtgaccaccgccaagaaactgagaggcggcgtggtgtttgtggacgaggtgccaaaaggcctgacaggcaagctggacgcccggaagatcagagagatcctgattaaggccaagaaaggcggcaagatcgccgtgtaatagctaactagacaaaacaccaaacaaacaagctgcgagccacggacttaaataattgagccttaaagaagaaattctttaagtggatgctctcaaactcagggaaacctaaatctagttatagacaaggcaatcctgagccaagcaaaaacaaccaaaaaaaatctagatatcggatcccggg

SEQ ID NO: 3327 - DNA, 2831 bp, synthetic construct
  source 1..2831: mol_type = other DNA; note = Ana1.106
taatacgactcactatagggagaccctcgaaaaaaaacacaaacaccgaagtagtaattagtaagttaacaatagatgacttacaactaatcggaaggtgcagagactcgacgggagctaccctaacgtcaagacgagggtaaagagagagtccaattctcaaagccaataggcagtagcgaaagctgcaagagaatgaaaatccgtggctcgcagcaaacaccaaacaaaacaaacacaaaccaacaaaaattaaaacagcctgtgggttgatcccacccacaggcccattgggcgctagcactctggtatcacggtacctttgtgcgcctgttttataccccctcccccaactgtaacttagaagtaacacacaccgatcaacagtcagcgtggcacaccagccacgttttgatcaagcacttctgttaccccggactgagtatcaatagactgctcacgcggttgaaggagaaagcgttcgttatccggccaactacttcgaaaaacctagtaacaccgtggaagttgcagagtgtttcgctcagcactaccccagtgtagatcaggtcgatgagtcaccgcattccccacgggcgaccgtggcggtggctgcgttggcggcctgcccatggggaaacccatgggacgctctaatacagacatggtgcgaagagtctattgagctagttggtagtcctccggcccctgaatgcggctaatcctaactgcggagcacacaccctcaagccagagggcagtgtgtcgtaacgggcaactctgcagcggaaccgactactttgggtgtccgtgtttcattttattcctatactggctgcttatggtgacaattgagagatcgttaccatatagctattggattggccatccggtgactaatagagctattatatatccctttgttgggtttataccacttagcttgaaagaggttaaaacattacaattcattgttaagttgaatacagcaaaatggaagatgccaagaacatcaagaagggccctgctccattctaccctctggaagatggaacagccggcgagcagctgcacaaggccatgaagagatatgccctggtgcctggcacaatcgccttcacagatgcccacatcgaggtggacatcacctacgccgagtacttcgagatgtctgtgcggctggccgaagctatgaagcgctacggcctgaacaccaaccaccggatcgtcgtgtgcagcgagaacagcctgcagttcttcatgcctgtgctgggcgccctgttcatcggagttgctgtggcccctgccaacgacatctacaacgagcgcgagctgctgaacagcatgggcatctctcagcccaccgtggtgttcgtgtccaagaagggactgcagaaaatcctgaacgtgcagaagaagctgcccatcatccagaaaatcatcatcatggacagcaagaccgactaccagggcttccagagcatgtacaccttcgtgaccagccatctgccacctggcttcaacgagtacgacttcgtgcccgagagcttcgaccgggacaagacaatcgccctgatcatgaacagcagcggctctaccggactgcccaaaggtgttgccctgcctcatagaactgcctgcgtgcggtttagccacgccagagatcccatcttcggcaaccagatcatccccgacacagccatcctgagcgtggtgccttttcaccacggcttcggcatgttcaccacactgggctacctgatctgcggcttcagagtggtgctgatgtaccgcttcgaggaagaactgttcctgcggagcctgcaggactacaagatccagtctgctctgctggtgcctactctgttcagcttctttgccaagagcaccctgatcgataagtacgacctgagcaacctgcacgagatcgcctctggcggagcccctctgtctaaagaagtgggagaagccgtcgccaagcggttccatctgcctggcatcagacaaggctatggcctgaccgagacaaccagcgccattctgattacccctgagggcgacgataagcctggcgctgtgggaaaagtggtgccattcttcgaggccaaggtggtggatctggacaccggcaaaacactgggcgttaaccagaggggcgagctgtgtgttagaggccctatgatcatgagcggctacgtgaacaaccccgaggccacaaacgctctgatcgacaaggatggatggctgcacagcggcgacattgcctactgggacgaagatgagcacttcttcatcgtggaccggctgaagtccctgatcaagtacaagggctaccaggtggccccagccgagctggaatctattctgctgcaacaccccaacatcttcgatgccggcgttgcaggactgcccgatgatgatgctggcgaactgccagctgctgtggtggtgctggaacacggcaagaccatgaccgagaaagaaatcgtggactacgtggccagccaagtgaccaccgccaagaaactgagaggcggcgtggtgtttgtggacgaggtgccaaaaggcctgacaggcaagctggacgcccggaagatcagagagatcctgattaaggccaagaaaggcggcaagatcgccgtgtaatagctaactagacaaaacaccaaacaaacaagctgcgagccacggacttaaataattgagccttaaagaagaaattctttaagtggatgctctcaaactcagggaaacctaaatctagttatagacaaggcaatcctgagccaagccaaaaacaaccaaaaaaaatctagatatcggatcccggg

SEQ ID NO: 3328 - DNA, 2831 bp, synthetic construct
  source 1..2831: mol_type = other DNA; note = Ana1.107
taatacgactcactatagggagaccctcgaaaaaaaacacaaacaccaagtagtaattagtaagttaacaatagatgacttacaactaatcggaaggtgcagagactcgacgggagctaccctaacgtcaagacgagggtaaagagagagtccaattctcaaagccaataggcagtagcgaaagctgcaagagaatgaaaatccgtggctcgcagcaaacaccaaacaaaacaaacacaaaccaacaaaaattaaaacagcctgtgggttgatcccacccacaggcccattgggcgctagcactctggtatcacggtacctttgtgcgcctgttttataccccctcccccaactgtaacttagaagtaacacacaccgatcaacagtcagcgtggcacaccagccacgttttgatcaagcacttctgttaccccggactgagtatcaatagactgctcacgcggttgaaggagaaagcgttcgttatccggccaactacttcgaaaaacctagtaacaccgtggaagttgcagagtgtttcgctcagcactaccccagtgtagatcaggtcgatgagtcaccgcattccccacgggcgaccgtggcggtggctgcgttggcggcctgcccatggggaaacccatgggacgctctaatacagacatggtgcgaagagtctattgagctagttggtagtcctccggcccctgaatgcggctaatcctaactgcggagcacacaccctcaagccagagggcagtgtgtcgtaacgggcaactctgcagcggaaccgactactttgggtgtccgtgtttcattttattcctatactggctgcttatggtgacaattgagagatcgttaccatatagctattggattggccatccggtgactaatagagctattatatatccctttgttgggtttataccacttagcttgaaagaggttaaaacattacaattcattgttaagttgaatacagcaaaatggaagatgccaagaacatcaagaagggccctgctccattctaccctctggaagatggaacagccggcgagcagctgcacaaggccatgaagagatatgccctggtgcctggcacaatcgccttcacagatgcccacatcgaggtggacatcacctacgccgagtacttcgagatgtctgtgcggctggccgaagctatgaagcgctacggcctgaacaccaaccaccggatcgtcgtgtgcagcgagaacagcctgcagttcttcatgcctgtgctgggcgccctgttcatcggagttgctgtggcccctgccaacgacatctacaacgagcgcgagctgctgaacagcatgggcatctctcagcccaccgtggtgttcgtgtccaagaagggactgcagaaaatcctgaacgtgcagaagaagctgcccatcatccagaaaatcatcatcatggacagcaagaccgactaccagggcttccagagcatgtacaccttcgtgaccagccatctgccacctggcttcaacgagtacgacttcgtgcccgagagcttcgaccgggacaagacaatcgccctgatcatgaacagcagcggctctaccggactgcccaaaggtgttgccctgcctcatagaactgcctgcgtgcggtttagccacgccagagatcccatcttcggcaaccagatcatccccgacacagccatcctgagcgtggtgccttttcaccacggcttcggcatgttcaccacactgggctacctgatctgcggcttcagagtggtgctgatgtaccgcttcgaggaagaactgttcctgcggagcctgcaggactacaagatccagtctgctctgctggtgcctactctgttcagcttctttgccaagagcaccctgatcgataagtacgacctgagcaacctgcacgagatcgcctctggcggagcccctctgtctaaagaagtgggagaagccgtcgccaagcggttccatctgcctggcatcagacaaggctatggcctgaccgagacaaccagcgccattctgattacccctgagggcgacgataagcctggcgctgtgggaaaagtggtgccattcttcgaggccaaggtggtggatctggacaccggcaaaacactgggcgttaaccagaggggcgagctgtgtgttagaggccctatgatcatgagcggctacgtgaacaaccccgaggccacaaacgctctgatcgacaaggatggatggctgcacagcggcgacattgcctactgggacgaagatgagcacttcttcatcgtggaccggctgaagtccctgatcaagtacaagggctaccaggtggccccagccgagctggaatctattctgctgcaacaccccaacatcttcgatgccggcgttgcaggactgcccgatgatgatgctggcgaactgccagctgctgtggtggtgctggaacacggcaagaccatgaccgagaaagaaatcgtggactacgtggccagccaagtgaccaccgccaagaaactgagaggcggcgtggtgtttgtggacgaggtgccaaaaggcctgacaggcaagctggacgcccggaagatcagagagatcctgattaaggccaagaaaggcggcaagatcgccgtgtaatagctaactagacaaaacaccaaacaaacaagctgcgagccacggacttaaataattgagccttaaagaagaaattctttaagtggatgctctcaaactcagggaaacctaaatctagttatagacaaggcaatcctgagccaagccgaaaaacaaccaaaaaaaatctagatatcggatcccggg

SEQ ID NO: 3329 - DNA, 2831 bp, synthetic construct
  source 1..2831: mol_type = other DNA; note = Ana1.108
taatacgactcactatagggagaccctcgaaaaaaaacacaaacaccagtagtaattagtaagttaacaatagatgacttacaactaatcggaaggtgcagagactcgacgggagctaccctaacgtcaagacgagggtaaagagagagtccaattctcaaagccaataggcagtagcgaaagctgcaagagaatgaaaatccgtggctcgcagcaaacaccaaacaaaacaaacacaaaccaacaaaaattaaaacagcctgtgggttgatcccacccacaggcccattgggcgctagcactctggtatcacggtacctttgtgcgcctgttttataccccctcccccaactgtaacttagaagtaacacacaccgatcaacagtcagcgtggcacaccagccacgttttgatcaagcacttctgttaccccggactgagtatcaatagactgctcacgcggttgaaggagaaagcgttcgttatccggccaactacttcgaaaaacctagtaacaccgtggaagttgcagagtgtttcgctcagcactaccccagtgtagatcaggtcgatgagtcaccgcattccccacgggcgaccgtggcggtggctgcgttggcggcctgcccatggggaaacccatgggacgctctaatacagacatggtgcgaagagtctattgagctagttggtagtcctccggcccctgaatgcggctaatcctaactgcggagcacacaccctcaagccagagggcagtgtgtcgtaacgggcaactctgcagcggaaccgactactttgggtgtccgtgtttcattttattcctatactggctgcttatggtgacaattgagagatcgttaccatatagctattggattggccatccggtgactaatagagctattatatatccctttgttgggtttataccacttagcttgaaagaggttaaaacattacaattcattgttaagttgaatacagcaaaatggaagatgccaagaacatcaagaagggccctgctccattctaccctctggaagatggaacagccggcgagcagctgcacaaggccatgaagagatatgccctggtgcctggcacaatcgccttcacagatgcccacatcgaggtggacatcacctacgccgagtacttcgagatgtctgtgcggctggccgaagctatgaagcgctacggcctgaacaccaaccaccggatcgtcgtgtgcagcgagaacagcctgcagttcttcatgcctgtgctgggcgccctgttcatcggagttgctgtggcccctgccaacgacatctacaacgagcgcgagctgctgaacagcatgggcatctctcagcccaccgtggtgttcgtgtccaagaagggactgcagaaaatcctgaacgtgcagaagaagctgcccatcatccagaaaatcatcatcatggacagcaagaccgactaccagggcttccagagcatgtacaccttcgtgaccagccatctgccacctggcttcaacgagtacgacttcgtgcccgagagcttcgaccgggacaagacaatcgccctgatcatgaacagcagcggctctaccggactgcccaaaggtgttgccctgcctcatagaactgcctgcgtgcggtttagccacgccagagatcccatcttcggcaaccagatcatccccgacacagccatcctgagcgtggtgccttttcaccacggcttcggcatgttcaccacactgggctacctgatctgcggcttcagagtggtgctgatgtaccgcttcgaggaagaactgttcctgcggagcctgcaggactacaagatccagtctgctctgctggtgcctactctgttcagcttctttgccaagagcaccctgatcgataagtacgacctgagcaacctgcacgagatcgcctctggcggagcccctctgtctaaagaagtgggagaagccgtcgccaagcggttccatctgcctggcatcagacaaggctatggcctgaccgagacaaccagcgccattctgattacccctgagggcgacgataagcctggcgctgtgggaaaagtggtgccattcttcgaggccaaggtggtggatctggacaccggcaaaacactgggcgttaaccagaggggcgagctgtgtgttagaggccctatgatcatgagcggctacgtgaacaaccccgaggccacaaacgctctgatcgacaaggatggatggctgcacagcggcgacattgcctactgggacgaagatgagcacttcttcatcgtggaccggctgaagtccctgatcaagtacaagggctaccaggtggccccagccgagctggaatctattctgctgcaacaccccaacatcttcgatgccggcgttgcaggactgcccgatgatgatgctggcgaactgccagctgctgtggtggtgctggaacacggcaagaccatgaccgagaaagaaatcgtggactacgtggccagccaagtgaccaccgccaagaaactgagaggcggcgtggtgtttgtggacgaggtgccaaaaggcctgacaggcaagctggacgcccggaagatcagagagatcctgattaaggccaagaaaggcggcaagatcgccgtgtaatagctaactagacaaaacaccaaacaaacaagctgcgagccacggacttaaataattgagccttaaagaagaaattctttaagtggatgctctcaaactcagggaaacctaaatctagttatagacaaggcaatcctgagccaagccgaaaaaacaaccaaaaaaaatctagatatcggatcccggg

SEQ ID NO: 3330 - DNA, 2831 bp, synthetic construct
  source 1..2831: mol_type = other DNA; note = Ana1.109
taatacgactcactatagggagaccctcgaaaaaaaacacaaacaccgtagtaattagtaagttaacaatagatgacttacaactaatcggaaggtgcagagactcgacgggagctaccctaacgtcaagacgagggtaaagagagagtccaattctcaaagccaataggcagtagcgaaagctgcaagagaatgaaaatccgtggctcgcagcaaacaccaaacaaaacaaacacaaaccaacaaaaattaaaacagcctgtgggttgatcccacccacaggcccattgggcgctagcactctggtatcacggtacctttgtgcgcctgttttataccccctcccccaactgtaacttagaagtaacacacaccgatcaacagtcagcgtggcacaccagccacgttttgatcaagcacttctgttaccccggactgagtatcaatagactgctcacgcggttgaaggagaaagcgttcgttatccggccaactacttcgaaaaacctagtaacaccgtggaagttgcagagtgtttcgctcagcactaccccagtgtagatcaggtcgatgagtcaccgcattccccacgggcgaccgtggcggtggctgcgttggcggcctgcccatggggaaacccatgggacgctctaatacagacatggtgcgaagagtctattgagctagttggtagtcctccggcccctgaatgcggctaatcctaactgcggagcacacaccctcaagccagagggcagtgtgtcgtaacgggcaactctgcagcggaaccgactactttgggtgtccgtgtttcattttattcctatactggctgcttatggtgacaattgagagatcgttaccatatagctattggattggccatccggtgactaatagagctattatatatccctttgttgggtttataccacttagcttgaaagaggttaaaacattacaattcattgttaagttgaatacagcaaaatggaagatgccaagaacatcaagaagggccctgctccattctaccctctggaagatggaacagccggcgagcagctgcacaaggccatgaagagatatgccctggtgcctggcacaatcgccttcacagatgcccacatcgaggtggacatcacctacgccgagtacttcgagatgtctgtgcggctggccgaagctatgaagcgctacggcctgaacaccaaccaccggatcgtcgtgtgcagcgagaacagcctgcagttcttcatgcctgtgctgggcgccctgttcatcggagttgctgtggcccctgccaacgacatctacaacgagcgcgagctgctgaacagcatgggcatctctcagcccaccgtggtgttcgtgtccaagaagggactgcagaaaatcctgaacgtgcagaagaagctgcccatcatccagaaaatcatcatcatggacagcaagaccgactaccagggcttccagagcatgtacaccttcgtgaccagccatctgccacctggcttcaacgagtacgacttcgtgcccgagagcttcgaccgggacaagacaatcgccctgatcatgaacagcagcggctctaccggactgcccaaaggtgttgccctgcctcatagaactgcctgcgtgcggtttagccacgccagagatcccatcttcggcaaccagatcatccccgacacagccatcctgagcgtggtgccttttcaccacggcttcggcatgttcaccacactgggctacctgatctgcggcttcagagtggtgctgatgtaccgcttcgaggaagaactgttcctgcggagcctgcaggactacaagatccagtctgctctgctggtgcctactctgttcagcttctttgccaagagcaccctgatcgataagtacgacctgagcaacctgcacgagatcgcctctggcggagcccctctgtctaaagaagtgggagaagccgtcgccaagcggttccatctgcctggcatcagacaaggctatggcctgaccgagacaaccagcgccattctgattacccctgagggcgacgataagcctggcgctgtgggaaaagtggtgccattcttcgaggccaaggtggtggatctggacaccggcaaaacactgggcgttaaccagaggggcgagctgtgtgttagaggccctatgatcatgagcggctacgtgaacaaccccgaggccacaaacgctctgatcgacaaggatggatggctgcacagcggcgacattgcctactgggacgaagatgagcacttcttcatcgtggaccggctgaagtccctgatcaagtacaagggctaccaggtggccccagccgagctggaatctattctgctgcaacaccccaacatcttcgatgccggcgttgcaggactgcccgatgatgatgctggcgaactgccagctgctgtggtggtgctggaacacggcaagaccatgaccgagaaagaaatcgtggactacgtggccagccaagtgaccaccgccaagaaactgagaggcggcgtggtgtttgtggacgaggtgccaaaaggcctgacaggcaagctggacgcccggaagatcagagagatcctgattaaggccaagaaaggcggcaagatcgccgtgtaatagctaactagacaaaacaccaaacaaacaagctgcgagccacggacttaaataattgagccttaaagaagaaattctttaagtggatgctctcaaactcagggaaacctaaatctagttatagacaaggcaatcctgagccaagccgaaaaaaacaaccaaaaaaaatctagatatcggatcccggg

SEQ ID NO: 3331 - DNA, 2831 bp, synthetic construct
  source 1..2831: mol_type = other DNA; note = Ana1.110
taatacgactcactatagggagaccctcgaaaaaaaacacaaacacctagtaattagtaagttaacaatagatgacttacaactaatcggaaggtgcagagactcgacgggagctaccctaacgtcaagacgagggtaaagagagagtccaattctcaaagccaataggcagtagcgaaagctgcaagagaatgaaaatccgtggctcgcagcaaacaccaaacaaaacaaacacaaaccaacaaaaattaaaacagcctgtgggttgatcccacccacaggcccattgggcgctagcactctggtatcacggtacctttgtgcgcctgttttataccccctcccccaactgtaacttagaagtaacacacaccgatcaacagtcagcgtggcacaccagccacgttttgatcaagcacttctgttaccccggactgagtatcaatagactgctcacgcggttgaaggagaaagcgttcgttatccggccaactacttcgaaaaacctagtaacaccgtggaagttgcagagtgtttcgctcagcactaccccagtgtagatcaggtcgatgagtcaccgcattccccacgggcgaccgtggcggtggctgcgttggcggcctgcccatggggaaacccatgggacgctctaatacagacatggtgcgaagagtctattgagctagttggtagtcctccggcccctgaatgcggctaatcctaactgcggagcacacaccctcaagccagagggcagtgtgtcgtaacgggcaactctgcagcggaaccgactactttgggtgtccgtgtttcattttattcctatactggctgcttatggtgacaattgagagatcgttaccatatagctattggattggccatccggtgactaatagagctattatatatccctttgttgggtttataccacttagcttgaaagaggttaaaacattacaattcattgttaagttgaatacagcaaaatggaagatgccaagaacatcaagaagggccctgctccattctaccctctggaagatggaacagccggcgagcagctgcacaaggccatgaagagatatgccctggtgcctggcacaatcgccttcacagatgcccacatcgaggtggacatcacctacgccgagtacttcgagatgtctgtgcggctggccgaagctatgaagcgctacggcctgaacaccaaccaccggatcgtcgtgtgcagcgagaacagcctgcagttcttcatgcctgtgctgggcgccctgttcatcggagttgctgtggcccctgccaacgacatctacaacgagcgcgagctgctgaacagcatgggcatctctcagcccaccgtggtgttcgtgtccaagaagggactgcagaaaatcctgaacgtgcagaagaagctgcccatcatccagaaaatcatcatcatggacagcaagaccgactaccagggcttccagagcatgtacaccttcgtgaccagccatctgccacctggcttcaacgagtacgacttcgtgcccgagagcttcgaccgggacaagacaatcgccctgatcatgaacagcagcggctctaccggactgcccaaaggtgttgccctgcctcatagaactgcctgcgtgcggtttagccacgccagagatcccatcttcggcaaccagatcatccccgacacagccatcctgagcgtggtgccttttcaccacggcttcggcatgttcaccacactgggctacctgatctgcggcttcagagtggtgctgatgtaccgcttcgaggaagaactgttcctgcggagcctgcaggactacaagatccagtctgctctgctggtgcctactctgttcagcttctttgccaagagcaccctgatcgataagtacgacctgagcaacctgcacgagatcgcctctggcggagcccctctgtctaaagaagtgggagaagccgtcgccaagcggttccatctgcctggcatcagacaaggctatggcctgaccgagacaaccagcgccattctgattacccctgagggcgacgataagcctggcgctgtgggaaaagtggtgccattcttcgaggccaaggtggtggatctggacaccggcaaaacactgggcgttaaccagaggggcgagctgtgtgttagaggccctatgatcatgagcggctacgtgaacaaccccgaggccacaaacgctctgatcgacaaggatggatggctgcacagcggcgacattgcctactgggacgaagatgagcacttcttcatcgtggaccggctgaagtccctgatcaagtacaagggctaccaggtggccccagccgagctggaatctattctgctgcaacaccccaacatcttcgatgccggcgttgcaggactgcccgatgatgatgctggcgaactgccagctgctgtggtggtgctggaacacggcaagaccatgaccgagaaagaaatcgtggactacgtggccagccaagtgaccaccgccaagaaactgagaggcggcgtggtgtttgtggacgaggtgccaaaaggcctgacaggcaagctggacgcccggaagatcagagagatcctgattaaggccaagaaaggcggcaagatcgccgtgtaatagctaactagacaaaacaccaaacaaacaagctgcgagccacggacttaaataattgagccttaaagaagaaattctttaagtggatgctctcaaactcagggaaacctaaatctagttatagacaaggcaatcctgagccaagccgaagaaaaacaaccaaaaaaaatctagatatcggatcccggg

SEQ ID NO: 3332 - DNA, 2831 bp, synthetic construct
  source 1..2831: mol_type = other DNA; note = Ana1.111
taatacgactcactatagggagaccctcgaaaaaaaacacaaacaccagtaattagtaagttaacaatagatgacttacaactaatcggaaggtgcagagactcgacgggagctaccctaacgtcaagacgagggtaaagagagagtccaattctcaaagccaataggcagtagcgaaagctgcaagagaatgaaaatccgtggctcgcagcaaacaccaaacaaaacaaacacaaaccaacaaaaattaaaacagcctgtgggttgatcccacccacaggcccattgggcgctagcactctggtatcacggtacctttgtgcgcctgttttataccccctcccccaactgtaacttagaagtaacacacaccgatcaacagtcagcgtggcacaccagccacgttttgatcaagcacttctgttaccccggactgagtatcaatagactgctcacgcggttgaaggagaaagcgttcgttatccggccaactacttcgaaaaacctagtaacaccgtggaagttgcagagtgtttcgctcagcactaccccagtgtagatcaggtcgatgagtcaccgcattccccacgggcgaccgtggcggtggctgcgttggcggcctgcccatggggaaacccatgggacgctctaatacagacatggtgcgaagagtctattgagctagttggtagtcctccggcccctgaatgcggctaatcctaactgcggagcacacaccctcaagccagagggcagtgtgtcgtaacgggcaactctgcagcggaaccgactactttgggtgtccgtgtttcattttattcctatactggctgcttatggtgacaattgagagatcgttaccatatagctattggattggccatccggtgactaatagagctattatatatccctttgttgggtttataccacttagcttgaaagaggttaaaacattacaattcattgttaagttgaatacagcaaaatggaagatgccaagaacatcaagaagggccctgctccattctaccctctggaagatggaacagccggcgagcagctgcacaaggccatgaagagatatgccctggtgcctggcacaatcgccttcacagatgcccacatcgaggtggacatcacctacgccgagtacttcgagatgtctgtgcggctggccgaagctatgaagcgctacggcctgaacaccaaccaccggatcgtcgtgtgcagcgagaacagcctgcagttcttcatgcctgtgctgggcgccctgttcatcggagttgctgtggcccctgccaacgacatctacaacgagcgcgagctgctgaacagcatgggcatctctcagcccaccgtggtgttcgtgtccaagaagggactgcagaaaatcctgaacgtgcagaagaagctgcccatcatccagaaaatcatcatcatggacagcaagaccgactaccagggcttccagagcatgtacaccttcgtgaccagccatctgccacctggcttcaacgagtacgacttcgtgcccgagagcttcgaccgggacaagacaatcgccctgatcatgaacagcagcggctctaccggactgcccaaaggtgttgccctgcctcatagaactgcctgcgtgcggtttagccacgccagagatcccatcttcggcaaccagatcatccccgacacagccatcctgagcgtggtgccttttcaccacggcttcggcatgttcaccacactgggctacctgatctgcggcttcagagtggtgctgatgtaccgcttcgaggaagaactgttcctgcggagcctgcaggactacaagatccagtctgctctgctggtgcctactctgttcagcttctttgccaagagcaccctgatcgataagtacgacctgagcaacctgcacgagatcgcctctggcggagcccctctgtctaaagaagtgggagaagccgtcgccaagcggttccatctgcctggcatcagacaaggctatggcctgaccgagacaaccagcgccattctgattacccctgagggcgacgataagcctggcgctgtgggaaaagtggtgccattcttcgaggccaaggtggtggatctggacaccggcaaaacactgggcgttaaccagaggggcgagctgtgtgttagaggccctatgatcatgagcggctacgtgaacaaccccgaggccacaaacgctctgatcgacaaggatggatggctgcacagcggcgacattgcctactgggacgaagatgagcacttcttcatcgtggaccggctgaagtccctgatcaagtacaagggctaccaggtggccccagccgagctggaatctattctgctgcaacaccccaacatcttcgatgccggcgttgcaggactgcccgatgatgatgctggcgaactgccagctgctgtggtggtgctggaacacggcaagaccatgaccgagaaagaaatcgtggactacgtggccagccaagtgaccaccgccaagaaactgagaggcggcgtggtgtttgtggacgaggtgccaaaaggcctgacaggcaagctggacgcccggaagatcagagagatcctgattaaggccaagaaaggcggcaagatcgccgtgtaatagctaactagacaaaacaccaaacaaacaagctgcgagccacggacttaaataattgagccttaaagaagaaattctttaagtggatgctctcaaactcagggaaacctaaatctagttatagacaaggcaatcctgagccaagccgaagtaaaaacaaccaaaaaaaatctagatatcggatcccggg

SEQ ID NO: 3333 - DNA, 2831 bp, synthetic construct
  source 1..2831: mol_type = other DNA; note = Ana1.112
taatacgactcactatagggagaccctcgaaaaaaaacacaaacaccgtaattagtaagttaacaatagatgacttacaactaatcggaaggtgcagagactcgacgggagctaccctaacgtcaagacgagggtaaagagagagtccaattctcaaagccaataggcagtagcgaaagctgcaagagaatgaaaatccgtggctcgcagcaaacaccaaacaaaacaaacacaaaccaacaaaaattaaaacagcctgtgggttgatcccacccacaggcccattgggcgctagcactctggtatcacggtacctttgtgcgcctgttttataccccctcccccaactgtaacttagaagtaacacacaccgatcaacagtcagcgtggcacaccagccacgttttgatcaagcacttctgttaccccggactgagtatcaatagactgctcacgcggttgaaggagaaagcgttcgttatccggccaactacttcgaaaaacctagtaacaccgtggaagttgcagagtgtttcgctcagcactaccccagtgtagatcaggtcgatgagtcaccgcattccccacgggcgaccgtggcggtggctgcgttggcggcctgcccatggggaaacccatgggacgctctaatacagacatggtgcgaagagtctattgagctagttggtagtcctccggcccctgaatgcggctaatcctaactgcggagcacacaccctcaagccagagggcagtgtgtcgtaacgggcaactctgcagcggaaccgactactttgggtgtccgtgtttcattttattcctatactggctgcttatggtgacaattgagagatcgttaccatatagctattggattggccatccggtgactaatagagctattatatatccctttgttgggtttataccacttagcttgaaagaggttaaaacattacaattcattgttaagttgaatacagcaaaatggaagatgccaagaacatcaagaagggccctgctccattctaccctctggaagatggaacagccggcgagcagctgcacaaggccatgaagagatatgccctggtgcctggcacaatcgccttcacagatgcccacatcgaggtggacatcacctacgccgagtacttcgagatgtctgtgcggctggccgaagctatgaagcgctacggcctgaacaccaaccaccggatcgtcgtgtgcagcgagaacagcctgcagttcttcatgcctgtgctgggcgccctgttcatcggagttgctgtggcccctgccaacgacatctacaacgagcgcgagctgctgaacagcatgggcatctctcagcccaccgtggtgttcgtgtccaagaagggactgcagaaaatcctgaacgtgcagaagaagctgcccatcatccagaaaatcatcatcatggacagcaagaccgactaccagggcttccagagcatgtacaccttcgtgaccagccatctgccacctggcttcaacgagtacgacttcgtgcccgagagcttcgaccgggacaagacaatcgccctgatcatgaacagcagcggctctaccggactgcccaaaggtgttgccctgcctcatagaactgcctgcgtgcggtttagccacgccagagatcccatcttcggcaaccagatcatccccgacacagccatcctgagcgtggtgccttttcaccacggcttcggcatgttcaccacactgggctacctgatctgcggcttcagagtggtgctgatgtaccgcttcgaggaagaactgttcctgcggagcctgcaggactacaagatccagtctgctctgctggtgcctactctgttcagcttctttgccaagagcaccctgatcgataagtacgacctgagcaacctgcacgagatcgcctctggcggagcccctctgtctaaagaagtgggagaagccgtcgccaagcggttccatctgcctggcatcagacaaggctatggcctgaccgagacaaccagcgccattctgattacccctgagggcgacgataagcctggcgctgtgggaaaagtggtgccattcttcgaggccaaggtggtggatctggacaccggcaaaacactgggcgttaaccagaggggcgagctgtgtgttagaggccctatgatcatgagcggctacgtgaacaaccccgaggccacaaacgctctgatcgacaaggatggatggctgcacagcggcgacattgcctactgggacgaagatgagcacttcttcatcgtggaccggctgaagtccctgatcaagtacaagggctaccaggtggccccagccgagctggaatctattctgctgcaacaccccaacatcttcgatgccggcgttgcaggactgcccgatgatgatgctggcgaactgccagctgctgtggtggtgctggaacacggcaagaccatgaccgagaaagaaatcgtggactacgtggccagccaagtgaccaccgccaagaaactgagaggcggcgtggtgtttgtggacgaggtgccaaaaggcctgacaggcaagctggacgcccggaagatcagagagatcctgattaaggccaagaaaggcggcaagatcgccgtgtaatagctaactagacaaaacaccaaacaaacaagctgcgagccacggacttaaataattgagccttaaagaagaaattctttaagtggatgctctcaaactcagggaaacctaaatctagttatagacaaggcaatcctgagccaagccgaagtaaaaaacaaccaaaaaaaatctagatatcggatcccggg

SEQ ID NO: 3334 - DNA, 2831 bp, synthetic construct
  source 1..2831: mol_type = other DNA; note = Ana1.113
taatacgactcactatagggagaccctcgaaaaaaaacacaaacacctaattagtaagttaacaatagatgacttacaactaatcggaaggtgcagagactcgacgggagctaccctaacgtcaagacgagggtaaagagagagtccaattctcaaagccaataggcagtagcgaaagctgcaagagaatgaaaatccgtggctcgcagcaaacaccaaacaaaacaaacacaaaccaacaaaaattaaaacagcctgtgggttgatcccacccacaggcccattgggcgctagcactctggtatcacggtacctttgtgcgcctgttttataccccctcccccaactgtaacttagaagtaacacacaccgatcaacagtcagcgtggcacaccagccacgttttgatcaagcacttctgttaccccggactgagtatcaatagactgctcacgcggttgaaggagaaagcgttcgttatccggccaactacttcgaaaaacctagtaacaccgtggaagttgcagagtgtttcgctcagcactaccccagtgtagatcaggtcgatgagtcaccgcattccccacgggcgaccgtggcggtggctgcgttggcggcctgcccatggggaaacccatgggacgctctaatacagacatggtgcgaagagtctattgagctagttggtagtcctccggcccctgaatgcggctaatcctaactgcggagcacacaccctcaagccagagggcagtgtgtcgtaacgggcaactctgcagcggaaccgactactttgggtgtccgtgtttcattttattcctatactggctgcttatggtgacaattgagagatcgttaccatatagctattggattggccatccggtgactaatagagctattatatatccctttgttgggtttataccacttagcttgaaagaggttaaaacattacaattcattgttaagttgaatacagcaaaatggaagatgccaagaacatcaagaagggccctgctccattctaccctctggaagatggaacagccggcgagcagctgcacaaggccatgaagagatatgccctggtgcctggcacaatcgccttcacagatgcccacatcgaggtggacatcacctacgccgagtacttcgagatgtctgtgcggctggccgaagctatgaagcgctacggcctgaacaccaaccaccggatcgtcgtgtgcagcgagaacagcctgcagttcttcatgcctgtgctgggcgccctgttcatcggagttgctgtggcccctgccaacgacatctacaacgagcgcgagctgctgaacagcatgggcatctctcagcccaccgtggtgttcgtgtccaagaagggactgcagaaaatcctgaacgtgcagaagaagctgcccatcatccagaaaatcatcatcatggacagcaagaccgactaccagggcttccagagcatgtacaccttcgtgaccagccatctgccacctggcttcaacgagtacgacttcgtgcccgagagcttcgaccgggacaagacaatcgccctgatcatgaacagcagcggctctaccggactgcccaaaggtgttgccctgcctcatagaactgcctgcgtgcggtttagccacgccagagatcccatcttcggcaaccagatcatccccgacacagccatcctgagcgtggtgccttttcaccacggcttcggcatgttcaccacactgggctacctgatctgcggcttcagagtggtgctgatgtaccgcttcgaggaagaactgttcctgcggagcctgcaggactacaagatccagtctgctctgctggtgcctactctgttcagcttctttgccaagagcaccctgatcgataagtacgacctgagcaacctgcacgagatcgcctctggcggagcccctctgtctaaagaagtgggagaagccgtcgccaagcggttccatctgcctggcatcagacaaggctatggcctgaccgagacaaccagcgccattctgattacccctgagggcgacgataagcctggcgctgtgggaaaagtggtgccattcttcgaggccaaggtggtggatctggacaccggcaaaacactgggcgttaaccagaggggcgagctgtgtgttagaggccctatgatcatgagcggctacgtgaacaaccccgaggccacaaacgctctgatcgacaaggatggatggctgcacagcggcgacattgcctactgggacgaagatgagcacttcttcatcgtggaccggctgaagtccctgatcaagtacaagggctaccaggtggccccagccgagctggaatctattctgctgcaacaccccaacatcttcgatgccggcgttgcaggactgcccgatgatgatgctggcgaactgccagctgctgtggtggtgctggaacacggcaagaccatgaccgagaaagaaatcgtggactacgtggccagccaagtgaccaccgccaagaaactgagaggcggcgtggtgtttgtggacgaggtgccaaaaggcctgacaggcaagctggacgcccggaagatcagagagatcctgattaaggccaagaaaggcggcaagatcgccgtgtaatagctaactagacaaaacaccaaacaaacaagctgcgagccacggacttaaataattgagccttaaagaagaaattctttaagtggatgctctcaaactcagggaaacctaaatctagttatagacaaggcaatcctgagccaagccgaagtagaaaaacaaccaaaaaaaatctagatatcggatcccggg

SEQ ID NO: 3335 - DNA, 2831 bp, synthetic construct
  source 1..2831: mol_type = other DNA; note = Ana1.114
taatacgactcactatagggagaccctcgaaaaaaaacacaaacaccaattagtaagttaacaatagatgacttacaactaatcggaaggtgcagagactcgacgggagctaccctaacgtcaagacgagggtaaagagagagtccaattctcaaagccaataggcagtagcgaaagctgcaagagaatgaaaatccgtggctcgcagcaaacaccaaacaaaacaaacacaaaccaacaaaaattaaaacagcctgtgggttgatcccacccacaggcccattgggcgctagcactctggtatcacggtacctttgtgcgcctgttttataccccctcccccaactgtaacttagaagtaacacacaccgatcaacagtcagcgtggcacaccagccacgttttgatcaagcacttctgttaccccggactgagtatcaatagactgctcacgcggttgaaggagaaagcgttcgttatccggccaactacttcgaaaaacctagtaacaccgtggaagttgcagagtgtttcgctcagcactaccccagtgtagatcaggtcgatgagtcaccgcattccccacgggcgaccgtggcggtggctgcgttggcggcctgcccatggggaaacccatgggacgctctaatacagacatggtgcgaagagtctattgagctagttggtagtcctccggcccctgaatgcggctaatcctaactgcggagcacacaccctcaagccagagggcagtgtgtcgtaacgggcaactctgcagcggaaccgactactttgggtgtccgtgtttcattttattcctatactggctgcttatggtgacaattgagagatcgttaccatatagctattggattggccatccggtgactaatagagctattatatatccctttgttgggtttataccacttagcttgaaagaggttaaaacattacaattcattgttaagttgaatacagcaaaatggaagatgccaagaacatcaagaagggccctgctccattctaccctctggaagatggaacagccggcgagcagctgcacaaggccatgaagagatatgccctggtgcctggcacaatcgccttcacagatgcccacatcgaggtggacatcacctacgccgagtacttcgagatgtctgtgcggctggccgaagctatgaagcgctacggcctgaacaccaaccaccggatcgtcgtgtgcagcgagaacagcctgcagttcttcatgcctgtgctgggcgccctgttcatcggagttgctgtggcccctgccaacgacatctacaacgagcgcgagctgctgaacagcatgggcatctctcagcccaccgtggtgttcgtgtccaagaagggactgcagaaaatcctgaacgtgcagaagaagctgcccatcatccagaaaatcatcatcatggacagcaagaccgactaccagggcttccagagcatgtacaccttcgtgaccagccatctgccacctggcttcaacgagtacgacttcgtgcccgagagcttcgaccgggacaagacaatcgccctgatcatgaacagcagcggctctaccggactgcccaaaggtgttgccctgcctcatagaactgcctgcgtgcggtttagccacgccagagatcccatcttcggcaaccagatcatccccgacacagccatcctgagcgtggtgccttttcaccacggcttcggcatgttcaccacactgggctacctgatctgcggcttcagagtggtgctgatgtaccgcttcgaggaagaactgttcctgcggagcctgcaggactacaagatccagtctgctctgctggtgcctactctgttcagcttctttgccaagagcaccctgatcgataagtacgacctgagcaacctgcacgagatcgcctctggcggagcccctctgtctaaagaagtgggagaagccgtcgccaagcggttccatctgcctggcatcagacaaggctatggcctgaccgagacaaccagcgccattctgattacccctgagggcgacgataagcctggcgctgtgggaaaagtggtgccattcttcgaggccaaggtggtggatctggacaccggcaaaacactgggcgttaaccagaggggcgagctgtgtgttagaggccctatgatcatgagcggctacgtgaacaaccccgaggccacaaacgctctgatcgacaaggatggatggctgcacagcggcgacattgcctactgggacgaagatgagcacttcttcatcgtggaccggctgaagtccctgatcaagtacaagggctaccaggtggccccagccgagctggaatctattctgctgcaacaccccaacatcttcgatgccggcgttgcaggactgcccgatgatgatgctggcgaactgccagctgctgtggtggtgctggaacacggcaagaccatgaccgagaaagaaatcgtggactacgtggccagccaagtgaccaccgccaagaaactgagaggcggcgtggtgtttgtggacgaggtgccaaaaggcctgacaggcaagctggacgcccggaagatcagagagatcctgattaaggccaagaaaggcggcaagatcgccgtgtaatagctaactagacaaaacaccaaacaaacaagctgcgagccacggacttaaataattgagccttaaagaagaaattctttaagtggatgctctcaaactcagggaaacctaaatctagttatagacaaggcaatcctgagccaagccgaagtagtaaaaacaaccaaaaaaaatctagatatcggatcccggg

SEQ ID NO: 3336 - DNA, 2831 bp, synthetic construct
  source 1..2831: mol_type = other DNA; note = Ana1.115
taatacgactcactatagggagaccctcgaaaaaaaacacaaacaccattagtaagttaacaatagatgacttacaactaatcggaaggtgcagagactcgacgggagctaccctaacgtcaagacgagggtaaagagagagtccaattctcaaagccaataggcagtagcgaaagctgcaagagaatgaaaatccgtggctcgcagcaaacaccaaacaaaacaaacacaaaccaacaaaaattaaaacagcctgtgggttgatcccacccacaggcccattgggcgctagcactctggtatcacggtacctttgtgcgcctgttttataccccctcccccaactgtaacttagaagtaacacacaccgatcaacagtcagcgtggcacaccagccacgttttgatcaagcacttctgttaccccggactgagtatcaatagactgctcacgcggttgaaggagaaagcgttcgttatccggccaactacttcgaaaaacctagtaacaccgtggaagttgcagagtgtttcgctcagcactaccccagtgtagatcaggtcgatgagtcaccgcattccccacgggcgaccgtggcggtggctgcgttggcggcctgcccatggggaaacccatgggacgctctaatacagacatggtgcgaagagtctattgagctagttggtagtcctccggcccctgaatgcggctaatcctaactgcggagcacacaccctcaagccagagggcagtgtgtcgtaacgggcaactctgcagcggaaccgactactttgggtgtccgtgtttcattttattcctatactggctgcttatggtgacaattgagagatcgttaccatatagctattggattggccatccggtgactaatagagctattatatatccctttgttgggtttataccacttagcttgaaagaggttaaaacattacaattcattgttaagttgaatacagcaaaatggaagatgccaagaacatcaagaagggccctgctccattctaccctctggaagatggaacagccggcgagcagctgcacaaggccatgaagagatatgccctggtgcctggcacaatcgccttcacagatgcccacatcgaggtggacatcacctacgccgagtacttcgagatgtctgtgcggctggccgaagctatgaagcgctacggcctgaacaccaaccaccggatcgtcgtgtgcagcgagaacagcctgcagttcttcatgcctgtgctgggcgccctgttcatcggagttgctgtggcccctgccaacgacatctacaacgagcgcgagctgctgaacagcatgggcatctctcagcccaccgtggtgttcgtgtccaagaagggactgcagaaaatcctgaacgtgcagaagaagctgcccatcatccagaaaatcatcatcatggacagcaagaccgactaccagggcttccagagcatgtacaccttcgtgaccagccatctgccacctggcttcaacgagtacgacttcgtgcccgagagcttcgaccgggacaagacaatcgccctgatcatgaacagcagcggctctaccggactgcccaaaggtgttgccctgcctcatagaactgcctgcgtgcggtttagccacgccagagatcccatcttcggcaaccagatcatccccgacacagccatcctgagcgtggtgccttttcaccacggcttcggcatgttcaccacactgggctacctgatctgcggcttcagagtggtgctgatgtaccgcttcgaggaagaactgttcctgcggagcctgcaggactacaagatccagtctgctctgctggtgcctactctgttcagcttctttgccaagagcaccctgatcgataagtacgacctgagcaacctgcacgagatcgcctctggcggagcccctctgtctaaagaagtgggagaagccgtcgccaagcggttccatctgcctggcatcagacaaggctatggcctgaccgagacaaccagcgccattctgattacccctgagggcgacgataagcctggcgctgtgggaaaagtggtgccattcttcgaggccaaggtggtggatctggacaccggcaaaacactgggcgttaaccagaggggcgagctgtgtgttagaggccctatgatcatgagcggctacgtgaacaaccccgaggccacaaacgctctgatcgacaaggatggatggctgcacagcggcgacattgcctactgggacgaagatgagcacttcttcatcgtggaccggctgaagtccctgatcaagtacaagggctaccaggtggccccagccgagctggaatctattctgctgcaacaccccaacatcttcgatgccggcgttgcaggactgcccgatgatgatgctggcgaactgccagctgctgtggtggtgctggaacacggcaagaccatgaccgagaaagaaatcgtggactacgtggccagccaagtgaccaccgccaagaaactgagaggcggcgtggtgtttgtggacgaggtgccaaaaggcctgacaggcaagctggacgcccggaagatcagagagatcctgattaaggccaagaaaggcggcaagatcgccgtgtaatagctaactagacaaaacaccaaacaaacaagctgcgagccacggacttaaataattgagccttaaagaagaaattctttaagtggatgctctcaaactcagggaaacctaaatctagttatagacaaggcaatcctgagccaagccgaagtagtaaaaaacaaccaaaaaaaatctagatatcggatcccggg

SEQ ID NO: 3337 - DNA, 2831 bp, synthetic construct
  source 1..2831: mol_type = other DNA; note = Ana1.116
taatacgactcactatagggagaccctcgaaaaaaaacacaaacaccttagtaagttaacaatagatgacttacaactaatcggaaggtgcagagactcgacgggagctaccctaacgtcaagacgagggtaaagagagagtccaattctcaaagccaataggcagtagcgaaagctgcaagagaatgaaaatccgtggctcgcagcaaacaccaaacaaaacaaacacaaaccaacaaaaattaaaacagcctgtgggttgatcccacccacaggcccattgggcgctagcactctggtatcacggtacctttgtgcgcctgttttataccccctcccccaactgtaacttagaagtaacacacaccgatcaacagtcagcgtggcacaccagccacgttttgatcaagcacttctgttaccccggactgagtatcaatagactgctcacgcggttgaaggagaaagcgttcgttatccggccaactacttcgaaaaacctagtaacaccgtggaagttgcagagtgtttcgctcagcactaccccagtgtagatcaggtcgatgagtcaccgcattccccacgggcgaccgtggcggtggctgcgttggcggcctgcccatggggaaacccatgggacgctctaatacagacatggtgcgaagagtctattgagctagttggtagtcctccggcccctgaatgcggctaatcctaactgcggagcacacaccctcaagccagagggcagtgtgtcgtaacgggcaactctgcagcggaaccgactactttgggtgtccgtgtttcattttattcctatactggctgcttatggtgacaattgagagatcgttaccatatagctattggattggccatccggtgactaatagagctattatatatccctttgttgggtttataccacttagcttgaaagaggttaaaacattacaattcattgttaagttgaatacagcaaaatggaagatgccaagaacatcaagaagggccctgctccattctaccctctggaagatggaacagccggcgagcagctgcacaaggccatgaagagatatgccctggtgcctggcacaatcgccttcacagatgcccacatcgaggtggacatcacctacgccgagtacttcgagatgtctgtgcggctggccgaagctatgaagcgctacggcctgaacaccaaccaccggatcgtcgtgtgcagcgagaacagcctgcagttcttcatgcctgtgctgggcgccctgttcatcggagttgctgtggcccctgccaacgacatctacaacgagcgcgagctgctgaacagcatgggcatctctcagcccaccgtggtgttcgtgtccaagaagggactgcagaaaatcctgaacgtgcagaagaagctgcccatcatccagaaaatcatcatcatggacagcaagaccgactaccagggcttccagagcatgtacaccttcgtgaccagccatctgccacctggcttcaacgagtacgacttcgtgcccgagagcttcgaccgggacaagacaatcgccctgatcatgaacagcagcggctctaccggactgcccaaaggtgttgccctgcctcatagaactgcctgcgtgcggtttagccacgccagagatcccatcttcggcaaccagatcatccccgacacagccatcctgagcgtggtgccttttcaccacggcttcggcatgttcaccacactgggctacctgatctgcggcttcagagtggtgctgatgtaccgcttcgaggaagaactgttcctgcggagcctgcaggactacaagatccagtctgctctgctggtgcctactctgttcagcttctttgccaagagcaccctgatcgataagtacgacctgagcaacctgcacgagatcgcctctggcggagcccctctgtctaaagaagtgggagaagccgtcgccaagcggttccatctgcctggcatcagacaaggctatggcctgaccgagacaaccagcgccattctgattacccctgagggcgacgataagcctggcgctgtgggaaaagtggtgccattcttcgaggccaaggtggtggatctggacaccggcaaaacactgggcgttaaccagaggggcgagctgtgtgttagaggccctatgatcatgagcggctacgtgaacaaccccgaggccacaaacgctctgatcgacaaggatggatggctgcacagcggcgacattgcctactgggacgaagatgagcacttcttcatcgtggaccggctgaagtccctgatcaagtacaagggctaccaggtggccccagccgagctggaatctattctgctgcaacaccccaacatcttcgatgccggcgttgcaggactgcccgatgatgatgctggcgaactgccagctgctgtggtggtgctggaacacggcaagaccatgaccgagaaagaaatcgtggactacgtggccagccaagtgaccaccgccaagaaactgagaggcggcgtggtgtttgtggacgaggtgccaaaaggcctgacaggcaagctggacgcccggaagatcagagagatcctgattaaggccaagaaaggcggcaagatcgccgtgtaatagctaactagacaaaacaccaaacaaacaagctgcgagccacggacttaaataattgagccttaaagaagaaattctttaagtggatgctctcaaactcagggaaacctaaatctagttatagacaaggcaatcctgagccaagccgaagtagtaaaaaaacaaccaaaaaaaatctagatatcggatcccggg

SEQ ID NO: 3338 - DNA, 2831 bp, synthetic construct
  source 1..2831: mol_type = other DNA; note = Ana1.117
taatacgactcactatagggagaccctcgaaaaaaaacacaaacacctagtaagttaacaatagatgacttacaactaatcggaaggtgcagagactcgacgggagctaccctaacgtcaagacgagggtaaagagagagtccaattctcaaagccaataggcagtagcgaaagctgcaagagaatgaaaatccgtggctcgcagcaaacaccaaacaaaacaaacacaaaccaacaaaaattaaaacagcctgtgggttgatcccacccacaggcccattgggcgctagcactctggtatcacggtacctttgtgcgcctgttttataccccctcccccaactgtaacttagaagtaacacacaccgatcaacagtcagcgtggcacaccagccacgttttgatcaagcacttctgttaccccggactgagtatcaatagactgctcacgcggttgaaggagaaagcgttcgttatccggccaactacttcgaaaaacctagtaacaccgtggaagttgcagagtgtttcgctcagcactaccccagtgtagatcaggtcgatgagtcaccgcattccccacgggcgaccgtggcggtggctgcgttggcggcctgcccatggggaaacccatgggacgctctaatacagacatggtgcgaagagtctattgagctagttggtagtcctccggcccctgaatgcggctaatcctaactgcggagcacacaccctcaagccagagggcagtgtgtcgtaacgggcaactctgcagcggaaccgactactttgggtgtccgtgtttcattttattcctatactggctgcttatggtgacaattgagagatcgttaccatatagctattggattggccatccggtgactaatagagctattatatatccctttgttgggtttataccacttagcttgaaagaggttaaaacattacaattcattgttaagttgaatacagcaaaatggaagatgccaagaacatcaagaagggccctgctccattctaccctctggaagatggaacagccggcgagcagctgcacaaggccatgaagagatatgccctggtgcctggcacaatcgccttcacagatgcccacatcgaggtggacatcacctacgccgagtacttcgagatgtctgtgcggctggccgaagctatgaagcgctacggcctgaacaccaaccaccggatcgtcgtgtgcagcgagaacagcctgcagttcttcatgcctgtgctgggcgccctgttcatcggagttgctgtggcccctgccaacgacatctacaacgagcgcgagctgctgaacagcatgggcatctctcagcccaccgtggtgttcgtgtccaagaagggactgcagaaaatcctgaacgtgcagaagaagctgcccatcatccagaaaatcatcatcatggacagcaagaccgactaccagggcttccagagcatgtacaccttcgtgaccagccatctgccacctggcttcaacgagtacgacttcgtgcccgagagcttcgaccgggacaagacaatcgccctgatcatgaacagcagcggctctaccggactgcccaaaggtgttgccctgcctcatagaactgcctgcgtgcggtttagccacgccagagatcccatcttcggcaaccagatcatccccgacacagccatcctgagcgtggtgccttttcaccacggcttcggcatgttcaccacactgggctacctgatctgcggcttcagagtggtgctgatgtaccgcttcgaggaagaactgttcctgcggagcctgcaggactacaagatccagtctgctctgctggtgcctactctgttcagcttctttgccaagagcaccctgatcgataagtacgacctgagcaacctgcacgagatcgcctctggcggagcccctctgtctaaagaagtgggagaagccgtcgccaagcggttccatctgcctggcatcagacaaggctatggcctgaccgagacaaccagcgccattctgattacccctgagggcgacgataagcctggcgctgtgggaaaagtggtgccattcttcgaggccaaggtggtggatctggacaccggcaaaacactgggcgttaaccagaggggcgagctgtgtgttagaggccctatgatcatgagcggctacgtgaacaaccccgaggccacaaacgctctgatcgacaaggatggatggctgcacagcggcgacattgcctactgggacgaagatgagcacttcttcatcgtggaccggctgaagtccctgatcaagtacaagggctaccaggtggccccagccgagctggaatctattctgctgcaacaccccaacatcttcgatgccggcgttgcaggactgcccgatgatgatgctggcgaactgccagctgctgtggtggtgctggaacacggcaagaccatgaccgagaaagaaatcgtggactacgtggccagccaagtgaccaccgccaagaaactgagaggcggcgtggtgtttgtggacgaggtgccaaaaggcctgacaggcaagctggacgcccggaagatcagagagatcctgattaaggccaagaaaggcggcaagatcgccgtgtaatagctaactagacaaaacaccaaacaaacaagctgcgagccacggacttaaataattgagccttaaagaagaaattctttaagtggatgctctcaaactcagggaaacctaaatctagttatagacaaggcaatcctgagccaagccgaagtagtaataaaaacaaccaaaaaaaatctagatatcggatcccggg

SEQ ID NO: 3339 - DNA, 2831 bp, synthetic construct
  source 1..2831: mol_type = other DNA; note = Ana1.118
taatacgactcactatagggagaccctcgaaaaaaaacacaaacaccagtaagttaacaatagatgacttacaactaatcggaaggtgcagagactcgacgggagctaccctaacgtcaagacgagggtaaagagagagtccaattctcaaagccaataggcagtagcgaaagctgcaagagaatgaaaatccgtggctcgcagcaaacaccaaacaaaacaaacacaaaccaacaaaaattaaaacagcctgtgggttgatcccacccacaggcccattgggcgctagcactctggtatcacggtacctttgtgcgcctgttttataccccctcccccaactgtaacttagaagtaacacacaccgatcaacagtcagcgtggcacaccagccacgttttgatcaagcacttctgttaccccggactgagtatcaatagactgctcacgcggttgaaggagaaagcgttcgttatccggccaactacttcgaaaaacctagtaacaccgtggaagttgcagagtgtttcgctcagcactaccccagtgtagatcaggtcgatgagtcaccgcattccccacgggcgaccgtggcggtggctgcgttggcggcctgcccatggggaaacccatgggacgctctaatacagacatggtgcgaagagtctattgagctagttggtagtcctccggcccctgaatgcggctaatcctaactgcggagcacacaccctcaagccagagggcagtgtgtcgtaacgggcaactctgcagcggaaccgactactttgggtgtccgtgtttcattttattcctatactggctgcttatggtgacaattgagagatcgttaccatatagctattggattggccatccggtgactaatagagctattatatatccctttgttgggtttataccacttagcttgaaagaggttaaaacattacaattcattgttaagttgaatacagcaaaatggaagatgccaagaacatcaagaagggccctgctccattctaccctctggaagatggaacagccggcgagcagctgcacaaggccatgaagagatatgccctggtgcctggcacaatcgccttcacagatgcccacatcgaggtggacatcacctacgccgagtacttcgagatgtctgtgcggctggccgaagctatgaagcgctacggcctgaacaccaaccaccggatcgtcgtgtgcagcgagaacagcctgcagttcttcatgcctgtgctgggcgccctgttcatcggagttgctgtggcccctgccaacgacatctacaacgagcgcgagctgctgaacagcatgggcatctctcagcccaccgtggtgttcgtgtccaagaagggactgcagaaaatcctgaacgtgcagaagaagctgcccatcatccagaaaatcatcatcatggacagcaagaccgactaccagggcttccagagcatgtacaccttcgtgaccagccatctgccacctggcttcaacgagtacgacttcgtgcccgagagcttcgaccgggacaagacaatcgccctgatcatgaacagcagcggctctaccggactgcccaaaggtgttgccctgcctcatagaactgcctgcgtgcggtttagccacgccagagatcccatcttcggcaaccagatcatccccgacacagccatcctgagcgtggtgccttttcaccacggcttcggcatgttcaccacactgggctacctgatctgcggcttcagagtggtgctgatgtaccgcttcgaggaagaactgttcctgcggagcctgcaggactacaagatccagtctgctctgctggtgcctactctgttcagcttctttgccaagagcaccctgatcgataagtacgacctgagcaacctgcacgagatcgcctctggcggagcccctctgtctaaagaagtgggagaagccgtcgccaagcggttccatctgcctggcatcagacaaggctatggcctgaccgagacaaccagcgccattctgattacccctgagggcgacgataagcctggcgctgtgggaaaagtggtgccattcttcgaggccaaggtggtggatctggacaccggcaaaacactgggcgttaaccagaggggcgagctgtgtgttagaggccctatgatcatgagcggctacgtgaacaaccccgaggccacaaacgctctgatcgacaaggatggatggctgcacagcggcgacattgcctactgggacgaagatgagcacttcttcatcgtggaccggctgaagtccctgatcaagtacaagggctaccaggtggccccagccgagctggaatctattctgctgcaacaccccaacatcttcgatgccggcgttgcaggactgcccgatgatgatgctggcgaactgccagctgctgtggtggtgctggaacacggcaagaccatgaccgagaaagaaatcgtggactacgtggccagccaagtgaccaccgccaagaaactgagaggcggcgtggtgtttgtggacgaggtgccaaaaggcctgacaggcaagctggacgcccggaagatcagagagatcctgattaaggccaagaaaggcggcaagatcgccgtgtaatagctaactagacaaaacaccaaacaaacaagctgcgagccacggacttaaataattgagccttaaagaagaaattctttaagtggatgctctcaaactcagggaaacctaaatctagttatagacaaggcaatcctgagccaagccgaagtagtaattaaaaacaaccaaaaaaaatctagatatcggatcccggg

SEQ ID NO: 3340 - DNA, 2831 bp, synthetic construct
  source 1..2831: mol_type = other DNA; note = Ana1.119
taatacgactcactatagggagaccctcgaaaaaaaacacaaacaccgtaagttaacaatagatgacttacaactaatcggaaggtgcagagactcgacgggagctaccctaacgtcaagacgagggtaaagagagagtccaattctcaaagccaataggcagtagcgaaagctgcaagagaatgaaaatccgtggctcgcagcaaacaccaaacaaaacaaacacaaaccaacaaaaattaaaacagcctgtgggttgatcccacccacaggcccattgggcgctagcactctggtatcacggtacctttgtgcgcctgttttataccccctcccccaactgtaacttagaagtaacacacaccgatcaacagtcagcgtggcacaccagccacgttttgatcaagcacttctgttaccccggactgagtatcaatagactgctcacgcggttgaaggagaaagcgttcgttatccggccaactacttcgaaaaacctagtaacaccgtggaagttgcagagtgtttcgctcagcactaccccagtgtagatcaggtcgatgagtcaccgcattccccacgggcgaccgtggcggtggctgcgttggcggcctgcccatggggaaacccatgggacgctctaatacagacatggtgcgaagagtctattgagctagttggtagtcctccggcccctgaatgcggctaatcctaactgcggagcacacaccctcaagccagagggcagtgtgtcgtaacgggcaactctgcagcggaaccgactactttgggtgtccgtgtttcattttattcctatactggctgcttatggtgacaattgagagatcgttaccatatagctattggattggccatccggtgactaatagagctattatatatccctttgttgggtttataccacttagcttgaaagaggttaaaacattacaattcattgttaagttgaatacagcaaaatggaagatgccaagaacatcaagaagggccctgctccattctaccctctggaagatggaacagccggcgagcagctgcacaaggccatgaagagatatgccctggtgcctggcacaatcgccttcacagatgcccacatcgaggtggacatcacctacgccgagtacttcgagatgtctgtgcggctggccgaagctatgaagcgctacggcctgaacaccaaccaccggatcgtcgtgtgcagcgagaacagcctgcagttcttcatgcctgtgctgggcgccctgttcatcggagttgctgtggcccctgccaacgacatctacaacgagcgcgagctgctgaacagcatgggcatctctcagcccaccgtggtgttcgtgtccaagaagggactgcagaaaatcctgaacgtgcagaagaagctgcccatcatccagaaaatcatcatcatggacagcaagaccgactaccagggcttccagagcatgtacaccttcgtgaccagccatctgccacctggcttcaacgagtacgacttcgtgcccgagagcttcgaccgggacaagacaatcgccctgatcatgaacagcagcggctctaccggactgcccaaaggtgttgccctgcctcatagaactgcctgcgtgcggtttagccacgccagagatcccatcttcggcaaccagatcatccccgacacagccatcctgagcgtggtgccttttcaccacggcttcggcatgttcaccacactgggctacctgatctgcggcttcagagtggtgctgatgtaccgcttcgaggaagaactgttcctgcggagcctgcaggactacaagatccagtctgctctgctggtgcctactctgttcagcttctttgccaagagcaccctgatcgataagtacgacctgagcaacctgcacgagatcgcctctggcggagcccctctgtctaaagaagtgggagaagccgtcgccaagcggttccatctgcctggcatcagacaaggctatggcctgaccgagacaaccagcgccattctgattacccctgagggcgacgataagcctggcgctgtgggaaaagtggtgccattcttcgaggccaaggtggtggatctggacaccggcaaaacactgggcgttaaccagaggggcgagctgtgtgttagaggccctatgatcatgagcggctacgtgaacaaccccgaggccacaaacgctctgatcgacaaggatggatggctgcacagcggcgacattgcctactgggacgaagatgagcacttcttcatcgtggaccggctgaagtccctgatcaagtacaagggctaccaggtggccccagccgagctggaatctattctgctgcaacaccccaacatcttcgatgccggcgttgcaggactgcccgatgatgatgctggcgaactgccagctgctgtggtggtgctggaacacggcaagaccatgaccgagaaagaaatcgtggactacgtggccagccaagtgaccaccgccaagaaactgagaggcggcgtggtgtttgtggacgaggtgccaaaaggcctgacaggcaagctggacgcccggaagatcagagagatcctgattaaggccaagaaaggcggcaagatcgccgtgtaatagctaactagacaaaacaccaaacaaacaagctgcgagccacggacttaaataattgagccttaaagaagaaattctttaagtggatgctctcaaactcagggaaacctaaatctagttatagacaaggcaatcctgagccaagccgaagtagtaattaaaaaacaaccaaaaaaaatctagatatcggatcccggg

SEQ ID NO: 3341 - DNA, 2831 bp, synthetic construct
  source 1..2831: mol_type = other DNA; note = Ana1.120
taatacgactcactatagggagaccctcgaaaaaaaacacaaacacctaagttaacaatagatgacttacaactaatcggaaggtgcagagactcgacgggagctaccctaacgtcaagacgagggtaaagagagagtccaattctcaaagccaataggcagtagcgaaagctgcaagagaatgaaaatccgtggctcgcagcaaacaccaaacaaaacaaacacaaaccaacaaaaattaaaacagcctgtgggttgatcccacccacaggcccattgggcgctagcactctggtatcacggtacctttgtgcgcctgttttataccccctcccccaactgtaacttagaagtaacacacaccgatcaacagtcagcgtggcacaccagccacgttttgatcaagcacttctgttaccccggactgagtatcaatagactgctcacgcggttgaaggagaaagcgttcgttatccggccaactacttcgaaaaacctagtaacaccgtggaagttgcagagtgtttcgctcagcactaccccagtgtagatcaggtcgatgagtcaccgcattccccacgggcgaccgtggcggtggctgcgttggcggcctgcccatggggaaacccatgggacgctctaatacagacatggtgcgaagagtctattgagctagttggtagtcctccggcccctgaatgcggctaatcctaactgcggagcacacaccctcaagccagagggcagtgtgtcgtaacgggcaactctgcagcggaaccgactactttgggtgtccgtgtttcattttattcctatactggctgcttatggtgacaattgagagatcgttaccatatagctattggattggccatccggtgactaatagagctattatatatccctttgttgggtttataccacttagcttgaaagaggttaaaacattacaattcattgttaagttgaatacagcaaaatggaagatgccaagaacatcaagaagggccctgctccattctaccctctggaagatggaacagccggcgagcagctgcacaaggccatgaagagatatgccctggtgcctggcacaatcgccttcacagatgcccacatcgaggtggacatcacctacgccgagtacttcgagatgtctgtgcggctggccgaagctatgaagcgctacggcctgaacaccaaccaccggatcgtcgtgtgcagcgagaacagcctgcagttcttcatgcctgtgctgggcgccctgttcatcggagttgctgtggcccctgccaacgacatctacaacgagcgcgagctgctgaacagcatgggcatctctcagcccaccgtggtgttcgtgtccaagaagggactgcagaaaatcctgaacgtgcagaagaagctgcccatcatccagaaaatcatcatcatggacagcaagaccgactaccagggcttccagagcatgtacaccttcgtgaccagccatctgccacctggcttcaacgagtacgacttcgtgcccgagagcttcgaccgggacaagacaatcgccctgatcatgaacagcagcggctctaccggactgcccaaaggtgttgccctgcctcatagaactgcctgcgtgcggtttagccacgccagagatcccatcttcggcaaccagatcatccccgacacagccatcctgagcgtggtgccttttcaccacggcttcggcatgttcaccacactgggctacctgatctgcggcttcagagtggtgctgatgtaccgcttcgaggaagaactgttcctgcggagcctgcaggactacaagatccagtctgctctgctggtgcctactctgttcagcttctttgccaagagcaccctgatcgataagtacgacctgagcaacctgcacgagatcgcctctggcggagcccctctgtctaaagaagtgggagaagccgtcgccaagcggttccatctgcctggcatcagacaaggctatggcctgaccgagacaaccagcgccattctgattacccctgagggcgacgataagcctggcgctgtgggaaaagtggtgccattcttcgaggccaaggtggtggatctggacaccggcaaaacactgggcgttaaccagaggggcgagctgtgtgttagaggccctatgatcatgagcggctacgtgaacaaccccgaggccacaaacgctctgatcgacaaggatggatggctgcacagcggcgacattgcctactgggacgaagatgagcacttcttcatcgtggaccggctgaagtccctgatcaagtacaagggctaccaggtggccccagccgagctggaatctattctgctgcaacaccccaacatcttcgatgccggcgttgcaggactgcccgatgatgatgctggcgaactgccagctgctgtggtggtgctggaacacggcaagaccatgaccgagaaagaaatcgtggactacgtggccagccaagtgaccaccgccaagaaactgagaggcggcgtggtgtttgtggacgaggtgccaaaaggcctgacaggcaagctggacgcccggaagatcagagagatcctgattaaggccaagaaaggcggcaagatcgccgtgtaatagctaactagacaaaacaccaaacaaacaagctgcgagccacggacttaaataattgagccttaaagaagaaattctttaagtggatgctctcaaactcagggaaacctaaatctagttatagacaaggcaatcctgagccaagccgaagtagtaattagaaaaacaaccaaaaaaaatctagatatcggatcccggg

SEQ ID NO: 3342 - DNA, 2831 bp, synthetic construct
  source 1..2831: mol_type = other DNA; note = Ana1.121
taatacgactcactatagggagaccctcgaaaaaaaacacaaacaccaagttaacaatagatgacttacaactaatcggaaggtgcagagactcgacgggagctaccctaacgtcaagacgagggtaaagagagagtccaattctcaaagccaataggcagtagcgaaagctgcaagagaatgaaaatccgtggctcgcagcaaacaccaaacaaaacaaacacaaaccaacaaaaattaaaacagcctgtgggttgatcccacccacaggcccattgggcgctagcactctggtatcacggtacctttgtgcgcctgttttataccccctcccccaactgtaacttagaagtaacacacaccgatcaacagtcagcgtggcacaccagccacgttttgatcaagcacttctgttaccccggactgagtatcaatagactgctcacgcggttgaaggagaaagcgttcgttatccggccaactacttcgaaaaacctagtaacaccgtggaagttgcagagtgtttcgctcagcactaccccagtgtagatcaggtcgatgagtcaccgcattccccacgggcgaccgtggcggtggctgcgttggcggcctgcccatggggaaacccatgggacgctctaatacagacatggtgcgaagagtctattgagctagttggtagtcctccggcccctgaatgcggctaatcctaactgcggagcacacaccctcaagccagagggcagtgtgtcgtaacgggcaactctgcagcggaaccgactactttgggtgtccgtgtttcattttattcctatactggctgcttatggtgacaattgagagatcgttaccatatagctattggattggccatccggtgactaatagagctattatatatccctttgttgggtttataccacttagcttgaaagaggttaaaacattacaattcattgttaagttgaatacagcaaaatggaagatgccaagaacatcaagaagggccctgctccattctaccctctggaagatggaacagccggcgagcagctgcacaaggccatgaagagatatgccctggtgcctggcacaatcgccttcacagatgcccacatcgaggtggacatcacctacgccgagtacttcgagatgtctgtgcggctggccgaagctatgaagcgctacggcctgaacaccaaccaccggatcgtcgtgtgcagcgagaacagcctgcagttcttcatgcctgtgctgggcgccctgttcatcggagttgctgtggcccctgccaacgacatctacaacgagcgcgagctgctgaacagcatgggcatctctcagcccaccgtggtgttcgtgtccaagaagggactgcagaaaatcctgaacgtgcagaagaagctgcccatcatccagaaaatcatcatcatggacagcaagaccgactaccagggcttccagagcatgtacaccttcgtgaccagccatctgccacctggcttcaacgagtacgacttcgtgcccgagagcttcgaccgggacaagacaatcgccctgatcatgaacagcagcggctctaccggactgcccaaaggtgttgccctgcctcatagaactgcctgcgtgcggtttagccacgccagagatcccatcttcggcaaccagatcatccccgacacagccatcctgagcgtggtgccttttcaccacggcttcggcatgttcaccacactgggctacctgatctgcggcttcagagtggtgctgatgtaccgcttcgaggaagaactgttcctgcggagcctgcaggactacaagatccagtctgctctgctggtgcctactctgttcagcttctttgccaagagcaccctgatcgataagtacgacctgagcaacctgcacgagatcgcctctggcggagcccctctgtctaaagaagtgggagaagccgtcgccaagcggttccatctgcctggcatcagacaaggctatggcctgaccgagacaaccagcgccattctgattacccctgagggcgacgataagcctggcgctgtgggaaaagtggtgccattcttcgaggccaaggtggtggatctggacaccggcaaaacactgggcgttaaccagaggggcgagctgtgtgttagaggccctatgatcatgagcggctacgtgaacaaccccgaggccacaaacgctctgatcgacaaggatggatggctgcacagcggcgacattgcctactgggacgaagatgagcacttcttcatcgtggaccggctgaagtccctgatcaagtacaagggctaccaggtggccccagccgagctggaatctattctgctgcaacaccccaacatcttcgatgccggcgttgcaggactgcccgatgatgatgctggcgaactgccagctgctgtggtggtgctggaacacggcaagaccatgaccgagaaagaaatcgtggactacgtggccagccaagtgaccaccgccaagaaactgagaggcggcgtggtgtttgtggacgaggtgccaaaaggcctgacaggcaagctggacgcccggaagatcagagagatcctgattaaggccaagaaaggcggcaagatcgccgtgtaatagctaactagacaaaacaccaaacaaacaagctgcgagccacggacttaaataattgagccttaaagaagaaattctttaagtggatgctctcaaactcagggaaacctaaatctagttatagacaaggcaatcctgagccaagccgaagtagtaattagtaaaaacaaccaaaaaaaatctagatatcggatcccggg

SEQ ID NO: 3343 - DNA, 2831 bp, synthetic construct
  source 1..2831: mol_type = other DNA; note = Ana1.122
taatacgactcactatagggagaccctcgaaaaaaaacacaaacaccagttaacaatagatgacttacaactaatcggaaggtgcagagactcgacgggagctaccctaacgtcaagacgagggtaaagagagagtccaattctcaaagccaataggcagtagcgaaagctgcaagagaatgaaaatccgtggctcgcagcaaacaccaaacaaaacaaacacaaaccaacaaaaattaaaacagcctgtgggttgatcccacccacaggcccattgggcgctagcactctggtatcacggtacctttgtgcgcctgttttataccccctcccccaactgtaacttagaagtaacacacaccgatcaacagtcagcgtggcacaccagccacgttttgatcaagcacttctgttaccccggactgagtatcaatagactgctcacgcggttgaaggagaaagcgttcgttatccggccaactacttcgaaaaacctagtaacaccgtggaagttgcagagtgtttcgctcagcactaccccagtgtagatcaggtcgatgagtcaccgcattccccacgggcgaccgtggcggtggctgcgttggcggcctgcccatggggaaacccatgggacgctctaatacagacatggtgcgaagagtctattgagctagttggtagtcctccggcccctgaatgcggctaatcctaactgcggagcacacaccctcaagccagagggcagtgtgtcgtaacgggcaactctgcagcggaaccgactactttgggtgtccgtgtttcattttattcctatactggctgcttatggtgacaattgagagatcgttaccatatagctattggattggccatccggtgactaatagagctattatatatccctttgttgggtttataccacttagcttgaaagaggttaaaacattacaattcattgttaagttgaatacagcaaaatggaagatgccaagaacatcaagaagggccctgctccattctaccctctggaagatggaacagccggcgagcagctgcacaaggccatgaagagatatgccctggtgcctggcacaatcgccttcacagatgcccacatcgaggtggacatcacctacgccgagtacttcgagatgtctgtgcggctggccgaagctatgaagcgctacggcctgaacaccaaccaccggatcgtcgtgtgcagcgagaacagcctgcagttcttcatgcctgtgctgggcgccctgttcatcggagttgctgtggcccctgccaacgacatctacaacgagcgcgagctgctgaacagcatgggcatctctcagcccaccgtggtgttcgtgtccaagaagggactgcagaaaatcctgaacgtgcagaagaagctgcccatcatccagaaaatcatcatcatggacagcaagaccgactaccagggcttccagagcatgtacaccttcgtgaccagccatctgccacctggcttcaacgagtacgacttcgtgcccgagagcttcgaccgggacaagacaatcgccctgatcatgaacagcagcggctctaccggactgcccaaaggtgttgccctgcctcatagaactgcctgcgtgcggtttagccacgccagagatcccatcttcggcaaccagatcatccccgacacagccatcctgagcgtggtgccttttcaccacggcttcggcatgttcaccacactgggctacctgatctgcggcttcagagtggtgctgatgtaccgcttcgaggaagaactgttcctgcggagcctgcaggactacaagatccagtctgctctgctggtgcctactctgttcagcttctttgccaagagcaccctgatcgataagtacgacctgagcaacctgcacgagatcgcctctggcggagcccctctgtctaaagaagtgggagaagccgtcgccaagcggttccatctgcctggcatcagacaaggctatggcctgaccgagacaaccagcgccattctgattacccctgagggcgacgataagcctggcgctgtgggaaaagtggtgccattcttcgaggccaaggtggtggatctggacaccggcaaaacactgggcgttaaccagaggggcgagctgtgtgttagaggccctatgatcatgagcggctacgtgaacaaccccgaggccacaaacgctctgatcgacaaggatggatggctgcacagcggcgacattgcctactgggacgaagatgagcacttcttcatcgtggaccggctgaagtccctgatcaagtacaagggctaccaggtggccccagccgagctggaatctattctgctgcaacaccccaacatcttcgatgccggcgttgcaggactgcccgatgatgatgctggcgaactgccagctgctgtggtggtgctggaacacggcaagaccatgaccgagaaagaaatcgtggactacgtggccagccaagtgaccaccgccaagaaactgagaggcggcgtggtgtttgtggacgaggtgccaaaaggcctgacaggcaagctggacgcccggaagatcagagagatcctgattaaggccaagaaaggcggcaagatcgccgtgtaatagctaactagacaaaacaccaaacaaacaagctgcgagccacggacttaaataattgagccttaaagaagaaattctttaagtggatgctctcaaactcagggaaacctaaatctagttatagacaaggcaatcctgagccaagccgaagtagtaattagtaaaaaacaaccaaaaaaaatctagatatcggatcccggg

SEQ ID NO: 3344 - DNA, 2831 bp, synthetic construct
  source 1..2831: mol_type = other DNA; note = Ana1.123
taatacgactcactatagggagaccctcgaaaaaaaacacaaacaccgttaacaatagatgacttacaactaatcggaaggtgcagagactcgacgggagctaccctaacgtcaagacgagggtaaagagagagtccaattctcaaagccaataggcagtagcgaaagctgcaagagaatgaaaatccgtggctcgcagcaaacaccaaacaaaacaaacacaaaccaacaaaaattaaaacagcctgtgggttgatcccacccacaggcccattgggcgctagcactctggtatcacggtacctttgtgcgcctgttttataccccctcccccaactgtaacttagaagtaacacacaccgatcaacagtcagcgtggcacaccagccacgttttgatcaagcacttctgttaccccggactgagtatcaatagactgctcacgcggttgaaggagaaagcgttcgttatccggccaactacttcgaaaaacctagtaacaccgtggaagttgcagagtgtttcgctcagcactaccccagtgtagatcaggtcgatgagtcaccgcattccccacgggcgaccgtggcggtggctgcgttggcggcctgcccatggggaaacccatgggacgctctaatacagacatggtgcgaagagtctattgagctagttggtagtcctccggcccctgaatgcggctaatcctaactgcggagcacacaccctcaagccagagggcagtgtgtcgtaacgggcaactctgcagcggaaccgactactttgggtgtccgtgtttcattttattcctatactggctgcttatggtgacaattgagagatcgttaccatatagctattggattggccatccggtgactaatagagctattatatatccctttgttgggtttataccacttagcttgaaagaggttaaaacattacaattcattgttaagttgaatacagcaaaatggaagatgccaagaacatcaagaagggccctgctccattctaccctctggaagatggaacagccggcgagcagctgcacaaggccatgaagagatatgccctggtgcctggcacaatcgccttcacagatgcccacatcgaggtggacatcacctacgccgagtacttcgagatgtctgtgcggctggccgaagctatgaagcgctacggcctgaacaccaaccaccggatcgtcgtgtgcagcgagaacagcctgcagttcttcatgcctgtgctgggcgccctgttcatcggagttgctgtggcccctgccaacgacatctacaacgagcgcgagctgctgaacagcatgggcatctctcagcccaccgtggtgttcgtgtccaagaagggactgcagaaaatcctgaacgtgcagaagaagctgcccatcatccagaaaatcatcatcatggacagcaagaccgactaccagggcttccagagcatgtacaccttcgtgaccagccatctgccacctggcttcaacgagtacgacttcgtgcccgagagcttcgaccgggacaagacaatcgccctgatcatgaacagcagcggctctaccggactgcccaaaggtgttgccctgcctcatagaactgcctgcgtgcggtttagccacgccagagatcccatcttcggcaaccagatcatccccgacacagccatcctgagcgtggtgccttttcaccacggcttcggcatgttcaccacactgggctacctgatctgcggcttcagagtggtgctgatgtaccgcttcgaggaagaactgttcctgcggagcctgcaggactacaagatccagtctgctctgctggtgcctactctgttcagcttctttgccaagagcaccctgatcgataagtacgacctgagcaacctgcacgagatcgcctctggcggagcccctctgtctaaagaagtgggagaagccgtcgccaagcggttccatctgcctggcatcagacaaggctatggcctgaccgagacaaccagcgccattctgattacccctgagggcgacgataagcctggcgctgtgggaaaagtggtgccattcttcgaggccaaggtggtggatctggacaccggcaaaacactgggcgttaaccagaggggcgagctgtgtgttagaggccctatgatcatgagcggctacgtgaacaaccccgaggccacaaacgctctgatcgacaaggatggatggctgcacagcggcgacattgcctactgggacgaagatgagcacttcttcatcgtggaccggctgaagtccctgatcaagtacaagggctaccaggtggccccagccgagctggaatctattctgctgcaacaccccaacatcttcgatgccggcgttgcaggactgcccgatgatgatgctggcgaactgccagctgctgtggtggtgctggaacacggcaagaccatgaccgagaaagaaatcgtggactacgtggccagccaagtgaccaccgccaagaaactgagaggcggcgtggtgtttgtggacgaggtgccaaaaggcctgacaggcaagctggacgcccggaagatcagagagatcctgattaaggccaagaaaggcggcaagatcgccgtgtaatagctaactagacaaaacaccaaacaaacaagctgcgagccacggacttaaataattgagccttaaagaagaaattctttaagtggatgctctcaaactcagggaaacctaaatctagttatagacaaggcaatcctgagccaagccgaagtagtaattagtaaaaaaacaaccaaaaaaaatctagatatcggatcccggg

SEQ ID NO: 3345 - DNA, 2831 bp, synthetic construct
  source 1..2831: mol_type = other DNA; note = Ana1.124
taatacgactcactatagggagaccctcgaaaaaaaacacaaacaccttaacaatagatgacttacaactaatcggaaggtgcagagactcgacgggagctaccctaacgtcaagacgagggtaaagagagagtccaattctcaaagccaataggcagtagcgaaagctgcaagagaatgaaaatccgtggctcgcagcaaacaccaaacaaaacaaacacaaaccaacaaaaattaaaacagcctgtgggttgatcccacccacaggcccattgggcgctagcactctggtatcacggtacctttgtgcgcctgttttataccccctcccccaactgtaacttagaagtaacacacaccgatcaacagtcagcgtggcacaccagccacgttttgatcaagcacttctgttaccccggactgagtatcaatagactgctcacgcggttgaaggagaaagcgttcgttatccggccaactacttcgaaaaacctagtaacaccgtggaagttgcagagtgtttcgctcagcactaccccagtgtagatcaggtcgatgagtcaccgcattccccacgggcgaccgtggcggtggctgcgttggcggcctgcccatggggaaacccatgggacgctctaatacagacatggtgcgaagagtctattgagctagttggtagtcctccggcccctgaatgcggctaatcctaactgcggagcacacaccctcaagccagagggcagtgtgtcgtaacgggcaactctgcagcggaaccgactactttgggtgtccgtgtttcattttattcctatactggctgcttatggtgacaattgagagatcgttaccatatagctattggattggccatccggtgactaatagagctattatatatccctttgttgggtttataccacttagcttgaaagaggttaaaacattacaattcattgttaagttgaatacagcaaaatggaagatgccaagaacatcaagaagggccctgctccattctaccctctggaagatggaacagccggcgagcagctgcacaaggccatgaagagatatgccctggtgcctggcacaatcgccttcacagatgcccacatcgaggtggacatcacctacgccgagtacttcgagatgtctgtgcggctggccgaagctatgaagcgctacggcctgaacaccaaccaccggatcgtcgtgtgcagcgagaacagcctgcagttcttcatgcctgtgctgggcgccctgttcatcggagttgctgtggcccctgccaacgacatctacaacgagcgcgagctgctgaacagcatgggcatctctcagcccaccgtggtgttcgtgtccaagaagggactgcagaaaatcctgaacgtgcagaagaagctgcccatcatccagaaaatcatcatcatggacagcaagaccgactaccagggcttccagagcatgtacaccttcgtgaccagccatctgccacctggcttcaacgagtacgacttcgtgcccgagagcttcgaccgggacaagacaatcgccctgatcatgaacagcagcggctctaccggactgcccaaaggtgttgccctgcctcatagaactgcctgcgtgcggtttagccacgccagagatcccatcttcggcaaccagatcatccccgacacagccatcctgagcgtggtgccttttcaccacggcttcggcatgttcaccacactgggctacctgatctgcggcttcagagtggtgctgatgtaccgcttcgaggaagaactgttcctgcggagcctgcaggactacaagatccagtctgctctgctggtgcctactctgttcagcttctttgccaagagcaccctgatcgataagtacgacctgagcaacctgcacgagatcgcctctggcggagcccctctgtctaaagaagtgggagaagccgtcgccaagcggttccatctgcctggcatcagacaaggctatggcctgaccgagacaaccagcgccattctgattacccctgagggcgacgataagcctggcgctgtgggaaaagtggtgccattcttcgaggccaaggtggtggatctggacaccggcaaaacactgggcgttaaccagaggggcgagctgtgtgttagaggccctatgatcatgagcggctacgtgaacaaccccgaggccacaaacgctctgatcgacaaggatggatggctgcacagcggcgacattgcctactgggacgaagatgagcacttcttcatcgtggaccggctgaagtccctgatcaagtacaagggctaccaggtggccccagccgagctggaatctattctgctgcaacaccccaacatcttcgatgccggcgttgcaggactgcccgatgatgatgctggcgaactgccagctgctgtggtggtgctggaacacggcaagaccatgaccgagaaagaaatcgtggactacgtggccagccaagtgaccaccgccaagaaactgagaggcggcgtggtgtttgtggacgaggtgccaaaaggcctgacaggcaagctggacgcccggaagatcagagagatcctgattaaggccaagaaaggcggcaagatcgccgtgtaatagctaactagacaaaacaccaaacaaacaagctgcgagccacggacttaaataattgagccttaaagaagaaattctttaagtggatgctctcaaactcagggaaacctaaatctagttatagacaaggcaatcctgagccaagccgaagtagtaattagtaagaaaaacaaccaaaaaaaatctagatatcggatcccggg

SEQ ID NO: 3346 - DNA, 2831 bp, synthetic construct
  source 1..2831: mol_type = other DNA; note = Ana1.125
taatacgactcactatagggagaccctcgaaaaaaaacacaaacacctaacaatagatgacttacaactaatcggaaggtgcagagactcgacgggagctaccctaacgtcaagacgagggtaaagagagagtccaattctcaaagccaataggcagtagcgaaagctgcaagagaatgaaaatccgtggctcgcagcaaacaccaaacaaaacaaacacaaaccaacaaaaattaaaacagcctgtgggttgatcccacccacaggcccattgggcgctagcactctggtatcacggtacctttgtgcgcctgttttataccccctcccccaactgtaacttagaagtaacacacaccgatcaacagtcagcgtggcacaccagccacgttttgatcaagcacttctgttaccccggactgagtatcaatagactgctcacgcggttgaaggagaaagcgttcgttatccggccaactacttcgaaaaacctagtaacaccgtggaagttgcagagtgtttcgctcagcactaccccagtgtagatcaggtcgatgagtcaccgcattccccacgggcgaccgtggcggtggctgcgttggcggcctgcccatggggaaacccatgggacgctctaatacagacatggtgcgaagagtctattgagctagttggtagtcctccggcccctgaatgcggctaatcctaactgcggagcacacaccctcaagccagagggcagtgtgtcgtaacgggcaactctgcagcggaaccgactactttgggtgtccgtgtttcattttattcctatactggctgcttatggtgacaattgagagatcgttaccatatagctattggattggccatccggtgactaatagagctattatatatccctttgttgggtttataccacttagcttgaaagaggttaaaacattacaattcattgttaagttgaatacagcaaaatggaagatgccaagaacatcaagaagggccctgctccattctaccctctggaagatggaacagccggcgagcagctgcacaaggccatgaagagatatgccctggtgcctggcacaatcgccttcacagatgcccacatcgaggtggacatcacctacgccgagtacttcgagatgtctgtgcggctggccgaagctatgaagcgctacggcctgaacaccaaccaccggatcgtcgtgtgcagcgagaacagcctgcagttcttcatgcctgtgctgggcgccctgttcatcggagttgctgtggcccctgccaacgacatctacaacgagcgcgagctgctgaacagcatgggcatctctcagcccaccgtggtgttcgtgtccaagaagggactgcagaaaatcctgaacgtgcagaagaagctgcccatcatccagaaaatcatcatcatggacagcaagaccgactaccagggcttccagagcatgtacaccttcgtgaccagccatctgccacctggcttcaacgagtacgacttcgtgcccgagagcttcgaccgggacaagacaatcgccctgatcatgaacagcagcggctctaccggactgcccaaaggtgttgccctgcctcatagaactgcctgcgtgcggtttagccacgccagagatcccatcttcggcaaccagatcatccccgacacagccatcctgagcgtggtgccttttcaccacggcttcggcatgttcaccacactgggctacctgatctgcggcttcagagtggtgctgatgtaccgcttcgaggaagaactgttcctgcggagcctgcaggactacaagatccagtctgctctgctggtgcctactctgttcagcttctttgccaagagcaccctgatcgataagtacgacctgagcaacctgcacgagatcgcctctggcggagcccctctgtctaaagaagtgggagaagccgtcgccaagcggttccatctgcctggcatcagacaaggctatggcctgaccgagacaaccagcgccattctgattacccctgagggcgacgataagcctggcgctgtgggaaaagtggtgccattcttcgaggccaaggtggtggatctggacaccggcaaaacactgggcgttaaccagaggggcgagctgtgtgttagaggccctatgatcatgagcggctacgtgaacaaccccgaggccacaaacgctctgatcgacaaggatggatggctgcacagcggcgacattgcctactgggacgaagatgagcacttcttcatcgtggaccggctgaagtccctgatcaagtacaagggctaccaggtggccccagccgagctggaatctattctgctgcaacaccccaacatcttcgatgccggcgttgcaggactgcccgatgatgatgctggcgaactgccagctgctgtggtggtgctggaacacggcaagaccatgaccgagaaagaaatcgtggactacgtggccagccaagtgaccaccgccaagaaactgagaggcggcgtggtgtttgtggacgaggtgccaaaaggcctgacaggcaagctggacgcccggaagatcagagagatcctgattaaggccaagaaaggcggcaagatcgccgtgtaatagctaactagacaaaacaccaaacaaacaagctgcgagccacggacttaaataattgagccttaaagaagaaattctttaagtggatgctctcaaactcagggaaacctaaatctagttatagacaaggcaatcctgagccaagccgaagtagtaattagtaagtaaaaacaaccaaaaaaaatctagatatcggatcccggg

SEQ ID NO: 3347 - DNA, 2831 bp, synthetic construct
  source 1..2831: mol_type = other DNA; note = Ana1.126
taatacgactcactatagggagaccctcgaaaaaaaacacaaacaccaacaatagatgacttacaactaatcggaaggtgcagagactcgacgggagctaccctaacgtcaagacgagggtaaagagagagtccaattctcaaagccaataggcagtagcgaaagctgcaagagaatgaaaatccgtggctcgcagcaaacaccaaacaaaacaaacacaaaccaacaaaaattaaaacagcctgtgggttgatcccacccacaggcccattgggcgctagcactctggtatcacggtacctttgtgcgcctgttttataccccctcccccaactgtaacttagaagtaacacacaccgatcaacagtcagcgtggcacaccagccacgttttgatcaagcacttctgttaccccggactgagtatcaatagactgctcacgcggttgaaggagaaagcgttcgttatccggccaactacttcgaaaaacctagtaacaccgtggaagttgcagagtgtttcgctcagcactaccccagtgtagatcaggtcgatgagtcaccgcattccccacgggcgaccgtggcggtggctgcgttggcggcctgcccatggggaaacccatgggacgctctaatacagacatggtgcgaagagtctattgagctagttggtagtcctccggcccctgaatgcggctaatcctaactgcggagcacacaccctcaagccagagggcagtgtgtcgtaacgggcaactctgcagcggaaccgactactttgggtgtccgtgtttcattttattcctatactggctgcttatggtgacaattgagagatcgttaccatatagctattggattggccatccggtgactaatagagctattatatatccctttgttgggtttataccacttagcttgaaagaggttaaaacattacaattcattgttaagttgaatacagcaaaatggaagatgccaagaacatcaagaagggccctgctccattctaccctctggaagatggaacagccggcgagcagctgcacaaggccatgaagagatatgccctggtgcctggcacaatcgccttcacagatgcccacatcgaggtggacatcacctacgccgagtacttcgagatgtctgtgcggctggccgaagctatgaagcgctacggcctgaacaccaaccaccggatcgtcgtgtgcagcgagaacagcctgcagttcttcatgcctgtgctgggcgccctgttcatcggagttgctgtggcccctgccaacgacatctacaacgagcgcgagctgctgaacagcatgggcatctctcagcccaccgtggtgttcgtgtccaagaagggactgcagaaaatcctgaacgtgcagaagaagctgcccatcatccagaaaatcatcatcatggacagcaagaccgactaccagggcttccagagcatgtacaccttcgtgaccagccatctgccacctggcttcaacgagtacgacttcgtgcccgagagcttcgaccgggacaagacaatcgccctgatcatgaacagcagcggctctaccggactgcccaaaggtgttgccctgcctcatagaactgcctgcgtgcggtttagccacgccagagatcccatcttcggcaaccagatcatccccgacacagccatcctgagcgtggtgccttttcaccacggcttcggcatgttcaccacactgggctacctgatctgcggcttcagagtggtgctgatgtaccgcttcgaggaagaactgttcctgcggagcctgcaggactacaagatccagtctgctctgctggtgcctactctgttcagcttctttgccaagagcaccctgatcgataagtacgacctgagcaacctgcacgagatcgcctctggcggagcccctctgtctaaagaagtgggagaagccgtcgccaagcggttccatctgcctggcatcagacaaggctatggcctgaccgagacaaccagcgccattctgattacccctgagggcgacgataagcctggcgctgtgggaaaagtggtgccattcttcgaggccaaggtggtggatctggacaccggcaaaacactgggcgttaaccagaggggcgagctgtgtgttagaggccctatgatcatgagcggctacgtgaacaaccccgaggccacaaacgctctgatcgacaaggatggatggctgcacagcggcgacattgcctactgggacgaagatgagcacttcttcatcgtggaccggctgaagtccctgatcaagtacaagggctaccaggtggccccagccgagctggaatctattctgctgcaacaccccaacatcttcgatgccggcgttgcaggactgcccgatgatgatgctggcgaactgccagctgctgtggtggtgctggaacacggcaagaccatgaccgagaaagaaatcgtggactacgtggccagccaagtgaccaccgccaagaaactgagaggcggcgtggtgtttgtggacgaggtgccaaaaggcctgacaggcaagctggacgcccggaagatcagagagatcctgattaaggccaagaaaggcggcaagatcgccgtgtaatagctaactagacaaaacaccaaacaaacaagctgcgagccacggacttaaataattgagccttaaagaagaaattctttaagtggatgctctcaaactcagggaaacctaaatctagttatagacaaggcaatcctgagccaagccgaagtagtaattagtaagttaaaaacaaccaaaaaaaatctagatatcggatcccggg

SEQ ID NO: 3348 - DNA, 2831 bp, synthetic construct
  source 1..2831: mol_type = other DNA; note = Ana1.127
taatacgactcactatagggagaccctcgaaaaaaaacacaaacaccacaatagatgacttacaactaatcggaaggtgcagagactcgacgggagctaccctaacgtcaagacgagggtaaagagagagtccaattctcaaagccaataggcagtagcgaaagctgcaagagaatgaaaatccgtggctcgcagcaaacaccaaacaaaacaaacacaaaccaacaaaaattaaaacagcctgtgggttgatcccacccacaggcccattgggcgctagcactctggtatcacggtacctttgtgcgcctgttttataccccctcccccaactgtaacttagaagtaacacacaccgatcaacagtcagcgtggcacaccagccacgttttgatcaagcacttctgttaccccggactgagtatcaatagactgctcacgcggttgaaggagaaagcgttcgttatccggccaactacttcgaaaaacctagtaacaccgtggaagttgcagagtgtttcgctcagcactaccccagtgtagatcaggtcgatgagtcaccgcattccccacgggcgaccgtggcggtggctgcgttggcggcctgcccatggggaaacccatgggacgctctaatacagacatggtgcgaagagtctattgagctagttggtagtcctccggcccctgaatgcggctaatcctaactgcggagcacacaccctcaagccagagggcagtgtgtcgtaacgggcaactctgcagcggaaccgactactttgggtgtccgtgtttcattttattcctatactggctgcttatggtgacaattgagagatcgttaccatatagctattggattggccatccggtgactaatagagctattatatatccctttgttgggtttataccacttagcttgaaagaggttaaaacattacaattcattgttaagttgaatacagcaaaatggaagatgccaagaacatcaagaagggccctgctccattctaccctctggaagatggaacagccggcgagcagctgcacaaggccatgaagagatatgccctggtgcctggcacaatcgccttcacagatgcccacatcgaggtggacatcacctacgccgagtacttcgagatgtctgtgcggctggccgaagctatgaagcgctacggcctgaacaccaaccaccggatcgtcgtgtgcagcgagaacagcctgcagttcttcatgcctgtgctgggcgccctgttcatcggagttgctgtggcccctgccaacgacatctacaacgagcgcgagctgctgaacagcatgggcatctctcagcccaccgtggtgttcgtgtccaagaagggactgcagaaaatcctgaacgtgcagaagaagctgcccatcatccagaaaatcatcatcatggacagcaagaccgactaccagggcttccagagcatgtacaccttcgtgaccagccatctgccacctggcttcaacgagtacgacttcgtgcccgagagcttcgaccgggacaagacaatcgccctgatcatgaacagcagcggctctaccggactgcccaaaggtgttgccctgcctcatagaactgcctgcgtgcggtttagccacgccagagatcccatcttcggcaaccagatcatccccgacacagccatcctgagcgtggtgccttttcaccacggcttcggcatgttcaccacactgggctacctgatctgcggcttcagagtggtgctgatgtaccgcttcgaggaagaactgttcctgcggagcctgcaggactacaagatccagtctgctctgctggtgcctactctgttcagcttctttgccaagagcaccctgatcgataagtacgacctgagcaacctgcacgagatcgcctctggcggagcccctctgtctaaagaagtgggagaagccgtcgccaagcggttccatctgcctggcatcagacaaggctatggcctgaccgagacaaccagcgccattctgattacccctgagggcgacgataagcctggcgctgtgggaaaagtggtgccattcttcgaggccaaggtggtggatctggacaccggcaaaacactgggcgttaaccagaggggcgagctgtgtgttagaggccctatgatcatgagcggctacgtgaacaaccccgaggccacaaacgctctgatcgacaaggatggatggctgcacagcggcgacattgcctactgggacgaagatgagcacttcttcatcgtggaccggctgaagtccctgatcaagtacaagggctaccaggtggccccagccgagctggaatctattctgctgcaacaccccaacatcttcgatgccggcgttgcaggactgcccgatgatgatgctggcgaactgccagctgctgtggtggtgctggaacacggcaagaccatgaccgagaaagaaatcgtggactacgtggccagccaagtgaccaccgccaagaaactgagaggcggcgtggtgtttgtggacgaggtgccaaaaggcctgacaggcaagctggacgcccggaagatcagagagatcctgattaaggccaagaaaggcggcaagatcgccgtgtaatagctaactagacaaaacaccaaacaaacaagctgcgagccacggacttaaataattgagccttaaagaagaaattctttaagtggatgctctcaaactcagggaaacctaaatctagttatagacaaggcaatcctgagccaagccgaagtagtaattagtaagttaaaaaacaaccaaaaaaaatctagatatcggatcccggg

SEQ ID NO: 3349 - DNA, 2831 bp, synthetic construct
  source 1..2831: mol_type = other DNA; note = Ana1.128
taatacgactcactatagggagaccctcgaaaaaaaacacaaacacccaatagatgacttacaactaatcggaaggtgcagagactcgacgggagctaccctaacgtcaagacgagggtaaagagagagtccaattctcaaagccaataggcagtagcgaaagctgcaagagaatgaaaatccgtggctcgcagcaaacaccaaacaaaacaaacacaaaccaacaaaaattaaaacagcctgtgggttgatcccacccacaggcccattgggcgctagcactctggtatcacggtacctttgtgcgcctgttttataccccctcccccaactgtaacttagaagtaacacacaccgatcaacagtcagcgtggcacaccagccacgttttgatcaagcacttctgttaccccggactgagtatcaatagactgctcacgcggttgaaggagaaagcgttcgttatccggccaactacttcgaaaaacctagtaacaccgtggaagttgcagagtgtttcgctcagcactaccccagtgtagatcaggtcgatgagtcaccgcattccccacgggcgaccgtggcggtggctgcgttggcggcctgcccatggggaaacccatgggacgctctaatacagacatggtgcgaagagtctattgagctagttggtagtcctccggcccctgaatgcggctaatcctaactgcggagcacacaccctcaagccagagggcagtgtgtcgtaacgggcaactctgcagcggaaccgactactttgggtgtccgtgtttcattttattcctatactggctgcttatggtgacaattgagagatcgttaccatatagctattggattggccatccggtgactaatagagctattatatatccctttgttgggtttataccacttagcttgaaagaggttaaaacattacaattcattgttaagttgaatacagcaaaatggaagatgccaagaacatcaagaagggccctgctccattctaccctctggaagatggaacagccggcgagcagctgcacaaggccatgaagagatatgccctggtgcctggcacaatcgccttcacagatgcccacatcgaggtggacatcacctacgccgagtacttcgagatgtctgtgcggctggccgaagctatgaagcgctacggcctgaacaccaaccaccggatcgtcgtgtgcagcgagaacagcctgcagttcttcatgcctgtgctgggcgccctgttcatcggagttgctgtggcccctgccaacgacatctacaacgagcgcgagctgctgaacagcatgggcatctctcagcccaccgtggtgttcgtgtccaagaagggactgcagaaaatcctgaacgtgcagaagaagctgcccatcatccagaaaatcatcatcatggacagcaagaccgactaccagggcttccagagcatgtacaccttcgtgaccagccatctgccacctggcttcaacgagtacgacttcgtgcccgagagcttcgaccgggacaagacaatcgccctgatcatgaacagcagcggctctaccggactgcccaaaggtgttgccctgcctcatagaactgcctgcgtgcggtttagccacgccagagatcccatcttcggcaaccagatcatccccgacacagccatcctgagcgtggtgccttttcaccacggcttcggcatgttcaccacactgggctacctgatctgcggcttcagagtggtgctgatgtaccgcttcgaggaagaactgttcctgcggagcctgcaggactacaagatccagtctgctctgctggtgcctactctgttcagcttctttgccaagagcaccctgatcgataagtacgacctgagcaacctgcacgagatcgcctctggcggagcccctctgtctaaagaagtgggagaagccgtcgccaagcggttccatctgcctggcatcagacaaggctatggcctgaccgagacaaccagcgccattctgattacccctgagggcgacgataagcctggcgctgtgggaaaagtggtgccattcttcgaggccaaggtggtggatctggacaccggcaaaacactgggcgttaaccagaggggcgagctgtgtgttagaggccctatgatcatgagcggctacgtgaacaaccccgaggccacaaacgctctgatcgacaaggatggatggctgcacagcggcgacattgcctactgggacgaagatgagcacttcttcatcgtggaccggctgaagtccctgatcaagtacaagggctaccaggtggccccagccgagctggaatctattctgctgcaacaccccaacatcttcgatgccggcgttgcaggactgcccgatgatgatgctggcgaactgccagctgctgtggtggtgctggaacacggcaagaccatgaccgagaaagaaatcgtggactacgtggccagccaagtgaccaccgccaagaaactgagaggcggcgtggtgtttgtggacgaggtgccaaaaggcctgacaggcaagctggacgcccggaagatcagagagatcctgattaaggccaagaaaggcggcaagatcgccgtgtaatagctaactagacaaaacaccaaacaaacaagctgcgagccacggacttaaataattgagccttaaagaagaaattctttaagtggatgctctcaaactcagggaaacctaaatctagttatagacaaggcaatcctgagccaagccgaagtagtaattagtaagttaaaaaaacaaccaaaaaaaatctagatatcggatcccggg

SEQ ID NO: 3350 - DNA, 2831 bp, synthetic construct
  source 1..2831: mol_type = other DNA; note = Ana1.129
taatacgactcactatagggagaccctcgaaaaaaaacacaaacaccaatagatgacttacaactaatcggaaggtgcagagactcgacgggagctaccctaacgtcaagacgagggtaaagagagagtccaattctcaaagccaataggcagtagcgaaagctgcaagagaatgaaaatccgtggctcgcagcaaacaccaaacaaaacaaacacaaaccaacaaaaattaaaacagcctgtgggttgatcccacccacaggcccattgggcgctagcactctggtatcacggtacctttgtgcgcctgttttataccccctcccccaactgtaacttagaagtaacacacaccgatcaacagtcagcgtggcacaccagccacgttttgatcaagcacttctgttaccccggactgagtatcaatagactgctcacgcggttgaaggagaaagcgttcgttatccggccaactacttcgaaaaacctagtaacaccgtggaagttgcagagtgtttcgctcagcactaccccagtgtagatcaggtcgatgagtcaccgcattccccacgggcgaccgtggcggtggctgcgttggcggcctgcccatggggaaacccatgggacgctctaatacagacatggtgcgaagagtctattgagctagttggtagtcctccggcccctgaatgcggctaatcctaactgcggagcacacaccctcaagccagagggcagtgtgtcgtaacgggcaactctgcagcggaaccgactactttgggtgtccgtgtttcattttattcctatactggctgcttatggtgacaattgagagatcgttaccatatagctattggattggccatccggtgactaatagagctattatatatccctttgttgggtttataccacttagcttgaaagaggttaaaacattacaattcattgttaagttgaatacagcaaaatggaagatgccaagaacatcaagaagggccctgctccattctaccctctggaagatggaacagccggcgagcagctgcacaaggccatgaagagatatgccctggtgcctggcacaatcgccttcacagatgcccacatcgaggtggacatcacctacgccgagtacttcgagatgtctgtgcggctggccgaagctatgaagcgctacggcctgaacaccaaccaccggatcgtcgtgtgcagcgagaacagcctgcagttcttcatgcctgtgctgggcgccctgttcatcggagttgctgtggcccctgccaacgacatctacaacgagcgcgagctgctgaacagcatgggcatctctcagcccaccgtggtgttcgtgtccaagaagggactgcagaaaatcctgaacgtgcagaagaagctgcccatcatccagaaaatcatcatcatggacagcaagaccgactaccagggcttccagagcatgtacaccttcgtgaccagccatctgccacctggcttcaacgagtacgacttcgtgcccgagagcttcgaccgggacaagacaatcgccctgatcatgaacagcagcggctctaccggactgcccaaaggtgttgccctgcctcatagaactgcctgcgtgcggtttagccacgccagagatcccatcttcggcaaccagatcatccccgacacagccatcctgagcgtggtgccttttcaccacggcttcggcatgttcaccacactgggctacctgatctgcggcttcagagtggtgctgatgtaccgcttcgaggaagaactgttcctgcggagcctgcaggactacaagatccagtctgctctgctggtgcctactctgttcagcttctttgccaagagcaccctgatcgataagtacgacctgagcaacctgcacgagatcgcctctggcggagcccctctgtctaaagaagtgggagaagccgtcgccaagcggttccatctgcctggcatcagacaaggctatggcctgaccgagacaaccagcgccattctgattacccctgagggcgacgataagcctggcgctgtgggaaaagtggtgccattcttcgaggccaaggtggtggatctggacaccggcaaaacactgggcgttaaccagaggggcgagctgtgtgttagaggccctatgatcatgagcggctacgtgaacaaccccgaggccacaaacgctctgatcgacaaggatggatggctgcacagcggcgacattgcctactgggacgaagatgagcacttcttcatcgtggaccggctgaagtccctgatcaagtacaagggctaccaggtggccccagccgagctggaatctattctgctgcaacaccccaacatcttcgatgccggcgttgcaggactgcccgatgatgatgctggcgaactgccagctgctgtggtggtgctggaacacggcaagaccatgaccgagaaagaaatcgtggactacgtggccagccaagtgaccaccgccaagaaactgagaggcggcgtggtgtttgtggacgaggtgccaaaaggcctgacaggcaagctggacgcccggaagatcagagagatcctgattaaggccaagaaaggcggcaagatcgccgtgtaatagctaactagacaaaacaccaaacaaacaagctgcgagccacggacttaaataattgagccttaaagaagaaattctttaagtggatgctctcaaactcagggaaacctaaatctagttatagacaaggcaatcctgagccaagccgaagtagtaattagtaagttaacaaaaacaaccaaaaaaaatctagatatcggatcccggg

SEQ ID NO: 3351 - DNA, 2831 bp, synthetic construct
  source 1..2831: mol_type = other DNA; note = Ana1.130
taatacgactcactatagggagaccctcgaaaaaaaacacaaacaccatagatgacttacaactaatcggaaggtgcagagactcgacgggagctaccctaacgtcaagacgagggtaaagagagagtccaattctcaaagccaataggcagtagcgaaagctgcaagagaatgaaaatccgtggctcgcagcaaacaccaaacaaaacaaacacaaaccaacaaaaattaaaacagcctgtgggttgatcccacccacaggcccattgggcgctagcactctggtatcacggtacctttgtgcgcctgttttataccccctcccccaactgtaacttagaagtaacacacaccgatcaacagtcagcgtggcacaccagccacgttttgatcaagcacttctgttaccccggactgagtatcaatagactgctcacgcggttgaaggagaaagcgttcgttatccggccaactacttcgaaaaacctagtaacaccgtggaagttgcagagtgtttcgctcagcactaccccagtgtagatcaggtcgatgagtcaccgcattccccacgggcgaccgtggcggtggctgcgttggcggcctgcccatggggaaacccatgggacgctctaatacagacatggtgcgaagagtctattgagctagttggtagtcctccggcccctgaatgcggctaatcctaactgcggagcacacaccctcaagccagagggcagtgtgtcgtaacgggcaactctgcagcggaaccgactactttgggtgtccgtgtttcattttattcctatactggctgcttatggtgacaattgagagatcgttaccatatagctattggattggccatccggtgactaatagagctattatatatccctttgttgggtttataccacttagcttgaaagaggttaaaacattacaattcattgttaagttgaatacagcaaaatggaagatgccaagaacatcaagaagggccctgctccattctaccctctggaagatggaacagccggcgagcagctgcacaaggccatgaagagatatgccctggtgcctggcacaatcgccttcacagatgcccacatcgaggtggacatcacctacgccgagtacttcgagatgtctgtgcggctggccgaagctatgaagcgctacggcctgaacaccaaccaccggatcgtcgtgtgcagcgagaacagcctgcagttcttcatgcctgtgctgggcgccctgttcatcggagttgctgtggcccctgccaacgacatctacaacgagcgcgagctgctgaacagcatgggcatctctcagcccaccgtggtgttcgtgtccaagaagggactgcagaaaatcctgaacgtgcagaagaagctgcccatcatccagaaaatcatcatcatggacagcaagaccgactaccagggcttccagagcatgtacaccttcgtgaccagccatctgccacctggcttcaacgagtacgacttcgtgcccgagagcttcgaccgggacaagacaatcgccctgatcatgaacagcagcggctctaccggactgcccaaaggtgttgccctgcctcatagaactgcctgcgtgcggtttagccacgccagagatcccatcttcggcaaccagatcatccccgacacagccatcctgagcgtggtgccttttcaccacggcttcggcatgttcaccacactgggctacctgatctgcggcttcagagtggtgctgatgtaccgcttcgaggaagaactgttcctgcggagcctgcaggactacaagatccagtctgctctgctggtgcctactctgttcagcttctttgccaagagcaccctgatcgataagtacgacctgagcaacctgcacgagatcgcctctggcggagcccctctgtctaaagaagtgggagaagccgtcgccaagcggttccatctgcctggcatcagacaaggctatggcctgaccgagacaaccagcgccattctgattacccctgagggcgacgataagcctggcgctgtgggaaaagtggtgccattcttcgaggccaaggtggtggatctggacaccggcaaaacactgggcgttaaccagaggggcgagctgtgtgttagaggccctatgatcatgagcggctacgtgaacaaccccgaggccacaaacgctctgatcgacaaggatggatggctgcacagcggcgacattgcctactgggacgaagatgagcacttcttcatcgtggaccggctgaagtccctgatcaagtacaagggctaccaggtggccccagccgagctggaatctattctgctgcaacaccccaacatcttcgatgccggcgttgcaggactgcccgatgatgatgctggcgaactgccagctgctgtggtggtgctggaacacggcaagaccatgaccgagaaagaaatcgtggactacgtggccagccaagtgaccaccgccaagaaactgagaggcggcgtggtgtttgtggacgaggtgccaaaaggcctgacaggcaagctggacgcccggaagatcagagagatcctgattaaggccaagaaaggcggcaagatcgccgtgtaatagctaactagacaaaacaccaaacaaacaagctgcgagccacggacttaaataattgagccttaaagaagaaattctttaagtggatgctctcaaactcagggaaacctaaatctagttatagacaaggcaatcctgagccaagccgaagtagtaattagtaagttaacaaaaaacaaccaaaaaaaatctagatatcggatcccggg

SEQ ID NO: 3352 - DNA, 2831 bp, synthetic construct
  source 1..2831: mol_type = other DNA; note = Ana1.131
taatacgactcactatagggagaccctcgaaaaaaaacacaaacacctagatgacttacaactaatcggaaggtgcagagactcgacgggagctaccctaacgtcaagacgagggtaaagagagagtccaattctcaaagccaataggcagtagcgaaagctgcaagagaatgaaaatccgtggctcgcagcaaacaccaaacaaaacaaacacaaaccaacaaaaattaaaacagcctgtgggttgatcccacccacaggcccattgggcgctagcactctggtatcacggtacctttgtgcgcctgttttataccccctcccccaactgtaacttagaagtaacacacaccgatcaacagtcagcgtggcacaccagccacgttttgatcaagcacttctgttaccccggactgagtatcaatagactgctcacgcggttgaaggagaaagcgttcgttatccggccaactacttcgaaaaacctagtaacaccgtggaagttgcagagtgtttcgctcagcactaccccagtgtagatcaggtcgatgagtcaccgcattccccacgggcgaccgtggcggtggctgcgttggcggcctgcccatggggaaacccatgggacgctctaatacagacatggtgcgaagagtctattgagctagttggtagtcctccggcccctgaatgcggctaatcctaactgcggagcacacaccctcaagccagagggcagtgtgtcgtaacgggcaactctgcagcggaaccgactactttgggtgtccgtgtttcattttattcctatactggctgcttatggtgacaattgagagatcgttaccatatagctattggattggccatccggtgactaatagagctattatatatccctttgttgggtttataccacttagcttgaaagaggttaaaacattacaattcattgttaagttgaatacagcaaaatggaagatgccaagaacatcaagaagggccctgctccattctaccctctggaagatggaacagccggcgagcagctgcacaaggccatgaagagatatgccctggtgcctggcacaatcgccttcacagatgcccacatcgaggtggacatcacctacgccgagtacttcgagatgtctgtgcggctggccgaagctatgaagcgctacggcctgaacaccaaccaccggatcgtcgtgtgcagcgagaacagcctgcagttcttcatgcctgtgctgggcgccctgttcatcggagttgctgtggcccctgccaacgacatctacaacgagcgcgagctgctgaacagcatgggcatctctcagcccaccgtggtgttcgtgtccaagaagggactgcagaaaatcctgaacgtgcagaagaagctgcccatcatccagaaaatcatcatcatggacagcaagaccgactaccagggcttccagagcatgtacaccttcgtgaccagccatctgccacctggcttcaacgagtacgacttcgtgcccgagagcttcgaccgggacaagacaatcgccctgatcatgaacagcagcggctctaccggactgcccaaaggtgttgccctgcctcatagaactgcctgcgtgcggtttagccacgccagagatcccatcttcggcaaccagatcatccccgacacagccatcctgagcgtggtgccttttcaccacggcttcggcatgttcaccacactgggctacctgatctgcggcttcagagtggtgctgatgtaccgcttcgaggaagaactgttcctgcggagcctgcaggactacaagatccagtctgctctgctggtgcctactctgttcagcttctttgccaagagcaccctgatcgataagtacgacctgagcaacctgcacgagatcgcctctggcggagcccctctgtctaaagaagtgggagaagccgtcgccaagcggttccatctgcctggcatcagacaaggctatggcctgaccgagacaaccagcgccattctgattacccctgagggcgacgataagcctggcgctgtgggaaaagtggtgccattcttcgaggccaaggtggtggatctggacaccggcaaaacactgggcgttaaccagaggggcgagctgtgtgttagaggccctatgatcatgagcggctacgtgaacaaccccgaggccacaaacgctctgatcgacaaggatggatggctgcacagcggcgacattgcctactgggacgaagatgagcacttcttcatcgtggaccggctgaagtccctgatcaagtacaagggctaccaggtggccccagccgagctggaatctattctgctgcaacaccccaacatcttcgatgccggcgttgcaggactgcccgatgatgatgctggcgaactgccagctgctgtggtggtgctggaacacggcaagaccatgaccgagaaagaaatcgtggactacgtggccagccaagtgaccaccgccaagaaactgagaggcggcgtggtgtttgtggacgaggtgccaaaaggcctgacaggcaagctggacgcccggaagatcagagagatcctgattaaggccaagaaaggcggcaagatcgccgtgtaatagctaactagacaaaacaccaaacaaacaagctgcgagccacggacttaaataattgagccttaaagaagaaattctttaagtggatgctctcaaactcagggaaacctaaatctagttatagacaaggcaatcctgagccaagccgaagtagtaattagtaagttaacaaaaaaacaaccaaaaaaaatctagatatcggatcccggg

SEQ ID NO: 3353 - DNA, 2831 bp, synthetic construct
  source 1..2831: mol_type = other DNA; note = Ana1.132
taatacgactcactatagggagaccctcgaaaaaaaacacaaacaccagatgacttacaactaatcggaaggtgcagagactcgacgggagctaccctaacgtcaagacgagggtaaagagagagtccaattctcaaagccaataggcagtagcgaaagctgcaagagaatgaaaatccgtggctcgcagcaaacaccaaacaaaacaaacacaaaccaacaaaaattaaaacagcctgtgggttgatcccacccacaggcccattgggcgctagcactctggtatcacggtacctttgtgcgcctgttttataccccctcccccaactgtaacttagaagtaacacacaccgatcaacagtcagcgtggcacaccagccacgttttgatcaagcacttctgttaccccggactgagtatcaatagactgctcacgcggttgaaggagaaagcgttcgttatccggccaactacttcgaaaaacctagtaacaccgtggaagttgcagagtgtttcgctcagcactaccccagtgtagatcaggtcgatgagtcaccgcattccccacgggcgaccgtggcggtggctgcgttggcggcctgcccatggggaaacccatgggacgctctaatacagacatggtgcgaagagtctattgagctagttggtagtcctccggcccctgaatgcggctaatcctaactgcggagcacacaccctcaagccagagggcagtgtgtcgtaacgggcaactctgcagcggaaccgactactttgggtgtccgtgtttcattttattcctatactggctgcttatggtgacaattgagagatcgttaccatatagctattggattggccatccggtgactaatagagctattatatatccctttgttgggtttataccacttagcttgaaagaggttaaaacattacaattcattgttaagttgaatacagcaaaatggaagatgccaagaacatcaagaagggccctgctccattctaccctctggaagatggaacagccggcgagcagctgcacaaggccatgaagagatatgccctggtgcctggcacaatcgccttcacagatgcccacatcgaggtggacatcacctacgccgagtacttcgagatgtctgtgcggctggccgaagctatgaagcgctacggcctgaacaccaaccaccggatcgtcgtgtgcagcgagaacagcctgcagttcttcatgcctgtgctgggcgccctgttcatcggagttgctgtggcccctgccaacgacatctacaacgagcgcgagctgctgaacagcatgggcatctctcagcccaccgtggtgttcgtgtccaagaagggactgcagaaaatcctgaacgtgcagaagaagctgcccatcatccagaaaatcatcatcatggacagcaagaccgactaccagggcttccagagcatgtacaccttcgtgaccagccatctgccacctggcttcaacgagtacgacttcgtgcccgagagcttcgaccgggacaagacaatcgccctgatcatgaacagcagcggctctaccggactgcccaaaggtgttgccctgcctcatagaactgcctgcgtgcggtttagccacgccagagatcccatcttcggcaaccagatcatccccgacacagccatcctgagcgtggtgccttttcaccacggcttcggcatgttcaccacactgggctacctgatctgcggcttcagagtggtgctgatgtaccgcttcgaggaagaactgttcctgcggagcctgcaggactacaagatccagtctgctctgctggtgcctactctgttcagcttctttgccaagagcaccctgatcgataagtacgacctgagcaacctgcacgagatcgcctctggcggagcccctctgtctaaagaagtgggagaagccgtcgccaagcggttccatctgcctggcatcagacaaggctatggcctgaccgagacaaccagcgccattctgattacccctgagggcgacgataagcctggcgctgtgggaaaagtggtgccattcttcgaggccaaggtggtggatctggacaccggcaaaacactgggcgttaaccagaggggcgagctgtgtgttagaggccctatgatcatgagcggctacgtgaacaaccccgaggccacaaacgctctgatcgacaaggatggatggctgcacagcggcgacattgcctactgggacgaagatgagcacttcttcatcgtggaccggctgaagtccctgatcaagtacaagggctaccaggtggccccagccgagctggaatctattctgctgcaacaccccaacatcttcgatgccggcgttgcaggactgcccgatgatgatgctggcgaactgccagctgctgtggtggtgctggaacacggcaagaccatgaccgagaaagaaatcgtggactacgtggccagccaagtgaccaccgccaagaaactgagaggcggcgtggtgtttgtggacgaggtgccaaaaggcctgacaggcaagctggacgcccggaagatcagagagatcctgattaaggccaagaaaggcggcaagatcgccgtgtaatagctaactagacaaaacaccaaacaaacaagctgcgagccacggacttaaataattgagccttaaagaagaaattctttaagtggatgctctcaaactcagggaaacctaaatctagttatagacaaggcaatcctgagccaagccgaagtagtaattagtaagttaacaataaaaacaaccaaaaaaaatctagatatcggatcccggg

SEQ ID NO: 3354 - DNA, 2831 bp, synthetic construct
  source 1..2831: mol_type = other DNA; note = Ana1.133
taatacgactcactatagggagaccctcgaaaaaaaacacaaacaccgatgacttacaactaatcggaaggtgcagagactcgacgggagctaccctaacgtcaagacgagggtaaagagagagtccaattctcaaagccaataggcagtagcgaaagctgcaagagaatgaaaatccgtggctcgcagcaaacaccaaacaaaacaaacacaaaccaacaaaaattaaaacagcctgtgggttgatcccacccacaggcccattgggcgctagcactctggtatcacggtacctttgtgcgcctgttttataccccctcccccaactgtaacttagaagtaacacacaccgatcaacagtcagcgtggcacaccagccacgttttgatcaagcacttctgttaccccggactgagtatcaatagactgctcacgcggttgaaggagaaagcgttcgttatccggccaactacttcgaaaaacctagtaacaccgtggaagttgcagagtgtttcgctcagcactaccccagtgtagatcaggtcgatgagtcaccgcattccccacgggcgaccgtggcggtggctgcgttggcggcctgcccatggggaaacccatgggacgctctaatacagacatggtgcgaagagtctattgagctagttggtagtcctccggcccctgaatgcggctaatcctaactgcggagcacacaccctcaagccagagggcagtgtgtcgtaacgggcaactctgcagcggaaccgactactttgggtgtccgtgtttcattttattcctatactggctgcttatggtgacaattgagagatcgttaccatatagctattggattggccatccggtgactaatagagctattatatatccctttgttgggtttataccacttagcttgaaagaggttaaaacattacaattcattgttaagttgaatacagcaaaatggaagatgccaagaacatcaagaagggccctgctccattctaccctctggaagatggaacagccggcgagcagctgcacaaggccatgaagagatatgccctggtgcctggcacaatcgccttcacagatgcccacatcgaggtggacatcacctacgccgagtacttcgagatgtctgtgcggctggccgaagctatgaagcgctacggcctgaacaccaaccaccggatcgtcgtgtgcagcgagaacagcctgcagttcttcatgcctgtgctgggcgccctgttcatcggagttgctgtggcccctgccaacgacatctacaacgagcgcgagctgctgaacagcatgggcatctctcagcccaccgtggtgttcgtgtccaagaagggactgcagaaaatcctgaacgtgcagaagaagctgcccatcatccagaaaatcatcatcatggacagcaagaccgactaccagggcttccagagcatgtacaccttcgtgaccagccatctgccacctggcttcaacgagtacgacttcgtgcccgagagcttcgaccgggacaagacaatcgccctgatcatgaacagcagcggctctaccggactgcccaaaggtgttgccctgcctcatagaactgcctgcgtgcggtttagccacgccagagatcccatcttcggcaaccagatcatccccgacacagccatcctgagcgtggtgccttttcaccacggcttcggcatgttcaccacactgggctacctgatctgcggcttcagagtggtgctgatgtaccgcttcgaggaagaactgttcctgcggagcctgcaggactacaagatccagtctgctctgctggtgcctactctgttcagcttctttgccaagagcaccctgatcgataagtacgacctgagcaacctgcacgagatcgcctctggcggagcccctctgtctaaagaagtgggagaagccgtcgccaagcggttccatctgcctggcatcagacaaggctatggcctgaccgagacaaccagcgccattctgattacccctgagggcgacgataagcctggcgctgtgggaaaagtggtgccattcttcgaggccaaggtggtggatctggacaccggcaaaacactgggcgttaaccagaggggcgagctgtgtgttagaggccctatgatcatgagcggctacgtgaacaaccccgaggccacaaacgctctgatcgacaaggatggatggctgcacagcggcgacattgcctactgggacgaagatgagcacttcttcatcgtggaccggctgaagtccctgatcaagtacaagggctaccaggtggccccagccgagctggaatctattctgctgcaacaccccaacatcttcgatgccggcgttgcaggactgcccgatgatgatgctggcgaactgccagctgctgtggtggtgctggaacacggcaagaccatgaccgagaaagaaatcgtggactacgtggccagccaagtgaccaccgccaagaaactgagaggcggcgtggtgtttgtggacgaggtgccaaaaggcctgacaggcaagctggacgcccggaagatcagagagatcctgattaaggccaagaaaggcggcaagatcgccgtgtaatagctaactagacaaaacaccaaacaaacaagctgcgagccacggacttaaataattgagccttaaagaagaaattctttaagtggatgctctcaaactcagggaaacctaaatctagttatagacaaggcaatcctgagccaagccgaagtagtaattagtaagttaacaataaaaaacaaccaaaaaaaatctagatatcggatcccggg

SEQ ID NO: 3355 - DNA, 2831 bp, synthetic construct
  source 1..2831: mol_type = other DNA; note = Ana1.134
taatacgactcactatagggagaccctcgaaaaaaaacacaaacaccatgacttacaactaatcggaaggtgcagagactcgacgggagctaccctaacgtcaagacgagggtaaagagagagtccaattctcaaagccaataggcagtagcgaaagctgcaagagaatgaaaatccgtggctcgcagcaaacaccaaacaaaacaaacacaaaccaacaaaaattaaaacagcctgtgggttgatcccacccacaggcccattgggcgctagcactctggtatcacggtacctttgtgcgcctgttttataccccctcccccaactgtaacttagaagtaacacacaccgatcaacagtcagcgtggcacaccagccacgttttgatcaagcacttctgttaccccggactgagtatcaatagactgctcacgcggttgaaggagaaagcgttcgttatccggccaactacttcgaaaaacctagtaacaccgtggaagttgcagagtgtttcgctcagcactaccccagtgtagatcaggtcgatgagtcaccgcattccccacgggcgaccgtggcggtggctgcgttggcggcctgcccatggggaaacccatgggacgctctaatacagacatggtgcgaagagtctattgagctagttggtagtcctccggcccctgaatgcggctaatcctaactgcggagcacacaccctcaagccagagggcagtgtgtcgtaacgggcaactctgcagcggaaccgactactttgggtgtccgtgtttcattttattcctatactggctgcttatggtgacaattgagagatcgttaccatatagctattggattggccatccggtgactaatagagctattatatatccctttgttgggtttataccacttagcttgaaagaggttaaaacattacaattcattgttaagttgaatacagcaaaatggaagatgccaagaacatcaagaagggccctgctccattctaccctctggaagatggaacagccggcgagcagctgcacaaggccatgaagagatatgccctggtgcctggcacaatcgccttcacagatgcccacatcgaggtggacatcacctacgccgagtacttcgagatgtctgtgcggctggccgaagctatgaagcgctacggcctgaacaccaaccaccggatcgtcgtgtgcagcgagaacagcctgcagttcttcatgcctgtgctgggcgccctgttcatcggagttgctgtggcccctgccaacgacatctacaacgagcgcgagctgctgaacagcatgggcatctctcagcccaccgtggtgttcgtgtccaagaagggactgcagaaaatcctgaacgtgcagaagaagctgcccatcatccagaaaatcatcatcatggacagcaagaccgactaccagggcttccagagcatgtacaccttcgtgaccagccatctgccacctggcttcaacgagtacgacttcgtgcccgagagcttcgaccgggacaagacaatcgccctgatcatgaacagcagcggctctaccggactgcccaaaggtgttgccctgcctcatagaactgcctgcgtgcggtttagccacgccagagatcccatcttcggcaaccagatcatccccgacacagccatcctgagcgtggtgccttttcaccacggcttcggcatgttcaccacactgggctacctgatctgcggcttcagagtggtgctgatgtaccgcttcgaggaagaactgttcctgcggagcctgcaggactacaagatccagtctgctctgctggtgcctactctgttcagcttctttgccaagagcaccctgatcgataagtacgacctgagcaacctgcacgagatcgcctctggcggagcccctctgtctaaagaagtgggagaagccgtcgccaagcggttccatctgcctggcatcagacaaggctatggcctgaccgagacaaccagcgccattctgattacccctgagggcgacgataagcctggcgctgtgggaaaagtggtgccattcttcgaggccaaggtggtggatctggacaccggcaaaacactgggcgttaaccagaggggcgagctgtgtgttagaggccctatgatcatgagcggctacgtgaacaaccccgaggccacaaacgctctgatcgacaaggatggatggctgcacagcggcgacattgcctactgggacgaagatgagcacttcttcatcgtggaccggctgaagtccctgatcaagtacaagggctaccaggtggccccagccgagctggaatctattctgctgcaacaccccaacatcttcgatgccggcgttgcaggactgcccgatgatgatgctggcgaactgccagctgctgtggtggtgctggaacacggcaagaccatgaccgagaaagaaatcgtggactacgtggccagccaagtgaccaccgccaagaaactgagaggcggcgtggtgtttgtggacgaggtgccaaaaggcctgacaggcaagctggacgcccggaagatcagagagatcctgattaaggccaagaaaggcggcaagatcgccgtgtaatagctaactagacaaaacaccaaacaaacaagctgcgagccacggacttaaataattgagccttaaagaagaaattctttaagtggatgctctcaaactcagggaaacctaaatctagttatagacaaggcaatcctgagccaagccgaagtagtaattagtaagttaacaatagaaaaacaaccaaaaaaaatctagatatcggatcccggg

SEQ ID NO: 3356 - DNA, 2831 bp, synthetic construct
  source 1..2831: mol_type = other DNA; note = Ana1.135
taatacgactcactatagggagaccctcgaaaaaaaacacaaacacctgacttacaactaatcggaaggtgcagagactcgacgggagctaccctaacgtcaagacgagggtaaagagagagtccaattctcaaagccaataggcagtagcgaaagctgcaagagaatgaaaatccgtggctcgcagcaaacaccaaacaaaacaaacacaaaccaacaaaaattaaaacagcctgtgggttgatcccacccacaggcccattgggcgctagcactctggtatcacggtacctttgtgcgcctgttttataccccctcccccaactgtaacttagaagtaacacacaccgatcaacagtcagcgtggcacaccagccacgttttgatcaagcacttctgttaccccggactgagtatcaatagactgctcacgcggttgaaggagaaagcgttcgttatccggccaactacttcgaaaaacctagtaacaccgtggaagttgcagagtgtttcgctcagcactaccccagtgtagatcaggtcgatgagtcaccgcattccccacgggcgaccgtggcggtggctgcgttggcggcctgcccatggggaaacccatgggacgctctaatacagacatggtgcgaagagtctattgagctagttggtagtcctccggcccctgaatgcggctaatcctaactgcggagcacacaccctcaagccagagggcagtgtgtcgtaacgggcaactctgcagcggaaccgactactttgggtgtccgtgtttcattttattcctatactggctgcttatggtgacaattgagagatcgttaccatatagctattggattggccatccggtgactaatagagctattatatatccctttgttgggtttataccacttagcttgaaagaggttaaaacattacaattcattgttaagttgaatacagcaaaatggaagatgccaagaacatcaagaagggccctgctccattctaccctctggaagatggaacagccggcgagcagctgcacaaggccatgaagagatatgccctggtgcctggcacaatcgccttcacagatgcccacatcgaggtggacatcacctacgccgagtacttcgagatgtctgtgcggctggccgaagctatgaagcgctacggcctgaacaccaaccaccggatcgtcgtgtgcagcgagaacagcctgcagttcttcatgcctgtgctgggcgccctgttcatcggagttgctgtggcccctgccaacgacatctacaacgagcgcgagctgctgaacagcatgggcatctctcagcccaccgtggtgttcgtgtccaagaagggactgcagaaaatcctgaacgtgcagaagaagctgcccatcatccagaaaatcatcatcatggacagcaagaccgactaccagggcttccagagcatgtacaccttcgtgaccagccatctgccacctggcttcaacgagtacgacttcgtgcccgagagcttcgaccgggacaagacaatcgccctgatcatgaacagcagcggctctaccggactgcccaaaggtgttgccctgcctcatagaactgcctgcgtgcggtttagccacgccagagatcccatcttcggcaaccagatcatccccgacacagccatcctgagcgtggtgccttttcaccacggcttcggcatgttcaccacactgggctacctgatctgcggcttcagagtggtgctgatgtaccgcttcgaggaagaactgttcctgcggagcctgcaggactacaagatccagtctgctctgctggtgcctactctgttcagcttctttgccaagagcaccctgatcgataagtacgacctgagcaacctgcacgagatcgcctctggcggagcccctctgtctaaagaagtgggagaagccgtcgccaagcggttccatctgcctggcatcagacaaggctatggcctgaccgagacaaccagcgccattctgattacccctgagggcgacgataagcctggcgctgtgggaaaagtggtgccattcttcgaggccaaggtggtggatctggacaccggcaaaacactgggcgttaaccagaggggcgagctgtgtgttagaggccctatgatcatgagcggctacgtgaacaaccccgaggccacaaacgctctgatcgacaaggatggatggctgcacagcggcgacattgcctactgggacgaagatgagcacttcttcatcgtggaccggctgaagtccctgatcaagtacaagggctaccaggtggccccagccgagctggaatctattctgctgcaacaccccaacatcttcgatgccggcgttgcaggactgcccgatgatgatgctggcgaactgccagctgctgtggtggtgctggaacacggcaagaccatgaccgagaaagaaatcgtggactacgtggccagccaagtgaccaccgccaagaaactgagaggcggcgtggtgtttgtggacgaggtgccaaaaggcctgacaggcaagctggacgcccggaagatcagagagatcctgattaaggccaagaaaggcggcaagatcgccgtgtaatagctaactagacaaaacaccaaacaaacaagctgcgagccacggacttaaataattgagccttaaagaagaaattctttaagtggatgctctcaaactcagggaaacctaaatctagttatagacaaggcaatcctgagccaagccgaagtagtaattagtaagttaacaatagaaaaaacaaccaaaaaaaatctagatatcggatcccggg

SEQ ID NO: 3357 - DNA, 2831 bp, synthetic construct
  source 1..2831: mol_type = other DNA; note = Ana1.137
taatacgactcactatagggagaccctcgaaaaaaaacacaaacaccacttacaactaatcggaaggtgcagagactcgacgggagctaccctaacgtcaagacgagggtaaagagagagtccaattctcaaagccaataggcagtagcgaaagctgcaagagaatgaaaatccgtggctcgcagcaaacaccaaacaaaacaaacacaaaccaacaaaaattaaaacagcctgtgggttgatcccacccacaggcccattgggcgctagcactctggtatcacggtacctttgtgcgcctgttttataccccctcccccaactgtaacttagaagtaacacacaccgatcaacagtcagcgtggcacaccagccacgttttgatcaagcacttctgttaccccggactgagtatcaatagactgctcacgcggttgaaggagaaagcgttcgttatccggccaactacttcgaaaaacctagtaacaccgtggaagttgcagagtgtttcgctcagcactaccccagtgtagatcaggtcgatgagtcaccgcattccccacgggcgaccgtggcggtggctgcgttggcggcctgcccatggggaaacccatgggacgctctaatacagacatggtgcgaagagtctattgagctagttggtagtcctccggcccctgaatgcggctaatcctaactgcggagcacacaccctcaagccagagggcagtgtgtcgtaacgggcaactctgcagcggaaccgactactttgggtgtccgtgtttcattttattcctatactggctgcttatggtgacaattgagagatcgttaccatatagctattggattggccatccggtgactaatagagctattatatatccctttgttgggtttataccacttagcttgaaagaggttaaaacattacaattcattgttaagttgaatacagcaaaatggaagatgccaagaacatcaagaagggccctgctccattctaccctctggaagatggaacagccggcgagcagctgcacaaggccatgaagagatatgccctggtgcctggcacaatcgccttcacagatgcccacatcgaggtggacatcacctacgccgagtacttcgagatgtctgtgcggctggccgaagctatgaagcgctacggcctgaacaccaaccaccggatcgtcgtgtgcagcgagaacagcctgcagttcttcatgcctgtgctgggcgccctgttcatcggagttgctgtggcccctgccaacgacatctacaacgagcgcgagctgctgaacagcatgggcatctctcagcccaccgtggtgttcgtgtccaagaagggactgcagaaaatcctgaacgtgcagaagaagctgcccatcatccagaaaatcatcatcatggacagcaagaccgactaccagggcttccagagcatgtacaccttcgtgaccagccatctgccacctggcttcaacgagtacgacttcgtgcccgagagcttcgaccgggacaagacaatcgccctgatcatgaacagcagcggctctaccggactgcccaaaggtgttgccctgcctcatagaactgcctgcgtgcggtttagccacgccagagatcccatcttcggcaaccagatcatccccgacacagccatcctgagcgtggtgccttttcaccacggcttcggcatgttcaccacactgggctacctgatctgcggcttcagagtggtgctgatgtaccgcttcgaggaagaactgttcctgcggagcctgcaggactacaagatccagtctgctctgctggtgcctactctgttcagcttctttgccaagagcaccctgatcgataagtacgacctgagcaacctgcacgagatcgcctctggcggagcccctctgtctaaagaagtgggagaagccgtcgccaagcggttccatctgcctggcatcagacaaggctatggcctgaccgagacaaccagcgccattctgattacccctgagggcgacgataagcctggcgctgtgggaaaagtggtgccattcttcgaggccaaggtggtggatctggacaccggcaaaacactgggcgttaaccagaggggcgagctgtgtgttagaggccctatgatcatgagcggctacgtgaacaaccccgaggccacaaacgctctgatcgacaaggatggatggctgcacagcggcgacattgcctactgggacgaagatgagcacttcttcatcgtggaccggctgaagtccctgatcaagtacaagggctaccaggtggccccagccgagctggaatctattctgctgcaacaccccaacatcttcgatgccggcgttgcaggactgcccgatgatgatgctggcgaactgccagctgctgtggtggtgctggaacacggcaagaccatgaccgagaaagaaatcgtggactacgtggccagccaagtgaccaccgccaagaaactgagaggcggcgtggtgtttgtggacgaggtgccaaaaggcctgacaggcaagctggacgcccggaagatcagagagatcctgattaaggccaagaaaggcggcaagatcgccgtgtaatagctaactagacaaaacaccaaacaaacaagctgcgagccacggacttaaataattgagccttaaagaagaaattctttaagtggatgctctcaaactcagggaaacctaaatctagttatagacaaggcaatcctgagccaagccgaagtagtaattagtaagttaacaatagatgaaaaacaaccaaaaaaaatctagatatcggatcccggg

SEQ ID NO: 3358 - DNA, 2831 bp, synthetic construct
  source 1..2831: mol_type = other DNA; note = Ana1.138
taatacgactcactatagggagaccctcgaaaaaaaacacaaacacccttacaactaatcggaaggtgcagagactcgacgggagctaccctaacgtcaagacgagggtaaagagagagtccaattctcaaagccaataggcagtagcgaaagctgcaagagaatgaaaatccgtggctcgcagcaaacaccaaacaaaacaaacacaaaccaacaaaaattaaaacagcctgtgggttgatcccacccacaggcccattgggcgctagcactctggtatcacggtacctttgtgcgcctgttttataccccctcccccaactgtaacttagaagtaacacacaccgatcaacagtcagcgtggcacaccagccacgttttgatcaagcacttctgttaccccggactgagtatcaatagactgctcacgcggttgaaggagaaagcgttcgttatccggccaactacttcgaaaaacctagtaacaccgtggaagttgcagagtgtttcgctcagcactaccccagtgtagatcaggtcgatgagtcaccgcattccccacgggcgaccgtggcggtggctgcgttggcggcctgcccatggggaaacccatgggacgctctaatacagacatggtgcgaagagtctattgagctagttggtagtcctccggcccctgaatgcggctaatcctaactgcggagcacacaccctcaagccagagggcagtgtgtcgtaacgggcaactctgcagcggaaccgactactttgggtgtccgtgtttcattttattcctatactggctgcttatggtgacaattgagagatcgttaccatatagctattggattggccatccggtgactaatagagctattatatatccctttgttgggtttataccacttagcttgaaagaggttaaaacattacaattcattgttaagttgaatacagcaaaatggaagatgccaagaacatcaagaagggccctgctccattctaccctctggaagatggaacagccggcgagcagctgcacaaggccatgaagagatatgccctggtgcctggcacaatcgccttcacagatgcccacatcgaggtggacatcacctacgccgagtacttcgagatgtctgtgcggctggccgaagctatgaagcgctacggcctgaacaccaaccaccggatcgtcgtgtgcagcgagaacagcctgcagttcttcatgcctgtgctgggcgccctgttcatcggagttgctgtggcccctgccaacgacatctacaacgagcgcgagctgctgaacagcatgggcatctctcagcccaccgtggtgttcgtgtccaagaagggactgcagaaaatcctgaacgtgcagaagaagctgcccatcatccagaaaatcatcatcatggacagcaagaccgactaccagggcttccagagcatgtacaccttcgtgaccagccatctgccacctggcttcaacgagtacgacttcgtgcccgagagcttcgaccgggacaagacaatcgccctgatcatgaacagcagcggctctaccggactgcccaaaggtgttgccctgcctcatagaactgcctgcgtgcggtttagccacgccagagatcccatcttcggcaaccagatcatccccgacacagccatcctgagcgtggtgccttttcaccacggcttcggcatgttcaccacactgggctacctgatctgcggcttcagagtggtgctgatgtaccgcttcgaggaagaactgttcctgcggagcctgcaggactacaagatccagtctgctctgctggtgcctactctgttcagcttctttgccaagagcaccctgatcgataagtacgacctgagcaacctgcacgagatcgcctctggcggagcccctctgtctaaagaagtgggagaagccgtcgccaagcggttccatctgcctggcatcagacaaggctatggcctgaccgagacaaccagcgccattctgattacccctgagggcgacgataagcctggcgctgtgggaaaagtggtgccattcttcgaggccaaggtggtggatctggacaccggcaaaacactgggcgttaaccagaggggcgagctgtgtgttagaggccctatgatcatgagcggctacgtgaacaaccccgaggccacaaacgctctgatcgacaaggatggatggctgcacagcggcgacattgcctactgggacgaagatgagcacttcttcatcgtggaccggctgaagtccctgatcaagtacaagggctaccaggtggccccagccgagctggaatctattctgctgcaacaccccaacatcttcgatgccggcgttgcaggactgcccgatgatgatgctggcgaactgccagctgctgtggtggtgctggaacacggcaagaccatgaccgagaaagaaatcgtggactacgtggccagccaagtgaccaccgccaagaaactgagaggcggcgtggtgtttgtggacgaggtgccaaaaggcctgacaggcaagctggacgcccggaagatcagagagatcctgattaaggccaagaaaggcggcaagatcgccgtgtaatagctaactagacaaaacaccaaacaaacaagctgcgagccacggacttaaataattgagccttaaagaagaaattctttaagtggatgctctcaaactcagggaaacctaaatctagttatagacaaggcaatcctgagccaagccgaagtagtaattagtaagttaacaatagatgaaaaaacaaccaaaaaaaatctagatatcggatcccggg

SEQ ID NO: 3359 - DNA, 2831 bp, synthetic construct
  source 1..2831: mol_type = other DNA; note = Ana1.139
taatacgactcactatagggagaccctcgaaaaaaaacacaaacaccttacaactaatcggaaggtgcagagactcgacgggagctaccctaacgtcaagacgagggtaaagagagagtccaattctcaaagccaataggcagtagcgaaagctgcaagagaatgaaaatccgtggctcgcagcaaacaccaaacaaaacaaacacaaaccaacaaaaattaaaacagcctgtgggttgatcccacccacaggcccattgggcgctagcactctggtatcacggtacctttgtgcgcctgttttataccccctcccccaactgtaacttagaagtaacacacaccgatcaacagtcagcgtggcacaccagccacgttttgatcaagcacttctgttaccccggactgagtatcaatagactgctcacgcggttgaaggagaaagcgttcgttatccggccaactacttcgaaaaacctagtaacaccgtggaagttgcagagtgtttcgctcagcactaccccagtgtagatcaggtcgatgagtcaccgcattccccacgggcgaccgtggcggtggctgcgttggcggcctgcccatggggaaacccatgggacgctctaatacagacatggtgcgaagagtctattgagctagttggtagtcctccggcccctgaatgcggctaatcctaactgcggagcacacaccctcaagccagagggcagtgtgtcgtaacgggcaactctgcagcggaaccgactactttgggtgtccgtgtttcattttattcctatactggctgcttatggtgacaattgagagatcgttaccatatagctattggattggccatccggtgactaatagagctattatatatccctttgttgggtttataccacttagcttgaaagaggttaaaacattacaattcattgttaagttgaatacagcaaaatggaagatgccaagaacatcaagaagggccctgctccattctaccctctggaagatggaacagccggcgagcagctgcacaaggccatgaagagatatgccctggtgcctggcacaatcgccttcacagatgcccacatcgaggtggacatcacctacgccgagtacttcgagatgtctgtgcggctggccgaagctatgaagcgctacggcctgaacaccaaccaccggatcgtcgtgtgcagcgagaacagcctgcagttcttcatgcctgtgctgggcgccctgttcatcggagttgctgtggcccctgccaacgacatctacaacgagcgcgagctgctgaacagcatgggcatctctcagcccaccgtggtgttcgtgtccaagaagggactgcagaaaatcctgaacgtgcagaagaagctgcccatcatccagaaaatcatcatcatggacagcaagaccgactaccagggcttccagagcatgtacaccttcgtgaccagccatctgccacctggcttcaacgagtacgacttcgtgcccgagagcttcgaccgggacaagacaatcgccctgatcatgaacagcagcggctctaccggactgcccaaaggtgttgccctgcctcatagaactgcctgcgtgcggtttagccacgccagagatcccatcttcggcaaccagatcatccccgacacagccatcctgagcgtggtgccttttcaccacggcttcggcatgttcaccacactgggctacctgatctgcggcttcagagtggtgctgatgtaccgcttcgaggaagaactgttcctgcggagcctgcaggactacaagatccagtctgctctgctggtgcctactctgttcagcttctttgccaagagcaccctgatcgataagtacgacctgagcaacctgcacgagatcgcctctggcggagcccctctgtctaaagaagtgggagaagccgtcgccaagcggttccatctgcctggcatcagacaaggctatggcctgaccgagacaaccagcgccattctgattacccctgagggcgacgataagcctggcgctgtgggaaaagtggtgccattcttcgaggccaaggtggtggatctggacaccggcaaaacactgggcgttaaccagaggggcgagctgtgtgttagaggccctatgatcatgagcggctacgtgaacaaccccgaggccacaaacgctctgatcgacaaggatggatggctgcacagcggcgacattgcctactgggacgaagatgagcacttcttcatcgtggaccggctgaagtccctgatcaagtacaagggctaccaggtggccccagccgagctggaatctattctgctgcaacaccccaacatcttcgatgccggcgttgcaggactgcccgatgatgatgctggcgaactgccagctgctgtggtggtgctggaacacggcaagaccatgaccgagaaagaaatcgtggactacgtggccagccaagtgaccaccgccaagaaactgagaggcggcgtggtgtttgtggacgaggtgccaaaaggcctgacaggcaagctggacgcccggaagatcagagagatcctgattaaggccaagaaaggcggcaagatcgccgtgtaatagctaactagacaaaacaccaaacaaacaagctgcgagccacggacttaaataattgagccttaaagaagaaattctttaagtggatgctctcaaactcagggaaacctaaatctagttatagacaaggcaatcctgagccaagccgaagtagtaattagtaagttaacaatagatgacaaaaacaaccaaaaaaaatctagatatcggatcccggg

SEQ ID NO: 3360 - DNA, 2831 bp, synthetic construct
  source 1..2831: mol_type = other DNA; note = Ana1.140
taatacgactcactatagggagaccctcgaaaaaaaacacaaacacctacaactaatcggaaggtgcagagactcgacgggagctaccctaacgtcaagacgagggtaaagagagagtccaattctcaaagccaataggcagtagcgaaagctgcaagagaatgaaaatccgtggctcgcagcaaacaccaaacaaaacaaacacaaaccaacaaaaattaaaacagcctgtgggttgatcccacccacaggcccattgggcgctagcactctggtatcacggtacctttgtgcgcctgttttataccccctcccccaactgtaacttagaagtaacacacaccgatcaacagtcagcgtggcacaccagccacgttttgatcaagcacttctgttaccccggactgagtatcaatagactgctcacgcggttgaaggagaaagcgttcgttatccggccaactacttcgaaaaacctagtaacaccgtggaagttgcagagtgtttcgctcagcactaccccagtgtagatcaggtcgatgagtcaccgcattccccacgggcgaccgtggcggtggctgcgttggcggcctgcccatggggaaacccatgggacgctctaatacagacatggtgcgaagagtctattgagctagttggtagtcctccggcccctgaatgcggctaatcctaactgcggagcacacaccctcaagccagagggcagtgtgtcgtaacgggcaactctgcagcggaaccgactactttgggtgtccgtgtttcattttattcctatactggctgcttatggtgacaattgagagatcgttaccatatagctattggattggccatccggtgactaatagagctattatatatccctttgttgggtttataccacttagcttgaaagaggttaaaacattacaattcattgttaagttgaatacagcaaaatggaagatgccaagaacatcaagaagggccctgctccattctaccctctggaagatggaacagccggcgagcagctgcacaaggccatgaagagatatgccctggtgcctggcacaatcgccttcacagatgcccacatcgaggtggacatcacctacgccgagtacttcgagatgtctgtgcggctggccgaagctatgaagcgctacggcctgaacaccaaccaccggatcgtcgtgtgcagcgagaacagcctgcagttcttcatgcctgtgctgggcgccctgttcatcggagttgctgtggcccctgccaacgacatctacaacgagcgcgagctgctgaacagcatgggcatctctcagcccaccgtggtgttcgtgtccaagaagggactgcagaaaatcctgaacgtgcagaagaagctgcccatcatccagaaaatcatcatcatggacagcaagaccgactaccagggcttccagagcatgtacaccttcgtgaccagccatctgccacctggcttcaacgagtacgacttcgtgcccgagagcttcgaccgggacaagacaatcgccctgatcatgaacagcagcggctctaccggactgcccaaaggtgttgccctgcctcatagaactgcctgcgtgcggtttagccacgccagagatcccatcttcggcaaccagatcatccccgacacagccatcctgagcgtggtgccttttcaccacggcttcggcatgttcaccacactgggctacctgatctgcggcttcagagtggtgctgatgtaccgcttcgaggaagaactgttcctgcggagcctgcaggactacaagatccagtctgctctgctggtgcctactctgttcagcttctttgccaagagcaccctgatcgataagtacgacctgagcaacctgcacgagatcgcctctggcggagcccctctgtctaaagaagtgggagaagccgtcgccaagcggttccatctgcctggcatcagacaaggctatggcctgaccgagacaaccagcgccattctgattacccctgagggcgacgataagcctggcgctgtgggaaaagtggtgccattcttcgaggccaaggtggtggatctggacaccggcaaaacactgggcgttaaccagaggggcgagctgtgtgttagaggccctatgatcatgagcggctacgtgaacaaccccgaggccacaaacgctctgatcgacaaggatggatggctgcacagcggcgacattgcctactgggacgaagatgagcacttcttcatcgtggaccggctgaagtccctgatcaagtacaagggctaccaggtggccccagccgagctggaatctattctgctgcaacaccccaacatcttcgatgccggcgttgcaggactgcccgatgatgatgctggcgaactgccagctgctgtggtggtgctggaacacggcaagaccatgaccgagaaagaaatcgtggactacgtggccagccaagtgaccaccgccaagaaactgagaggcggcgtggtgtttgtggacgaggtgccaaaaggcctgacaggcaagctggacgcccggaagatcagagagatcctgattaaggccaagaaaggcggcaagatcgccgtgtaatagctaactagacaaaacaccaaacaaacaagctgcgagccacggacttaaataattgagccttaaagaagaaattctttaagtggatgctctcaaactcagggaaacctaaatctagttatagacaaggcaatcctgagccaagccgaagtagtaattagtaagttaacaatagatgactaaaaacaaccaaaaaaaatctagatatcggatcccggg

SEQ ID NO: 3361 - DNA, 2831 bp, synthetic construct
  source 1..2831: mol_type = other DNA; note = Ana1.141
taatacgactcactatagggagaccctcgaaaaaaaacacaaacaccacaactaatcggaaggtgcagagactcgacgggagctaccctaacgtcaagacgagggtaaagagagagtccaattctcaaagccaataggcagtagcgaaagctgcaagagaatgaaaatccgtggctcgcagcaaacaccaaacaaaacaaacacaaaccaacaaaaattaaaacagcctgtgggttgatcccacccacaggcccattgggcgctagcactctggtatcacggtacctttgtgcgcctgttttataccccctcccccaactgtaacttagaagtaacacacaccgatcaacagtcagcgtggcacaccagccacgttttgatcaagcacttctgttaccccggactgagtatcaatagactgctcacgcggttgaaggagaaagcgttcgttatccggccaactacttcgaaaaacctagtaacaccgtggaagttgcagagtgtttcgctcagcactaccccagtgtagatcaggtcgatgagtcaccgcattccccacgggcgaccgtggcggtggctgcgttggcggcctgcccatggggaaacccatgggacgctctaatacagacatggtgcgaagagtctattgagctagttggtagtcctccggcccctgaatgcggctaatcctaactgcggagcacacaccctcaagccagagggcagtgtgtcgtaacgggcaactctgcagcggaaccgactactttgggtgtccgtgtttcattttattcctatactggctgcttatggtgacaattgagagatcgttaccatatagctattggattggccatccggtgactaatagagctattatatatccctttgttgggtttataccacttagcttgaaagaggttaaaacattacaattcattgttaagttgaatacagcaaaatggaagatgccaagaacatcaagaagggccctgctccattctaccctctggaagatggaacagccggcgagcagctgcacaaggccatgaagagatatgccctggtgcctggcacaatcgccttcacagatgcccacatcgaggtggacatcacctacgccgagtacttcgagatgtctgtgcggctggccgaagctatgaagcgctacggcctgaacaccaaccaccggatcgtcgtgtgcagcgagaacagcctgcagttcttcatgcctgtgctgggcgccctgttcatcggagttgctgtggcccctgccaacgacatctacaacgagcgcgagctgctgaacagcatgggcatctctcagcccaccgtggtgttcgtgtccaagaagggactgcagaaaatcctgaacgtgcagaagaagctgcccatcatccagaaaatcatcatcatggacagcaagaccgactaccagggcttccagagcatgtacaccttcgtgaccagccatctgccacctggcttcaacgagtacgacttcgtgcccgagagcttcgaccgggacaagacaatcgccctgatcatgaacagcagcggctctaccggactgcccaaaggtgttgccctgcctcatagaactgcctgcgtgcggtttagccacgccagagatcccatcttcggcaaccagatcatccccgacacagccatcctgagcgtggtgccttttcaccacggcttcggcatgttcaccacactgggctacctgatctgcggcttcagagtggtgctgatgtaccgcttcgaggaagaactgttcctgcggagcctgcaggactacaagatccagtctgctctgctggtgcctactctgttcagcttctttgccaagagcaccctgatcgataagtacgacctgagcaacctgcacgagatcgcctctggcggagcccctctgtctaaagaagtgggagaagccgtcgccaagcggttccatctgcctggcatcagacaaggctatggcctgaccgagacaaccagcgccattctgattacccctgagggcgacgataagcctggcgctgtgggaaaagtggtgccattcttcgaggccaaggtggtggatctggacaccggcaaaacactgggcgttaaccagaggggcgagctgtgtgttagaggccctatgatcatgagcggctacgtgaacaaccccgaggccacaaacgctctgatcgacaaggatggatggctgcacagcggcgacattgcctactgggacgaagatgagcacttcttcatcgtggaccggctgaagtccctgatcaagtacaagggctaccaggtggccccagccgagctggaatctattctgctgcaacaccccaacatcttcgatgccggcgttgcaggactgcccgatgatgatgctggcgaactgccagctgctgtggtggtgctggaacacggcaagaccatgaccgagaaagaaatcgtggactacgtggccagccaagtgaccaccgccaagaaactgagaggcggcgtggtgtttgtggacgaggtgccaaaaggcctgacaggcaagctggacgcccggaagatcagagagatcctgattaaggccaagaaaggcggcaagatcgccgtgtaatagctaactagacaaaacaccaaacaaacaagctgcgagccacggacttaaataattgagccttaaagaagaaattctttaagtggatgctctcaaactcagggaaacctaaatctagttatagacaaggcaatcctgagccaagccgaagtagtaattagtaagttaacaatagatgacttaaaaacaaccaaaaaaaatctagatatcggatcccggg

SEQ ID NO: 3362 - DNA, 2831 bp, synthetic construct
  source 1..2831: mol_type = other DNA; note = Ana1.142
taatacgactcactatagggagaccctcgaaaaaaaacacaaacacccaactaatcggaaggtgcagagactcgacgggagctaccctaacgtcaagacgagggtaaagagagagtccaattctcaaagccaataggcagtagcgaaagctgcaagagaatgaaaatccgtggctcgcagcaaacaccaaacaaaacaaacacaaaccaacaaaaattaaaacagcctgtgggttgatcccacccacaggcccattgggcgctagcactctggtatcacggtacctttgtgcgcctgttttataccccctcccccaactgtaacttagaagtaacacacaccgatcaacagtcagcgtggcacaccagccacgttttgatcaagcacttctgttaccccggactgagtatcaatagactgctcacgcggttgaaggagaaagcgttcgttatccggccaactacttcgaaaaacctagtaacaccgtggaagttgcagagtgtttcgctcagcactaccccagtgtagatcaggtcgatgagtcaccgcattccccacgggcgaccgtggcggtggctgcgttggcggcctgcccatggggaaacccatgggacgctctaatacagacatggtgcgaagagtctattgagctagttggtagtcctccggcccctgaatgcggctaatcctaactgcggagcacacaccctcaagccagagggcagtgtgtcgtaacgggcaactctgcagcggaaccgactactttgggtgtccgtgtttcattttattcctatactggctgcttatggtgacaattgagagatcgttaccatatagctattggattggccatccggtgactaatagagctattatatatccctttgttgggtttataccacttagcttgaaagaggttaaaacattacaattcattgttaagttgaatacagcaaaatggaagatgccaagaacatcaagaagggccctgctccattctaccctctggaagatggaacagccggcgagcagctgcacaaggccatgaagagatatgccctggtgcctggcacaatcgccttcacagatgcccacatcgaggtggacatcacctacgccgagtacttcgagatgtctgtgcggctggccgaagctatgaagcgctacggcctgaacaccaaccaccggatcgtcgtgtgcagcgagaacagcctgcagttcttcatgcctgtgctgggcgccctgttcatcggagttgctgtggcccctgccaacgacatctacaacgagcgcgagctgctgaacagcatgggcatctctcagcccaccgtggtgttcgtgtccaagaagggactgcagaaaatcctgaacgtgcagaagaagctgcccatcatccagaaaatcatcatcatggacagcaagaccgactaccagggcttccagagcatgtacaccttcgtgaccagccatctgccacctggcttcaacgagtacgacttcgtgcccgagagcttcgaccgggacaagacaatcgccctgatcatgaacagcagcggctctaccggactgcccaaaggtgttgccctgcctcatagaactgcctgcgtgcggtttagccacgccagagatcccatcttcggcaaccagatcatccccgacacagccatcctgagcgtggtgccttttcaccacggcttcggcatgttcaccacactgggctacctgatctgcggcttcagagtggtgctgatgtaccgcttcgaggaagaactgttcctgcggagcctgcaggactacaagatccagtctgctctgctggtgcctactctgttcagcttctttgccaagagcaccctgatcgataagtacgacctgagcaacctgcacgagatcgcctctggcggagcccctctgtctaaagaagtgggagaagccgtcgccaagcggttccatctgcctggcatcagacaaggctatggcctgaccgagacaaccagcgccattctgattacccctgagggcgacgataagcctggcgctgtgggaaaagtggtgccattcttcgaggccaaggtggtggatctggacaccggcaaaacactgggcgttaaccagaggggcgagctgtgtgttagaggccctatgatcatgagcggctacgtgaacaaccccgaggccacaaacgctctgatcgacaaggatggatggctgcacagcggcgacattgcctactgggacgaagatgagcacttcttcatcgtggaccggctgaagtccctgatcaagtacaagggctaccaggtggccccagccgagctggaatctattctgctgcaacaccccaacatcttcgatgccggcgttgcaggactgcccgatgatgatgctggcgaactgccagctgctgtggtggtgctggaacacggcaagaccatgaccgagaaagaaatcgtggactacgtggccagccaagtgaccaccgccaagaaactgagaggcggcgtggtgtttgtggacgaggtgccaaaaggcctgacaggcaagctggacgcccggaagatcagagagatcctgattaaggccaagaaaggcggcaagatcgccgtgtaatagctaactagacaaaacaccaaacaaacaagctgcgagccacggacttaaataattgagccttaaagaagaaattctttaagtggatgctctcaaactcagggaaacctaaatctagttatagacaaggcaatcctgagccaagccgaagtagtaattagtaagttaacaatagatgacttaaaaaacaaccaaaaaaaatctagatatcggatcccggg

SEQ ID NO: 3363 - DNA, 2831 bp, synthetic construct
  source 1..2831: mol_type = other DNA; note = Ana1.143
taatacgactcactatagggagaccctcgaaaaaaaacacaaacaccaactaatcggaaggtgcagagactcgacgggagctaccctaacgtcaagacgagggtaaagagagagtccaattctcaaagccaataggcagtagcgaaagctgcaagagaatgaaaatccgtggctcgcagcaaacaccaaacaaaacaaacacaaaccaacaaaaattaaaacagcctgtgggttgatcccacccacaggcccattgggcgctagcactctggtatcacggtacctttgtgcgcctgttttataccccctcccccaactgtaacttagaagtaacacacaccgatcaacagtcagcgtggcacaccagccacgttttgatcaagcacttctgttaccccggactgagtatcaatagactgctcacgcggttgaaggagaaagcgttcgttatccggccaactacttcgaaaaacctagtaacaccgtggaagttgcagagtgtttcgctcagcactaccccagtgtagatcaggtcgatgagtcaccgcattccccacgggcgaccgtggcggtggctgcgttggcggcctgcccatggggaaacccatgggacgctctaatacagacatggtgcgaagagtctattgagctagttggtagtcctccggcccctgaatgcggctaatcctaactgcggagcacacaccctcaagccagagggcagtgtgtcgtaacgggcaactctgcagcggaaccgactactttgggtgtccgtgtttcattttattcctatactggctgcttatggtgacaattgagagatcgttaccatatagctattggattggccatccggtgactaatagagctattatatatccctttgttgggtttataccacttagcttgaaagaggttaaaacattacaattcattgttaagttgaatacagcaaaatggaagatgccaagaacatcaagaagggccctgctccattctaccctctggaagatggaacagccggcgagcagctgcacaaggccatgaagagatatgccctggtgcctggcacaatcgccttcacagatgcccacatcgaggtggacatcacctacgccgagtacttcgagatgtctgtgcggctggccgaagctatgaagcgctacggcctgaacaccaaccaccggatcgtcgtgtgcagcgagaacagcctgcagttcttcatgcctgtgctgggcgccctgttcatcggagttgctgtggcccctgccaacgacatctacaacgagcgcgagctgctgaacagcatgggcatctctcagcccaccgtggtgttcgtgtccaagaagggactgcagaaaatcctgaacgtgcagaagaagctgcccatcatccagaaaatcatcatcatggacagcaagaccgactaccagggcttccagagcatgtacaccttcgtgaccagccatctgccacctggcttcaacgagtacgacttcgtgcccgagagcttcgaccgggacaagacaatcgccctgatcatgaacagcagcggctctaccggactgcccaaaggtgttgccctgcctcatagaactgcctgcgtgcggtttagccacgccagagatcccatcttcggcaaccagatcatccccgacacagccatcctgagcgtggtgccttttcaccacggcttcggcatgttcaccacactgggctacctgatctgcggcttcagagtggtgctgatgtaccgcttcgaggaagaactgttcctgcggagcctgcaggactacaagatccagtctgctctgctggtgcctactctgttcagcttctttgccaagagcaccctgatcgataagtacgacctgagcaacctgcacgagatcgcctctggcggagcccctctgtctaaagaagtgggagaagccgtcgccaagcggttccatctgcctggcatcagacaaggctatggcctgaccgagacaaccagcgccattctgattacccctgagggcgacgataagcctggcgctgtgggaaaagtggtgccattcttcgaggccaaggtggtggatctggacaccggcaaaacactgggcgttaaccagaggggcgagctgtgtgttagaggccctatgatcatgagcggctacgtgaacaaccccgaggccacaaacgctctgatcgacaaggatggatggctgcacagcggcgacattgcctactgggacgaagatgagcacttcttcatcgtggaccggctgaagtccctgatcaagtacaagggctaccaggtggccccagccgagctggaatctattctgctgcaacaccccaacatcttcgatgccggcgttgcaggactgcccgatgatgatgctggcgaactgccagctgctgtggtggtgctggaacacggcaagaccatgaccgagaaagaaatcgtggactacgtggccagccaagtgaccaccgccaagaaactgagaggcggcgtggtgtttgtggacgaggtgccaaaaggcctgacaggcaagctggacgcccggaagatcagagagatcctgattaaggccaagaaaggcggcaagatcgccgtgtaatagctaactagacaaaacaccaaacaaacaagctgcgagccacggacttaaataattgagccttaaagaagaaattctttaagtggatgctctcaaactcagggaaacctaaatctagttatagacaaggcaatcctgagccaagccgaagtagtaattagtaagttaacaatagatgacttacaaaaacaaccaaaaaaaatctagatatcggatcccggg

SEQ ID NO: 3364 - DNA, 2831 bp, synthetic construct
  source 1..2831: mol_type = other DNA; note = Ana1.144
taatacgactcactatagggagaccctcgaaaaaaaacacaaacaccactaatcggaaggtgcagagactcgacgggagctaccctaacgtcaagacgagggtaaagagagagtccaattctcaaagccaataggcagtagcgaaagctgcaagagaatgaaaatccgtggctcgcagcaaacaccaaacaaaacaaacacaaaccaacaaaaattaaaacagcctgtgggttgatcccacccacaggcccattgggcgctagcactctggtatcacggtacctttgtgcgcctgttttataccccctcccccaactgtaacttagaagtaacacacaccgatcaacagtcagcgtggcacaccagccacgttttgatcaagcacttctgttaccccggactgagtatcaatagactgctcacgcggttgaaggagaaagcgttcgttatccggccaactacttcgaaaaacctagtaacaccgtggaagttgcagagtgtttcgctcagcactaccccagtgtagatcaggtcgatgagtcaccgcattccccacgggcgaccgtggcggtggctgcgttggcggcctgcccatggggaaacccatgggacgctctaatacagacatggtgcgaagagtctattgagctagttggtagtcctccggcccctgaatgcggctaatcctaactgcggagcacacaccctcaagccagagggcagtgtgtcgtaacgggcaactctgcagcggaaccgactactttgggtgtccgtgtttcattttattcctatactggctgcttatggtgacaattgagagatcgttaccatatagctattggattggccatccggtgactaatagagctattatatatccctttgttgggtttataccacttagcttgaaagaggttaaaacattacaattcattgttaagttgaatacagcaaaatggaagatgccaagaacatcaagaagggccctgctccattctaccctctggaagatggaacagccggcgagcagctgcacaaggccatgaagagatatgccctggtgcctggcacaatcgccttcacagatgcccacatcgaggtggacatcacctacgccgagtacttcgagatgtctgtgcggctggccgaagctatgaagcgctacggcctgaacaccaaccaccggatcgtcgtgtgcagcgagaacagcctgcagttcttcatgcctgtgctgggcgccctgttcatcggagttgctgtggcccctgccaacgacatctacaacgagcgcgagctgctgaacagcatgggcatctctcagcccaccgtggtgttcgtgtccaagaagggactgcagaaaatcctgaacgtgcagaagaagctgcccatcatccagaaaatcatcatcatggacagcaagaccgactaccagggcttccagagcatgtacaccttcgtgaccagccatctgccacctggcttcaacgagtacgacttcgtgcccgagagcttcgaccgggacaagacaatcgccctgatcatgaacagcagcggctctaccggactgcccaaaggtgttgccctgcctcatagaactgcctgcgtgcggtttagccacgccagagatcccatcttcggcaaccagatcatccccgacacagccatcctgagcgtggtgccttttcaccacggcttcggcatgttcaccacactgggctacctgatctgcggcttcagagtggtgctgatgtaccgcttcgaggaagaactgttcctgcggagcctgcaggactacaagatccagtctgctctgctggtgcctactctgttcagcttctttgccaagagcaccctgatcgataagtacgacctgagcaacctgcacgagatcgcctctggcggagcccctctgtctaaagaagtgggagaagccgtcgccaagcggttccatctgcctggcatcagacaaggctatggcctgaccgagacaaccagcgccattctgattacccctgagggcgacgataagcctggcgctgtgggaaaagtggtgccattcttcgaggccaaggtggtggatctggacaccggcaaaacactgggcgttaaccagaggggcgagctgtgtgttagaggccctatgatcatgagcggctacgtgaacaaccccgaggccacaaacgctctgatcgacaaggatggatggctgcacagcggcgacattgcctactgggacgaagatgagcacttcttcatcgtggaccggctgaagtccctgatcaagtacaagggctaccaggtggccccagccgagctggaatctattctgctgcaacaccccaacatcttcgatgccggcgttgcaggactgcccgatgatgatgctggcgaactgccagctgctgtggtggtgctggaacacggcaagaccatgaccgagaaagaaatcgtggactacgtggccagccaagtgaccaccgccaagaaactgagaggcggcgtggtgtttgtggacgaggtgccaaaaggcctgacaggcaagctggacgcccggaagatcagagagatcctgattaaggccaagaaaggcggcaagatcgccgtgtaatagctaactagacaaaacaccaaacaaacaagctgcgagccacggacttaaataattgagccttaaagaagaaattctttaagtggatgctctcaaactcagggaaacctaaatctagttatagacaaggcaatcctgagccaagccgaagtagtaattagtaagttaacaatagatgacttacaaaaaacaaccaaaaaaaatctagatatcggatcccggg

SEQ ID NO: 3365 - DNA, 2831 bp, synthetic construct
  source 1..2831: mol_type = other DNA; note = Ana1.145
taatacgactcactatagggagaccctcgaaaaaaaacacaaacaccctaatcggaaggtgcagagactcgacgggagctaccctaacgtcaagacgagggtaaagagagagtccaattctcaaagccaataggcagtagcgaaagctgcaagagaatgaaaatccgtggctcgcagcaaacaccaaacaaaacaaacacaaaccaacaaaaattaaaacagcctgtgggttgatcccacccacaggcccattgggcgctagcactctggtatcacggtacctttgtgcgcctgttttataccccctcccccaactgtaacttagaagtaacacacaccgatcaacagtcagcgtggcacaccagccacgttttgatcaagcacttctgttaccccggactgagtatcaatagactgctcacgcggttgaaggagaaagcgttcgttatccggccaactacttcgaaaaacctagtaacaccgtggaagttgcagagtgtttcgctcagcactaccccagtgtagatcaggtcgatgagtcaccgcattccccacgggcgaccgtggcggtggctgcgttggcggcctgcccatggggaaacccatgggacgctctaatacagacatggtgcgaagagtctattgagctagttggtagtcctccggcccctgaatgcggctaatcctaactgcggagcacacaccctcaagccagagggcagtgtgtcgtaacgggcaactctgcagcggaaccgactactttgggtgtccgtgtttcattttattcctatactggctgcttatggtgacaattgagagatcgttaccatatagctattggattggccatccggtgactaatagagctattatatatccctttgttgggtttataccacttagcttgaaagaggttaaaacattacaattcattgttaagttgaatacagcaaaatggaagatgccaagaacatcaagaagggccctgctccattctaccctctggaagatggaacagccggcgagcagctgcacaaggccatgaagagatatgccctggtgcctggcacaatcgccttcacagatgcccacatcgaggtggacatcacctacgccgagtacttcgagatgtctgtgcggctggccgaagctatgaagcgctacggcctgaacaccaaccaccggatcgtcgtgtgcagcgagaacagcctgcagttcttcatgcctgtgctgggcgccctgttcatcggagttgctgtggcccctgccaacgacatctacaacgagcgcgagctgctgaacagcatgggcatctctcagcccaccgtggtgttcgtgtccaagaagggactgcagaaaatcctgaacgtgcagaagaagctgcccatcatccagaaaatcatcatcatggacagcaagaccgactaccagggcttccagagcatgtacaccttcgtgaccagccatctgccacctggcttcaacgagtacgacttcgtgcccgagagcttcgaccgggacaagacaatcgccctgatcatgaacagcagcggctctaccggactgcccaaaggtgttgccctgcctcatagaactgcctgcgtgcggtttagccacgccagagatcccatcttcggcaaccagatcatccccgacacagccatcctgagcgtggtgccttttcaccacggcttcggcatgttcaccacactgggctacctgatctgcggcttcagagtggtgctgatgtaccgcttcgaggaagaactgttcctgcggagcctgcaggactacaagatccagtctgctctgctggtgcctactctgttcagcttctttgccaagagcaccctgatcgataagtacgacctgagcaacctgcacgagatcgcctctggcggagcccctctgtctaaagaagtgggagaagccgtcgccaagcggttccatctgcctggcatcagacaaggctatggcctgaccgagacaaccagcgccattctgattacccctgagggcgacgataagcctggcgctgtgggaaaagtggtgccattcttcgaggccaaggtggtggatctggacaccggcaaaacactgggcgttaaccagaggggcgagctgtgtgttagaggccctatgatcatgagcggctacgtgaacaaccccgaggccacaaacgctctgatcgacaaggatggatggctgcacagcggcgacattgcctactgggacgaagatgagcacttcttcatcgtggaccggctgaagtccctgatcaagtacaagggctaccaggtggccccagccgagctggaatctattctgctgcaacaccccaacatcttcgatgccggcgttgcaggactgcccgatgatgatgctggcgaactgccagctgctgtggtggtgctggaacacggcaagaccatgaccgagaaagaaatcgtggactacgtggccagccaagtgaccaccgccaagaaactgagaggcggcgtggtgtttgtggacgaggtgccaaaaggcctgacaggcaagctggacgcccggaagatcagagagatcctgattaaggccaagaaaggcggcaagatcgccgtgtaatagctaactagacaaaacaccaaacaaacaagctgcgagccacggacttaaataattgagccttaaagaagaaattctttaagtggatgctctcaaactcagggaaacctaaatctagttatagacaaggcaatcctgagccaagccgaagtagtaattagtaagttaacaatagatgacttacaaaaaaacaaccaaaaaaaatctagatatcggatcccggg

SEQ ID NO: 3366 - DNA, 2831 bp, synthetic construct
  source 1..2831: mol_type = other DNA; note = Ana1.146
taatacgactcactatagggagaccctcgaaaaaaaacacaaacacctaatcggaaggtgcagagactcgacgggagctaccctaacgtcaagacgagggtaaagagagagtccaattctcaaagccaataggcagtagcgaaagctgcaagagaatgaaaatccgtggctcgcagcaaacaccaaacaaaacaaacacaaaccaacaaaaattaaaacagcctgtgggttgatcccacccacaggcccattgggcgctagcactctggtatcacggtacctttgtgcgcctgttttataccccctcccccaactgtaacttagaagtaacacacaccgatcaacagtcagcgtggcacaccagccacgttttgatcaagcacttctgttaccccggactgagtatcaatagactgctcacgcggttgaaggagaaagcgttcgttatccggccaactacttcgaaaaacctagtaacaccgtggaagttgcagagtgtttcgctcagcactaccccagtgtagatcaggtcgatgagtcaccgcattccccacgggcgaccgtggcggtggctgcgttggcggcctgcccatggggaaacccatgggacgctctaatacagacatggtgcgaagagtctattgagctagttggtagtcctccggcccctgaatgcggctaatcctaactgcggagcacacaccctcaagccagagggcagtgtgtcgtaacgggcaactctgcagcggaaccgactactttgggtgtccgtgtttcattttattcctatactggctgcttatggtgacaattgagagatcgttaccatatagctattggattggccatccggtgactaatagagctattatatatccctttgttgggtttataccacttagcttgaaagaggttaaaacattacaattcattgttaagttgaatacagcaaaatggaagatgccaagaacatcaagaagggccctgctccattctaccctctggaagatggaacagccggcgagcagctgcacaaggccatgaagagatatgccctggtgcctggcacaatcgccttcacagatgcccacatcgaggtggacatcacctacgccgagtacttcgagatgtctgtgcggctggccgaagctatgaagcgctacggcctgaacaccaaccaccggatcgtcgtgtgcagcgagaacagcctgcagttcttcatgcctgtgctgggcgccctgttcatcggagttgctgtggcccctgccaacgacatctacaacgagcgcgagctgctgaacagcatgggcatctctcagcccaccgtggtgttcgtgtccaagaagggactgcagaaaatcctgaacgtgcagaagaagctgcccatcatccagaaaatcatcatcatggacagcaagaccgactaccagggcttccagagcatgtacaccttcgtgaccagccatctgccacctggcttcaacgagtacgacttcgtgcccgagagcttcgaccgggacaagacaatcgccctgatcatgaacagcagcggctctaccggactgcccaaaggtgttgccctgcctcatagaactgcctgcgtgcggtttagccacgccagagatcccatcttcggcaaccagatcatccccgacacagccatcctgagcgtggtgccttttcaccacggcttcggcatgttcaccacactgggctacctgatctgcggcttcagagtggtgctgatgtaccgcttcgaggaagaactgttcctgcggagcctgcaggactacaagatccagtctgctctgctggtgcctactctgttcagcttctttgccaagagcaccctgatcgataagtacgacctgagcaacctgcacgagatcgcctctggcggagcccctctgtctaaagaagtgggagaagccgtcgccaagcggttccatctgcctggcatcagacaaggctatggcctgaccgagacaaccagcgccattctgattacccctgagggcgacgataagcctggcgctgtgggaaaagtggtgccattcttcgaggccaaggtggtggatctggacaccggcaaaacactgggcgttaaccagaggggcgagctgtgtgttagaggccctatgatcatgagcggctacgtgaacaaccccgaggccacaaacgctctgatcgacaaggatggatggctgcacagcggcgacattgcctactgggacgaagatgagcacttcttcatcgtggaccggctgaagtccctgatcaagtacaagggctaccaggtggccccagccgagctggaatctattctgctgcaacaccccaacatcttcgatgccggcgttgcaggactgcccgatgatgatgctggcgaactgccagctgctgtggtggtgctggaacacggcaagaccatgaccgagaaagaaatcgtggactacgtggccagccaagtgaccaccgccaagaaactgagaggcggcgtggtgtttgtggacgaggtgccaaaaggcctgacaggcaagctggacgcccggaagatcagagagatcctgattaaggccaagaaaggcggcaagatcgccgtgtaatagctaactagacaaaacaccaaacaaacaagctgcgagccacggacttaaataattgagccttaaagaagaaattctttaagtggatgctctcaaactcagggaaacctaaatctagttatagacaaggcaatcctgagccaagccgaagtagtaattagtaagttaacaatagatgacttacaacaaaaacaaccaaaaaaaatctagatatcggatcccggg

SEQ ID NO: 3367 - DNA, 2831 bp, synthetic construct
  source 1..2831: mol_type = other DNA; note = Ana1.147
taatacgactcactatagggagaccctcgaaaaaaaacacaaacaccaatcggaaggtgcagagactcgacgggagctaccctaacgtcaagacgagggtaaagagagagtccaattctcaaagccaataggcagtagcgaaagctgcaagagaatgaaaatccgtggctcgcagcaaacaccaaacaaaacaaacacaaaccaacaaaaattaaaacagcctgtgggttgatcccacccacaggcccattgggcgctagcactctggtatcacggtacctttgtgcgcctgttttataccccctcccccaactgtaacttagaagtaacacacaccgatcaacagtcagcgtggcacaccagccacgttttgatcaagcacttctgttaccccggactgagtatcaatagactgctcacgcggttgaaggagaaagcgttcgttatccggccaactacttcgaaaaacctagtaacaccgtggaagttgcagagtgtttcgctcagcactaccccagtgtagatcaggtcgatgagtcaccgcattccccacgggcgaccgtggcggtggctgcgttggcggcctgcccatggggaaacccatgggacgctctaatacagacatggtgcgaagagtctattgagctagttggtagtcctccggcccctgaatgcggctaatcctaactgcggagcacacaccctcaagccagagggcagtgtgtcgtaacgggcaactctgcagcggaaccgactactttgggtgtccgtgtttcattttattcctatactggctgcttatggtgacaattgagagatcgttaccatatagctattggattggccatccggtgactaatagagctattatatatccctttgttgggtttataccacttagcttgaaagaggttaaaacattacaattcattgttaagttgaatacagcaaaatggaagatgccaagaacatcaagaagggccctgctccattctaccctctggaagatggaacagccggcgagcagctgcacaaggccatgaagagatatgccctggtgcctggcacaatcgccttcacagatgcccacatcgaggtggacatcacctacgccgagtacttcgagatgtctgtgcggctggccgaagctatgaagcgctacggcctgaacaccaaccaccggatcgtcgtgtgcagcgagaacagcctgcagttcttcatgcctgtgctgggcgccctgttcatcggagttgctgtggcccctgccaacgacatctacaacgagcgcgagctgctgaacagcatgggcatctctcagcccaccgtggtgttcgtgtccaagaagggactgcagaaaatcctgaacgtgcagaagaagctgcccatcatccagaaaatcatcatcatggacagcaagaccgactaccagggcttccagagcatgtacaccttcgtgaccagccatctgccacctggcttcaacgagtacgacttcgtgcccgagagcttcgaccgggacaagacaatcgccctgatcatgaacagcagcggctctaccggactgcccaaaggtgttgccctgcctcatagaactgcctgcgtgcggtttagccacgccagagatcccatcttcggcaaccagatcatccccgacacagccatcctgagcgtggtgccttttcaccacggcttcggcatgttcaccacactgggctacctgatctgcggcttcagagtggtgctgatgtaccgcttcgaggaagaactgttcctgcggagcctgcaggactacaagatccagtctgctctgctggtgcctactctgttcagcttctttgccaagagcaccctgatcgataagtacgacctgagcaacctgcacgagatcgcctctggcggagcccctctgtctaaagaagtgggagaagccgtcgccaagcggttccatctgcctggcatcagacaaggctatggcctgaccgagacaaccagcgccattctgattacccctgagggcgacgataagcctggcgctgtgggaaaagtggtgccattcttcgaggccaaggtggtggatctggacaccggcaaaacactgggcgttaaccagaggggcgagctgtgtgttagaggccctatgatcatgagcggctacgtgaacaaccccgaggccacaaacgctctgatcgacaaggatggatggctgcacagcggcgacattgcctactgggacgaagatgagcacttcttcatcgtggaccggctgaagtccctgatcaagtacaagggctaccaggtggccccagccgagctggaatctattctgctgcaacaccccaacatcttcgatgccggcgttgcaggactgcccgatgatgatgctggcgaactgccagctgctgtggtggtgctggaacacggcaagaccatgaccgagaaagaaatcgtggactacgtggccagccaagtgaccaccgccaagaaactgagaggcggcgtggtgtttgtggacgaggtgccaaaaggcctgacaggcaagctggacgcccggaagatcagagagatcctgattaaggccaagaaaggcggcaagatcgccgtgtaatagctaactagacaaaacaccaaacaaacaagctgcgagccacggacttaaataattgagccttaaagaagaaattctttaagtggatgctctcaaactcagggaaacctaaatctagttatagacaaggcaatcctgagccaagccgaagtagtaattagtaagttaacaatagatgacttacaactaaaaacaaccaaaaaaaatctagatatcggatcccggg

SEQ ID NO: 3368 - DNA, 2831 bp, synthetic construct
  source 1..2831: mol_type = other DNA; note = Ana1.148
taatacgactcactatagggagaccctcgaaaaaaaacacaaacaccatcggaaggtgcagagactcgacgggagctaccctaacgtcaagacgagggtaaagagagagtccaattctcaaagccaataggcagtagcgaaagctgcaagagaatgaaaatccgtggctcgcagcaaacaccaaacaaaacaaacacaaaccaacaaaaattaaaacagcctgtgggttgatcccacccacaggcccattgggcgctagcactctggtatcacggtacctttgtgcgcctgttttataccccctcccccaactgtaacttagaagtaacacacaccgatcaacagtcagcgtggcacaccagccacgttttgatcaagcacttctgttaccccggactgagtatcaatagactgctcacgcggttgaaggagaaagcgttcgttatccggccaactacttcgaaaaacctagtaacaccgtggaagttgcagagtgtttcgctcagcactaccccagtgtagatcaggtcgatgagtcaccgcattccccacgggcgaccgtggcggtggctgcgttggcggcctgcccatggggaaacccatgggacgctctaatacagacatggtgcgaagagtctattgagctagttggtagtcctccggcccctgaatgcggctaatcctaactgcggagcacacaccctcaagccagagggcagtgtgtcgtaacgggcaactctgcagcggaaccgactactttgggtgtccgtgtttcattttattcctatactggctgcttatggtgacaattgagagatcgttaccatatagctattggattggccatccggtgactaatagagctattatatatccctttgttgggtttataccacttagcttgaaagaggttaaaacattacaattcattgttaagttgaatacagcaaaatggaagatgccaagaacatcaagaagggccctgctccattctaccctctggaagatggaacagccggcgagcagctgcacaaggccatgaagagatatgccctggtgcctggcacaatcgccttcacagatgcccacatcgaggtggacatcacctacgccgagtacttcgagatgtctgtgcggctggccgaagctatgaagcgctacggcctgaacaccaaccaccggatcgtcgtgtgcagcgagaacagcctgcagttcttcatgcctgtgctgggcgccctgttcatcggagttgctgtggcccctgccaacgacatctacaacgagcgcgagctgctgaacagcatgggcatctctcagcccaccgtggtgttcgtgtccaagaagggactgcagaaaatcctgaacgtgcagaagaagctgcccatcatccagaaaatcatcatcatggacagcaagaccgactaccagggcttccagagcatgtacaccttcgtgaccagccatctgccacctggcttcaacgagtacgacttcgtgcccgagagcttcgaccgggacaagacaatcgccctgatcatgaacagcagcggctctaccggactgcccaaaggtgttgccctgcctcatagaactgcctgcgtgcggtttagccacgccagagatcccatcttcggcaaccagatcatccccgacacagccatcctgagcgtggtgccttttcaccacggcttcggcatgttcaccacactgggctacctgatctgcggcttcagagtggtgctgatgtaccgcttcgaggaagaactgttcctgcggagcctgcaggactacaagatccagtctgctctgctggtgcctactctgttcagcttctttgccaagagcaccctgatcgataagtacgacctgagcaacctgcacgagatcgcctctggcggagcccctctgtctaaagaagtgggagaagccgtcgccaagcggttccatctgcctggcatcagacaaggctatggcctgaccgagacaaccagcgccattctgattacccctgagggcgacgataagcctggcgctgtgggaaaagtggtgccattcttcgaggccaaggtggtggatctggacaccggcaaaacactgggcgttaaccagaggggcgagctgtgtgttagaggccctatgatcatgagcggctacgtgaacaaccccgaggccacaaacgctctgatcgacaaggatggatggctgcacagcggcgacattgcctactgggacgaagatgagcacttcttcatcgtggaccggctgaagtccctgatcaagtacaagggctaccaggtggccccagccgagctggaatctattctgctgcaacaccccaacatcttcgatgccggcgttgcaggactgcccgatgatgatgctggcgaactgccagctgctgtggtggtgctggaacacggcaagaccatgaccgagaaagaaatcgtggactacgtggccagccaagtgaccaccgccaagaaactgagaggcggcgtggtgtttgtggacgaggtgccaaaaggcctgacaggcaagctggacgcccggaagatcagagagatcctgattaaggccaagaaaggcggcaagatcgccgtgtaatagctaactagacaaaacaccaaacaaacaagctgcgagccacggacttaaataattgagccttaaagaagaaattctttaagtggatgctctcaaactcagggaaacctaaatctagttatagacaaggcaatcctgagccaagccgaagtagtaattagtaagttaacaatagatgacttacaactaaaaaacaaccaaaaaaaatctagatatcggatcccggg

SEQ ID NO: 3369 - DNA, 2831 bp, synthetic construct
  source 1..2831: mol_type = other DNA; note = Ana1.149
taatacgactcactatagggagaccctcgaaaaaaaacacaaacacctcggaaggtgcagagactcgacgggagctaccctaacgtcaagacgagggtaaagagagagtccaattctcaaagccaataggcagtagcgaaagctgcaagagaatgaaaatccgtggctcgcagcaaacaccaaacaaaacaaacacaaaccaacaaaaattaaaacagcctgtgggttgatcccacccacaggcccattgggcgctagcactctggtatcacggtacctttgtgcgcctgttttataccccctcccccaactgtaacttagaagtaacacacaccgatcaacagtcagcgtggcacaccagccacgttttgatcaagcacttctgttaccccggactgagtatcaatagactgctcacgcggttgaaggagaaagcgttcgttatccggccaactacttcgaaaaacctagtaacaccgtggaagttgcagagtgtttcgctcagcactaccccagtgtagatcaggtcgatgagtcaccgcattccccacgggcgaccgtggcggtggctgcgttggcggcctgcccatggggaaacccatgggacgctctaatacagacatggtgcgaagagtctattgagctagttggtagtcctccggcccctgaatgcggctaatcctaactgcggagcacacaccctcaagccagagggcagtgtgtcgtaacgggcaactctgcagcggaaccgactactttgggtgtccgtgtttcattttattcctatactggctgcttatggtgacaattgagagatcgttaccatatagctattggattggccatccggtgactaatagagctattatatatccctttgttgggtttataccacttagcttgaaagaggttaaaacattacaattcattgttaagttgaatacagcaaaatggaagatgccaagaacatcaagaagggccctgctccattctaccctctggaagatggaacagccggcgagcagctgcacaaggccatgaagagatatgccctggtgcctggcacaatcgccttcacagatgcccacatcgaggtggacatcacctacgccgagtacttcgagatgtctgtgcggctggccgaagctatgaagcgctacggcctgaacaccaaccaccggatcgtcgtgtgcagcgagaacagcctgcagttcttcatgcctgtgctgggcgccctgttcatcggagttgctgtggcccctgccaacgacatctacaacgagcgcgagctgctgaacagcatgggcatctctcagcccaccgtggtgttcgtgtccaagaagggactgcagaaaatcctgaacgtgcagaagaagctgcccatcatccagaaaatcatcatcatggacagcaagaccgactaccagggcttccagagcatgtacaccttcgtgaccagccatctgccacctggcttcaacgagtacgacttcgtgcccgagagcttcgaccgggacaagacaatcgccctgatcatgaacagcagcggctctaccggactgcccaaaggtgttgccctgcctcatagaactgcctgcgtgcggtttagccacgccagagatcccatcttcggcaaccagatcatccccgacacagccatcctgagcgtggtgccttttcaccacggcttcggcatgttcaccacactgggctacctgatctgcggcttcagagtggtgctgatgtaccgcttcgaggaagaactgttcctgcggagcctgcaggactacaagatccagtctgctctgctggtgcctactctgttcagcttctttgccaagagcaccctgatcgataagtacgacctgagcaacctgcacgagatcgcctctggcggagcccctctgtctaaagaagtgggagaagccgtcgccaagcggttccatctgcctggcatcagacaaggctatggcctgaccgagacaaccagcgccattctgattacccctgagggcgacgataagcctggcgctgtgggaaaagtggtgccattcttcgaggccaaggtggtggatctggacaccggcaaaacactgggcgttaaccagaggggcgagctgtgtgttagaggccctatgatcatgagcggctacgtgaacaaccccgaggccacaaacgctctgatcgacaaggatggatggctgcacagcggcgacattgcctactgggacgaagatgagcacttcttcatcgtggaccggctgaagtccctgatcaagtacaagggctaccaggtggccccagccgagctggaatctattctgctgcaacaccccaacatcttcgatgccggcgttgcaggactgcccgatgatgatgctggcgaactgccagctgctgtggtggtgctggaacacggcaagaccatgaccgagaaagaaatcgtggactacgtggccagccaagtgaccaccgccaagaaactgagaggcggcgtggtgtttgtggacgaggtgccaaaaggcctgacaggcaagctggacgcccggaagatcagagagatcctgattaaggccaagaaaggcggcaagatcgccgtgtaatagctaactagacaaaacaccaaacaaacaagctgcgagccacggacttaaataattgagccttaaagaagaaattctttaagtggatgctctcaaactcagggaaacctaaatctagttatagacaaggcaatcctgagccaagccgaagtagtaattagtaagttaacaatagatgacttacaactaaaaaaacaaccaaaaaaaatctagatatcggatcccggg

SEQ ID NO: 3370 - DNA, 2831 bp, synthetic construct
  source 1..2831: mol_type = other DNA; note = Ana1.150
taatacgactcactatagggagaccctcgaaaaaaaacacaaacacccggaaggtgcagagactcgacgggagctaccctaacgtcaagacgagggtaaagagagagtccaattctcaaagccaataggcagtagcgaaagctgcaagagaatgaaaatccgtggctcgcagcaaacaccaaacaaaacaaacacaaaccaacaaaaattaaaacagcctgtgggttgatcccacccacaggcccattgggcgctagcactctggtatcacggtacctttgtgcgcctgttttataccccctcccccaactgtaacttagaagtaacacacaccgatcaacagtcagcgtggcacaccagccacgttttgatcaagcacttctgttaccccggactgagtatcaatagactgctcacgcggttgaaggagaaagcgttcgttatccggccaactacttcgaaaaacctagtaacaccgtggaagttgcagagtgtttcgctcagcactaccccagtgtagatcaggtcgatgagtcaccgcattccccacgggcgaccgtggcggtggctgcgttggcggcctgcccatggggaaacccatgggacgctctaatacagacatggtgcgaagagtctattgagctagttggtagtcctccggcccctgaatgcggctaatcctaactgcggagcacacaccctcaagccagagggcagtgtgtcgtaacgggcaactctgcagcggaaccgactactttgggtgtccgtgtttcattttattcctatactggctgcttatggtgacaattgagagatcgttaccatatagctattggattggccatccggtgactaatagagctattatatatccctttgttgggtttataccacttagcttgaaagaggttaaaacattacaattcattgttaagttgaatacagcaaaatggaagatgccaagaacatcaagaagggccctgctccattctaccctctggaagatggaacagccggcgagcagctgcacaaggccatgaagagatatgccctggtgcctggcacaatcgccttcacagatgcccacatcgaggtggacatcacctacgccgagtacttcgagatgtctgtgcggctggccgaagctatgaagcgctacggcctgaacaccaaccaccggatcgtcgtgtgcagcgagaacagcctgcagttcttcatgcctgtgctgggcgccctgttcatcggagttgctgtggcccctgccaacgacatctacaacgagcgcgagctgctgaacagcatgggcatctctcagcccaccgtggtgttcgtgtccaagaagggactgcagaaaatcctgaacgtgcagaagaagctgcccatcatccagaaaatcatcatcatggacagcaagaccgactaccagggcttccagagcatgtacaccttcgtgaccagccatctgccacctggcttcaacgagtacgacttcgtgcccgagagcttcgaccgggacaagacaatcgccctgatcatgaacagcagcggctctaccggactgcccaaaggtgttgccctgcctcatagaactgcctgcgtgcggtttagccacgccagagatcccatcttcggcaaccagatcatccccgacacagccatcctgagcgtggtgccttttcaccacggcttcggcatgttcaccacactgggctacctgatctgcggcttcagagtggtgctgatgtaccgcttcgaggaagaactgttcctgcggagcctgcaggactacaagatccagtctgctctgctggtgcctactctgttcagcttctttgccaagagcaccctgatcgataagtacgacctgagcaacctgcacgagatcgcctctggcggagcccctctgtctaaagaagtgggagaagccgtcgccaagcggttccatctgcctggcatcagacaaggctatggcctgaccgagacaaccagcgccattctgattacccctgagggcgacgataagcctggcgctgtgggaaaagtggtgccattcttcgaggccaaggtggtggatctggacaccggcaaaacactgggcgttaaccagaggggcgagctgtgtgttagaggccctatgatcatgagcggctacgtgaacaaccccgaggccacaaacgctctgatcgacaaggatggatggctgcacagcggcgacattgcctactgggacgaagatgagcacttcttcatcgtggaccggctgaagtccctgatcaagtacaagggctaccaggtggccccagccgagctggaatctattctgctgcaacaccccaacatcttcgatgccggcgttgcaggactgcccgatgatgatgctggcgaactgccagctgctgtggtggtgctggaacacggcaagaccatgaccgagaaagaaatcgtggactacgtggccagccaagtgaccaccgccaagaaactgagaggcggcgtggtgtttgtggacgaggtgccaaaaggcctgacaggcaagctggacgcccggaagatcagagagatcctgattaaggccaagaaaggcggcaagatcgccgtgtaatagctaactagacaaaacaccaaacaaacaagctgcgagccacggacttaaataattgagccttaaagaagaaattctttaagtggatgctctcaaactcagggaaacctaaatctagttatagacaaggcaatcctgagccaagccgaagtagtaattagtaagttaacaatagatgacttacaactaataaaaacaaccaaaaaaaatctagatatcggatcccggg

SEQ ID NO: 3371 - DNA, 2831 bp, synthetic construct
  source 1..2831: mol_type = other DNA; note = Ana1.151
taatacgactcactatagggagaccctcgaaaaaaaacacaaacaccggaaggtgcagagactcgacgggagctaccctaacgtcaagacgagggtaaagagagagtccaattctcaaagccaataggcagtagcgaaagctgcaagagaatgaaaatccgtggctcgcagcaaacaccaaacaaaacaaacacaaaccaacaaaaattaaaacagcctgtgggttgatcccacccacaggcccattgggcgctagcactctggtatcacggtacctttgtgcgcctgttttataccccctcccccaactgtaacttagaagtaacacacaccgatcaacagtcagcgtggcacaccagccacgttttgatcaagcacttctgttaccccggactgagtatcaatagactgctcacgcggttgaaggagaaagcgttcgttatccggccaactacttcgaaaaacctagtaacaccgtggaagttgcagagtgtttcgctcagcactaccccagtgtagatcaggtcgatgagtcaccgcattccccacgggcgaccgtggcggtggctgcgttggcggcctgcccatggggaaacccatgggacgctctaatacagacatggtgcgaagagtctattgagctagttggtagtcctccggcccctgaatgcggctaatcctaactgcggagcacacaccctcaagccagagggcagtgtgtcgtaacgggcaactctgcagcggaaccgactactttgggtgtccgtgtttcattttattcctatactggctgcttatggtgacaattgagagatcgttaccatatagctattggattggccatccggtgactaatagagctattatatatccctttgttgggtttataccacttagcttgaaagaggttaaaacattacaattcattgttaagttgaatacagcaaaatggaagatgccaagaacatcaagaagggccctgctccattctaccctctggaagatggaacagccggcgagcagctgcacaaggccatgaagagatatgccctggtgcctggcacaatcgccttcacagatgcccacatcgaggtggacatcacctacgccgagtacttcgagatgtctgtgcggctggccgaagctatgaagcgctacggcctgaacaccaaccaccggatcgtcgtgtgcagcgagaacagcctgcagttcttcatgcctgtgctgggcgccctgttcatcggagttgctgtggcccctgccaacgacatctacaacgagcgcgagctgctgaacagcatgggcatctctcagcccaccgtggtgttcgtgtccaagaagggactgcagaaaatcctgaacgtgcagaagaagctgcccatcatccagaaaatcatcatcatggacagcaagaccgactaccagggcttccagagcatgtacaccttcgtgaccagccatctgccacctggcttcaacgagtacgacttcgtgcccgagagcttcgaccgggacaagacaatcgccctgatcatgaacagcagcggctctaccggactgcccaaaggtgttgccctgcctcatagaactgcctgcgtgcggtttagccacgccagagatcccatcttcggcaaccagatcatccccgacacagccatcctgagcgtggtgccttttcaccacggcttcggcatgttcaccacactgggctacctgatctgcggcttcagagtggtgctgatgtaccgcttcgaggaagaactgttcctgcggagcctgcaggactacaagatccagtctgctctgctggtgcctactctgttcagcttctttgccaagagcaccctgatcgataagtacgacctgagcaacctgcacgagatcgcctctggcggagcccctctgtctaaagaagtgggagaagccgtcgccaagcggttccatctgcctggcatcagacaaggctatggcctgaccgagacaaccagcgccattctgattacccctgagggcgacgataagcctggcgctgtgggaaaagtggtgccattcttcgaggccaaggtggtggatctggacaccggcaaaacactgggcgttaaccagaggggcgagctgtgtgttagaggccctatgatcatgagcggctacgtgaacaaccccgaggccacaaacgctctgatcgacaaggatggatggctgcacagcggcgacattgcctactgggacgaagatgagcacttcttcatcgtggaccggctgaagtccctgatcaagtacaagggctaccaggtggccccagccgagctggaatctattctgctgcaacaccccaacatcttcgatgccggcgttgcaggactgcccgatgatgatgctggcgaactgccagctgctgtggtggtgctggaacacggcaagaccatgaccgagaaagaaatcgtggactacgtggccagccaagtgaccaccgccaagaaactgagaggcggcgtggtgtttgtggacgaggtgccaaaaggcctgacaggcaagctggacgcccggaagatcagagagatcctgattaaggccaagaaaggcggcaagatcgccgtgtaatagctaactagacaaaacaccaaacaaacaagctgcgagccacggacttaaataattgagccttaaagaagaaattctttaagtggatgctctcaaactcagggaaacctaaatctagttatagacaaggcaatcctgagccaagccgaagtagtaattagtaagttaacaatagatgacttacaactaatcaaaaacaaccaaaaaaaatctagatatcggatcccggg

SEQ ID NO: 3372 - DNA, 2831 bp, synthetic construct
  source 1..2831: mol_type = other DNA; note = Ana1.152
taatacgactcactatagggagaccctcgaaaaaaaacacaaacaccgaaggtgcagagactcgacgggagctaccctaacgtcaagacgagggtaaagagagagtccaattctcaaagccaataggcagtagcgaaagctgcaagagaatgaaaatccgtggctcgcagcaaacaccaaacaaaacaaacacaaaccaacaaaaattaaaacagcctgtgggttgatcccacccacaggcccattgggcgctagcactctggtatcacggtacctttgtgcgcctgttttataccccctcccccaactgtaacttagaagtaacacacaccgatcaacagtcagcgtggcacaccagccacgttttgatcaagcacttctgttaccccggactgagtatcaatagactgctcacgcggttgaaggagaaagcgttcgttatccggccaactacttcgaaaaacctagtaacaccgtggaagttgcagagtgtttcgctcagcactaccccagtgtagatcaggtcgatgagtcaccgcattccccacgggcgaccgtggcggtggctgcgttggcggcctgcccatggggaaacccatgggacgctctaatacagacatggtgcgaagagtctattgagctagttggtagtcctccggcccctgaatgcggctaatcctaactgcggagcacacaccctcaagccagagggcagtgtgtcgtaacgggcaactctgcagcggaaccgactactttgggtgtccgtgtttcattttattcctatactggctgcttatggtgacaattgagagatcgttaccatatagctattggattggccatccggtgactaatagagctattatatatccctttgttgggtttataccacttagcttgaaagaggttaaaacattacaattcattgttaagttgaatacagcaaaatggaagatgccaagaacatcaagaagggccctgctccattctaccctctggaagatggaacagccggcgagcagctgcacaaggccatgaagagatatgccctggtgcctggcacaatcgccttcacagatgcccacatcgaggtggacatcacctacgccgagtacttcgagatgtctgtgcggctggccgaagctatgaagcgctacggcctgaacaccaaccaccggatcgtcgtgtgcagcgagaacagcctgcagttcttcatgcctgtgctgggcgccctgttcatcggagttgctgtggcccctgccaacgacatctacaacgagcgcgagctgctgaacagcatgggcatctctcagcccaccgtggtgttcgtgtccaagaagggactgcagaaaatcctgaacgtgcagaagaagctgcccatcatccagaaaatcatcatcatggacagcaagaccgactaccagggcttccagagcatgtacaccttcgtgaccagccatctgccacctggcttcaacgagtacgacttcgtgcccgagagcttcgaccgggacaagacaatcgccctgatcatgaacagcagcggctctaccggactgcccaaaggtgttgccctgcctcatagaactgcctgcgtgcggtttagccacgccagagatcccatcttcggcaaccagatcatccccgacacagccatcctgagcgtggtgccttttcaccacggcttcggcatgttcaccacactgggctacctgatctgcggcttcagagtggtgctgatgtaccgcttcgaggaagaactgttcctgcggagcctgcaggactacaagatccagtctgctctgctggtgcctactctgttcagcttctttgccaagagcaccctgatcgataagtacgacctgagcaacctgcacgagatcgcctctggcggagcccctctgtctaaagaagtgggagaagccgtcgccaagcggttccatctgcctggcatcagacaaggctatggcctgaccgagacaaccagcgccattctgattacccctgagggcgacgataagcctggcgctgtgggaaaagtggtgccattcttcgaggccaaggtggtggatctggacaccggcaaaacactgggcgttaaccagaggggcgagctgtgtgttagaggccctatgatcatgagcggctacgtgaacaaccccgaggccacaaacgctctgatcgacaaggatggatggctgcacagcggcgacattgcctactgggacgaagatgagcacttcttcatcgtggaccggctgaagtccctgatcaagtacaagggctaccaggtggccccagccgagctggaatctattctgctgcaacaccccaacatcttcgatgccggcgttgcaggactgcccgatgatgatgctggcgaactgccagctgctgtggtggtgctggaacacggcaagaccatgaccgagaaagaaatcgtggactacgtggccagccaagtgaccaccgccaagaaactgagaggcggcgtggtgtttgtggacgaggtgccaaaaggcctgacaggcaagctggacgcccggaagatcagagagatcctgattaaggccaagaaaggcggcaagatcgccgtgtaatagctaactagacaaaacaccaaacaaacaagctgcgagccacggacttaaataattgagccttaaagaagaaattctttaagtggatgctctcaaactcagggaaacctaaatctagttatagacaaggcaatcctgagccaagccgaagtagtaattagtaagttaacaatagatgacttacaactaatcgaaaaacaaccaaaaaaaatctagatatcggatcccggg

SEQ ID NO: 3373 - DNA, 2831 bp, synthetic construct
  source 1..2831: mol_type = other DNA; note = Ana1.153
taatacgactcactatagggagaccctcgaaaaaaaacacaaacaccaaggtgcagagactcgacgggagctaccctaacgtcaagacgagggtaaagagagagtccaattctcaaagccaataggcagtagcgaaagctgcaagagaatgaaaatccgtggctcgcagcaaacaccaaacaaaacaaacacaaaccaacaaaaattaaaacagcctgtgggttgatcccacccacaggcccattgggcgctagcactctggtatcacggtacctttgtgcgcctgttttataccccctcccccaactgtaacttagaagtaacacacaccgatcaacagtcagcgtggcacaccagccacgttttgatcaagcacttctgttaccccggactgagtatcaatagactgctcacgcggttgaaggagaaagcgttcgttatccggccaactacttcgaaaaacctagtaacaccgtggaagttgcagagtgtttcgctcagcactaccccagtgtagatcaggtcgatgagtcaccgcattccccacgggcgaccgtggcggtggctgcgttggcggcctgcccatggggaaacccatgggacgctctaatacagacatggtgcgaagagtctattgagctagttggtagtcctccggcccctgaatgcggctaatcctaactgcggagcacacaccctcaagccagagggcagtgtgtcgtaacgggcaactctgcagcggaaccgactactttgggtgtccgtgtttcattttattcctatactggctgcttatggtgacaattgagagatcgttaccatatagctattggattggccatccggtgactaatagagctattatatatccctttgttgggtttataccacttagcttgaaagaggttaaaacattacaattcattgttaagttgaatacagcaaaatggaagatgccaagaacatcaagaagggccctgctccattctaccctctggaagatggaacagccggcgagcagctgcacaaggccatgaagagatatgccctggtgcctggcacaatcgccttcacagatgcccacatcgaggtggacatcacctacgccgagtacttcgagatgtctgtgcggctggccgaagctatgaagcgctacggcctgaacaccaaccaccggatcgtcgtgtgcagcgagaacagcctgcagttcttcatgcctgtgctgggcgccctgttcatcggagttgctgtggcccctgccaacgacatctacaacgagcgcgagctgctgaacagcatgggcatctctcagcccaccgtggtgttcgtgtccaagaagggactgcagaaaatcctgaacgtgcagaagaagctgcccatcatccagaaaatcatcatcatggacagcaagaccgactaccagggcttccagagcatgtacaccttcgtgaccagccatctgccacctggcttcaacgagtacgacttcgtgcccgagagcttcgaccgggacaagacaatcgccctgatcatgaacagcagcggctctaccggactgcccaaaggtgttgccctgcctcatagaactgcctgcgtgcggtttagccacgccagagatcccatcttcggcaaccagatcatccccgacacagccatcctgagcgtggtgccttttcaccacggcttcggcatgttcaccacactgggctacctgatctgcggcttcagagtggtgctgatgtaccgcttcgaggaagaactgttcctgcggagcctgcaggactacaagatccagtctgctctgctggtgcctactctgttcagcttctttgccaagagcaccctgatcgataagtacgacctgagcaacctgcacgagatcgcctctggcggagcccctctgtctaaagaagtgggagaagccgtcgccaagcggttccatctgcctggcatcagacaaggctatggcctgaccgagacaaccagcgccattctgattacccctgagggcgacgataagcctggcgctgtgggaaaagtggtgccattcttcgaggccaaggtggtggatctggacaccggcaaaacactgggcgttaaccagaggggcgagctgtgtgttagaggccctatgatcatgagcggctacgtgaacaaccccgaggccacaaacgctctgatcgacaaggatggatggctgcacagcggcgacattgcctactgggacgaagatgagcacttcttcatcgtggaccggctgaagtccctgatcaagtacaagggctaccaggtggccccagccgagctggaatctattctgctgcaacaccccaacatcttcgatgccggcgttgcaggactgcccgatgatgatgctggcgaactgccagctgctgtggtggtgctggaacacggcaagaccatgaccgagaaagaaatcgtggactacgtggccagccaagtgaccaccgccaagaaactgagaggcggcgtggtgtttgtggacgaggtgccaaaaggcctgacaggcaagctggacgcccggaagatcagagagatcctgattaaggccaagaaaggcggcaagatcgccgtgtaatagctaactagacaaaacaccaaacaaacaagctgcgagccacggacttaaataattgagccttaaagaagaaattctttaagtggatgctctcaaactcagggaaacctaaatctagttatagacaaggcaatcctgagccaagccgaagtagtaattagtaagttaacaatagatgacttacaactaatcggaaaaacaaccaaaaaaaatctagatatcggatcccggg

SEQ ID NO: 3374 - DNA, 2831 bp, synthetic construct
  source 1..2831: mol_type = other DNA; note = Ana1.154
taatacgactcactatagggagaccctcgaaaaaaaacacaaacaccaggtgcagagactcgacgggagctaccctaacgtcaagacgagggtaaagagagagtccaattctcaaagccaataggcagtagcgaaagctgcaagagaatgaaaatccgtggctcgcagcaaacaccaaacaaaacaaacacaaaccaacaaaaattaaaacagcctgtgggttgatcccacccacaggcccattgggcgctagcactctggtatcacggtacctttgtgcgcctgttttataccccctcccccaactgtaacttagaagtaacacacaccgatcaacagtcagcgtggcacaccagccacgttttgatcaagcacttctgttaccccggactgagtatcaatagactgctcacgcggttgaaggagaaagcgttcgttatccggccaactacttcgaaaaacctagtaacaccgtggaagttgcagagtgtttcgctcagcactaccccagtgtagatcaggtcgatgagtcaccgcattccccacgggcgaccgtggcggtggctgcgttggcggcctgcccatggggaaacccatgggacgctctaatacagacatggtgcgaagagtctattgagctagttggtagtcctccggcccctgaatgcggctaatcctaactgcggagcacacaccctcaagccagagggcagtgtgtcgtaacgggcaactctgcagcggaaccgactactttgggtgtccgtgtttcattttattcctatactggctgcttatggtgacaattgagagatcgttaccatatagctattggattggccatccggtgactaatagagctattatatatccctttgttgggtttataccacttagcttgaaagaggttaaaacattacaattcattgttaagttgaatacagcaaaatggaagatgccaagaacatcaagaagggccctgctccattctaccctctggaagatggaacagccggcgagcagctgcacaaggccatgaagagatatgccctggtgcctggcacaatcgccttcacagatgcccacatcgaggtggacatcacctacgccgagtacttcgagatgtctgtgcggctggccgaagctatgaagcgctacggcctgaacaccaaccaccggatcgtcgtgtgcagcgagaacagcctgcagttcttcatgcctgtgctgggcgccctgttcatcggagttgctgtggcccctgccaacgacatctacaacgagcgcgagctgctgaacagcatgggcatctctcagcccaccgtggtgttcgtgtccaagaagggactgcagaaaatcctgaacgtgcagaagaagctgcccatcatccagaaaatcatcatcatggacagcaagaccgactaccagggcttccagagcatgtacaccttcgtgaccagccatctgccacctggcttcaacgagtacgacttcgtgcccgagagcttcgaccgggacaagacaatcgccctgatcatgaacagcagcggctctaccggactgcccaaaggtgttgccctgcctcatagaactgcctgcgtgcggtttagccacgccagagatcccatcttcggcaaccagatcatccccgacacagccatcctgagcgtggtgccttttcaccacggcttcggcatgttcaccacactgggctacctgatctgcggcttcagagtggtgctgatgtaccgcttcgaggaagaactgttcctgcggagcctgcaggactacaagatccagtctgctctgctggtgcctactctgttcagcttctttgccaagagcaccctgatcgataagtacgacctgagcaacctgcacgagatcgcctctggcggagcccctctgtctaaagaagtgggagaagccgtcgccaagcggttccatctgcctggcatcagacaaggctatggcctgaccgagacaaccagcgccattctgattacccctgagggcgacgataagcctggcgctgtgggaaaagtggtgccattcttcgaggccaaggtggtggatctggacaccggcaaaacactgggcgttaaccagaggggcgagctgtgtgttagaggccctatgatcatgagcggctacgtgaacaaccccgaggccacaaacgctctgatcgacaaggatggatggctgcacagcggcgacattgcctactgggacgaagatgagcacttcttcatcgtggaccggctgaagtccctgatcaagtacaagggctaccaggtggccccagccgagctggaatctattctgctgcaacaccccaacatcttcgatgccggcgttgcaggactgcccgatgatgatgctggcgaactgccagctgctgtggtggtgctggaacacggcaagaccatgaccgagaaagaaatcgtggactacgtggccagccaagtgaccaccgccaagaaactgagaggcggcgtggtgtttgtggacgaggtgccaaaaggcctgacaggcaagctggacgcccggaagatcagagagatcctgattaaggccaagaaaggcggcaagatcgccgtgtaatagctaactagacaaaacaccaaacaaacaagctgcgagccacggacttaaataattgagccttaaagaagaaattctttaagtggatgctctcaaactcagggaaacctaaatctagttatagacaaggcaatcctgagccaagccgaagtagtaattagtaagttaacaatagatgacttacaactaatcggaaaaaacaaccaaaaaaaatctagatatcggatcccggg

SEQ ID NO: 3375 - DNA, 2831 bp, synthetic construct
  source 1..2831: mol_type = other DNA; note = Ana1.155
taatacgactcactatagggagaccctcgaaaaaaaacacaaacaccggtgcagagactcgacgggagctaccctaacgtcaagacgagggtaaagagagagtccaattctcaaagccaataggcagtagcgaaagctgcaagagaatgaaaatccgtggctcgcagcaaacaccaaacaaaacaaacacaaaccaacaaaaattaaaacagcctgtgggttgatcccacccacaggcccattgggcgctagcactctggtatcacggtacctttgtgcgcctgttttataccccctcccccaactgtaacttagaagtaacacacaccgatcaacagtcagcgtggcacaccagccacgttttgatcaagcacttctgttaccccggactgagtatcaatagactgctcacgcggttgaaggagaaagcgttcgttatccggccaactacttcgaaaaacctagtaacaccgtggaagttgcagagtgtttcgctcagcactaccccagtgtagatcaggtcgatgagtcaccgcattccccacgggcgaccgtggcggtggctgcgttggcggcctgcccatggggaaacccatgggacgctctaatacagacatggtgcgaagagtctattgagctagttggtagtcctccggcccctgaatgcggctaatcctaactgcggagcacacaccctcaagccagagggcagtgtgtcgtaacgggcaactctgcagcggaaccgactactttgggtgtccgtgtttcattttattcctatactggctgcttatggtgacaattgagagatcgttaccatatagctattggattggccatccggtgactaatagagctattatatatccctttgttgggtttataccacttagcttgaaagaggttaaaacattacaattcattgttaagttgaatacagcaaaatggaagatgccaagaacatcaagaagggccctgctccattctaccctctggaagatggaacagccggcgagcagctgcacaaggccatgaagagatatgccctggtgcctggcacaatcgccttcacagatgcccacatcgaggtggacatcacctacgccgagtacttcgagatgtctgtgcggctggccgaagctatgaagcgctacggcctgaacaccaaccaccggatcgtcgtgtgcagcgagaacagcctgcagttcttcatgcctgtgctgggcgccctgttcatcggagttgctgtggcccctgccaacgacatctacaacgagcgcgagctgctgaacagcatgggcatctctcagcccaccgtggtgttcgtgtccaagaagggactgcagaaaatcctgaacgtgcagaagaagctgcccatcatccagaaaatcatcatcatggacagcaagaccgactaccagggcttccagagcatgtacaccttcgtgaccagccatctgccacctggcttcaacgagtacgacttcgtgcccgagagcttcgaccgggacaagacaatcgccctgatcatgaacagcagcggctctaccggactgcccaaaggtgttgccctgcctcatagaactgcctgcgtgcggtttagccacgccagagatcccatcttcggcaaccagatcatccccgacacagccatcctgagcgtggtgccttttcaccacggcttcggcatgttcaccacactgggctacctgatctgcggcttcagagtggtgctgatgtaccgcttcgaggaagaactgttcctgcggagcctgcaggactacaagatccagtctgctctgctggtgcctactctgttcagcttctttgccaagagcaccctgatcgataagtacgacctgagcaacctgcacgagatcgcctctggcggagcccctctgtctaaagaagtgggagaagccgtcgccaagcggttccatctgcctggcatcagacaaggctatggcctgaccgagacaaccagcgccattctgattacccctgagggcgacgataagcctggcgctgtgggaaaagtggtgccattcttcgaggccaaggtggtggatctggacaccggcaaaacactgggcgttaaccagaggggcgagctgtgtgttagaggccctatgatcatgagcggctacgtgaacaaccccgaggccacaaacgctctgatcgacaaggatggatggctgcacagcggcgacattgcctactgggacgaagatgagcacttcttcatcgtggaccggctgaagtccctgatcaagtacaagggctaccaggtggccccagccgagctggaatctattctgctgcaacaccccaacatcttcgatgccggcgttgcaggactgcccgatgatgatgctggcgaactgccagctgctgtggtggtgctggaacacggcaagaccatgaccgagaaagaaatcgtggactacgtggccagccaagtgaccaccgccaagaaactgagaggcggcgtggtgtttgtggacgaggtgccaaaaggcctgacaggcaagctggacgcccggaagatcagagagatcctgattaaggccaagaaaggcggcaagatcgccgtgtaatagctaactagacaaaacaccaaacaaacaagctgcgagccacggacttaaataattgagccttaaagaagaaattctttaagtggatgctctcaaactcagggaaacctaaatctagttatagacaaggcaatcctgagccaagccgaagtagtaattagtaagttaacaatagatgacttacaactaatcggaaaaaaacaaccaaaaaaaatctagatatcggatcccggg

SEQ ID NO: 3376 - DNA, 2831 bp, synthetic construct
  source 1..2831: mol_type = other DNA; note = Ana1.156
taatacgactcactatagggagaccctcgaaaaaaaacacaaacaccgtgcagagactcgacgggagctaccctaacgtcaagacgagggtaaagagagagtccaattctcaaagccaataggcagtagcgaaagctgcaagagaatgaaaatccgtggctcgcagcaaacaccaaacaaaacaaacacaaaccaacaaaaattaaaacagcctgtgggttgatcccacccacaggcccattgggcgctagcactctggtatcacggtacctttgtgcgcctgttttataccccctcccccaactgtaacttagaagtaacacacaccgatcaacagtcagcgtggcacaccagccacgttttgatcaagcacttctgttaccccggactgagtatcaatagactgctcacgcggttgaaggagaaagcgttcgttatccggccaactacttcgaaaaacctagtaacaccgtggaagttgcagagtgtttcgctcagcactaccccagtgtagatcaggtcgatgagtcaccgcattccccacgggcgaccgtggcggtggctgcgttggcggcctgcccatggggaaacccatgggacgctctaatacagacatggtgcgaagagtctattgagctagttggtagtcctccggcccctgaatgcggctaatcctaactgcggagcacacaccctcaagccagagggcagtgtgtcgtaacgggcaactctgcagcggaaccgactactttgggtgtccgtgtttcattttattcctatactggctgcttatggtgacaattgagagatcgttaccatatagctattggattggccatccggtgactaatagagctattatatatccctttgttgggtttataccacttagcttgaaagaggttaaaacattacaattcattgttaagttgaatacagcaaaatggaagatgccaagaacatcaagaagggccctgctccattctaccctctggaagatggaacagccggcgagcagctgcacaaggccatgaagagatatgccctggtgcctggcacaatcgccttcacagatgcccacatcgaggtggacatcacctacgccgagtacttcgagatgtctgtgcggctggccgaagctatgaagcgctacggcctgaacaccaaccaccggatcgtcgtgtgcagcgagaacagcctgcagttcttcatgcctgtgctgggcgccctgttcatcggagttgctgtggcccctgccaacgacatctacaacgagcgcgagctgctgaacagcatgggcatctctcagcccaccgtggtgttcgtgtccaagaagggactgcagaaaatcctgaacgtgcagaagaagctgcccatcatccagaaaatcatcatcatggacagcaagaccgactaccagggcttccagagcatgtacaccttcgtgaccagccatctgccacctggcttcaacgagtacgacttcgtgcccgagagcttcgaccgggacaagacaatcgccctgatcatgaacagcagcggctctaccggactgcccaaaggtgttgccctgcctcatagaactgcctgcgtgcggtttagccacgccagagatcccatcttcggcaaccagatcatccccgacacagccatcctgagcgtggtgccttttcaccacggcttcggcatgttcaccacactgggctacctgatctgcggcttcagagtggtgctgatgtaccgcttcgaggaagaactgttcctgcggagcctgcaggactacaagatccagtctgctctgctggtgcctactctgttcagcttctttgccaagagcaccctgatcgataagtacgacctgagcaacctgcacgagatcgcctctggcggagcccctctgtctaaagaagtgggagaagccgtcgccaagcggttccatctgcctggcatcagacaaggctatggcctgaccgagacaaccagcgccattctgattacccctgagggcgacgataagcctggcgctgtgggaaaagtggtgccattcttcgaggccaaggtggtggatctggacaccggcaaaacactgggcgttaaccagaggggcgagctgtgtgttagaggccctatgatcatgagcggctacgtgaacaaccccgaggccacaaacgctctgatcgacaaggatggatggctgcacagcggcgacattgcctactgggacgaagatgagcacttcttcatcgtggaccggctgaagtccctgatcaagtacaagggctaccaggtggccccagccgagctggaatctattctgctgcaacaccccaacatcttcgatgccggcgttgcaggactgcccgatgatgatgctggcgaactgccagctgctgtggtggtgctggaacacggcaagaccatgaccgagaaagaaatcgtggactacgtggccagccaagtgaccaccgccaagaaactgagaggcggcgtggtgtttgtggacgaggtgccaaaaggcctgacaggcaagctggacgcccggaagatcagagagatcctgattaaggccaagaaaggcggcaagatcgccgtgtaatagctaactagacaaaacaccaaacaaacaagctgcgagccacggacttaaataattgagccttaaagaagaaattctttaagtggatgctctcaaactcagggaaacctaaatctagttatagacaaggcaatcctgagccaagccgaagtagtaattagtaagttaacaatagatgacttacaactaatcggaagaaaaacaaccaaaaaaaatctagatatcggatcccggg

SEQ ID NO: 3377 - DNA, 2831 bp, synthetic construct
  source 1..2831: mol_type = other DNA; note = Ana1.157
taatacgactcactatagggagaccctcgaaaaaaaacacaaacacctgcagagactcgacgggagctaccctaacgtcaagacgagggtaaagagagagtccaattctcaaagccaataggcagtagcgaaagctgcaagagaatgaaaatccgtggctcgcagcaaacaccaaacaaaacaaacacaaaccaacaaaaattaaaacagcctgtgggttgatcccacccacaggcccattgggcgctagcactctggtatcacggtacctttgtgcgcctgttttataccccctcccccaactgtaacttagaagtaacacacaccgatcaacagtcagcgtggcacaccagccacgttttgatcaagcacttctgttaccccggactgagtatcaatagactgctcacgcggttgaaggagaaagcgttcgttatccggccaactacttcgaaaaacctagtaacaccgtggaagttgcagagtgtttcgctcagcactaccccagtgtagatcaggtcgatgagtcaccgcattccccacgggcgaccgtggcggtggctgcgttggcggcctgcccatggggaaacccatgggacgctctaatacagacatggtgcgaagagtctattgagctagttggtagtcctccggcccctgaatgcggctaatcctaactgcggagcacacaccctcaagccagagggcagtgtgtcgtaacgggcaactctgcagcggaaccgactactttgggtgtccgtgtttcattttattcctatactggctgcttatggtgacaattgagagatcgttaccatatagctattggattggccatccggtgactaatagagctattatatatccctttgttgggtttataccacttagcttgaaagaggttaaaacattacaattcattgttaagttgaatacagcaaaatggaagatgccaagaacatcaagaagggccctgctccattctaccctctggaagatggaacagccggcgagcagctgcacaaggccatgaagagatatgccctggtgcctggcacaatcgccttcacagatgcccacatcgaggtggacatcacctacgccgagtacttcgagatgtctgtgcggctggccgaagctatgaagcgctacggcctgaacaccaaccaccggatcgtcgtgtgcagcgagaacagcctgcagttcttcatgcctgtgctgggcgccctgttcatcggagttgctgtggcccctgccaacgacatctacaacgagcgcgagctgctgaacagcatgggcatctctcagcccaccgtggtgttcgtgtccaagaagggactgcagaaaatcctgaacgtgcagaagaagctgcccatcatccagaaaatcatcatcatggacagcaagaccgactaccagggcttccagagcatgtacaccttcgtgaccagccatctgccacctggcttcaacgagtacgacttcgtgcccgagagcttcgaccgggacaagacaatcgccctgatcatgaacagcagcggctctaccggactgcccaaaggtgttgccctgcctcatagaactgcctgcgtgcggtttagccacgccagagatcccatcttcggcaaccagatcatccccgacacagccatcctgagcgtggtgccttttcaccacggcttcggcatgttcaccacactgggctacctgatctgcggcttcagagtggtgctgatgtaccgcttcgaggaagaactgttcctgcggagcctgcaggactacaagatccagtctgctctgctggtgcctactctgttcagcttctttgccaagagcaccctgatcgataagtacgacctgagcaacctgcacgagatcgcctctggcggagcccctctgtctaaagaagtgggagaagccgtcgccaagcggttccatctgcctggcatcagacaaggctatggcctgaccgagacaaccagcgccattctgattacccctgagggcgacgataagcctggcgctgtgggaaaagtggtgccattcttcgaggccaaggtggtggatctggacaccggcaaaacactgggcgttaaccagaggggcgagctgtgtgttagaggccctatgatcatgagcggctacgtgaacaaccccgaggccacaaacgctctgatcgacaaggatggatggctgcacagcggcgacattgcctactgggacgaagatgagcacttcttcatcgtggaccggctgaagtccctgatcaagtacaagggctaccaggtggccccagccgagctggaatctattctgctgcaacaccccaacatcttcgatgccggcgttgcaggactgcccgatgatgatgctggcgaactgccagctgctgtggtggtgctggaacacggcaagaccatgaccgagaaagaaatcgtggactacgtggccagccaagtgaccaccgccaagaaactgagaggcggcgtggtgtttgtggacgaggtgccaaaaggcctgacaggcaagctggacgcccggaagatcagagagatcctgattaaggccaagaaaggcggcaagatcgccgtgtaatagctaactagacaaaacaccaaacaaacaagctgcgagccacggacttaaataattgagccttaaagaagaaattctttaagtggatgctctcaaactcagggaaacctaaatctagttatagacaaggcaatcctgagccaagccgaagtagtaattagtaagttaacaatagatgacttacaactaatcggaaggaaaaacaaccaaaaaaaatctagatatcggatcccggg

SEQ ID NO: 3378 - DNA, 2831 bp, synthetic construct
  source 1..2831: mol_type = other DNA; note = Ana1.158
taatacgactcactatagggagaccctcgaaaaaaaacacaaacaccgcagagactcgacgggagctaccctaacgtcaagacgagggtaaagagagagtccaattctcaaagccaataggcagtagcgaaagctgcaagagaatgaaaatccgtggctcgcagcaaacaccaaacaaaacaaacacaaaccaacaaaaattaaaacagcctgtgggttgatcccacccacaggcccattgggcgctagcactctggtatcacggtacctttgtgcgcctgttttataccccctcccccaactgtaacttagaagtaacacacaccgatcaacagtcagcgtggcacaccagccacgttttgatcaagcacttctgttaccccggactgagtatcaatagactgctcacgcggttgaaggagaaagcgttcgttatccggccaactacttcgaaaaacctagtaacaccgtggaagttgcagagtgtttcgctcagcactaccccagtgtagatcaggtcgatgagtcaccgcattccccacgggcgaccgtggcggtggctgcgttggcggcctgcccatggggaaacccatgggacgctctaatacagacatggtgcgaagagtctattgagctagttggtagtcctccggcccctgaatgcggctaatcctaactgcggagcacacaccctcaagccagagggcagtgtgtcgtaacgggcaactctgcagcggaaccgactactttgggtgtccgtgtttcattttattcctatactggctgcttatggtgacaattgagagatcgttaccatatagctattggattggccatccggtgactaatagagctattatatatccctttgttgggtttataccacttagcttgaaagaggttaaaacattacaattcattgttaagttgaatacagcaaaatggaagatgccaagaacatcaagaagggccctgctccattctaccctctggaagatggaacagccggcgagcagctgcacaaggccatgaagagatatgccctggtgcctggcacaatcgccttcacagatgcccacatcgaggtggacatcacctacgccgagtacttcgagatgtctgtgcggctggccgaagctatgaagcgctacggcctgaacaccaaccaccggatcgtcgtgtgcagcgagaacagcctgcagttcttcatgcctgtgctgggcgccctgttcatcggagttgctgtggcccctgccaacgacatctacaacgagcgcgagctgctgaacagcatgggcatctctcagcccaccgtggtgttcgtgtccaagaagggactgcagaaaatcctgaacgtgcagaagaagctgcccatcatccagaaaatcatcatcatggacagcaagaccgactaccagggcttccagagcatgtacaccttcgtgaccagccatctgccacctggcttcaacgagtacgacttcgtgcccgagagcttcgaccgggacaagacaatcgccctgatcatgaacagcagcggctctaccggactgcccaaaggtgttgccctgcctcatagaactgcctgcgtgcggtttagccacgccagagatcccatcttcggcaaccagatcatccccgacacagccatcctgagcgtggtgccttttcaccacggcttcggcatgttcaccacactgggctacctgatctgcggcttcagagtggtgctgatgtaccgcttcgaggaagaactgttcctgcggagcctgcaggactacaagatccagtctgctctgctggtgcctactctgttcagcttctttgccaagagcaccctgatcgataagtacgacctgagcaacctgcacgagatcgcctctggcggagcccctctgtctaaagaagtgggagaagccgtcgccaagcggttccatctgcctggcatcagacaaggctatggcctgaccgagacaaccagcgccattctgattacccctgagggcgacgataagcctggcgctgtgggaaaagtggtgccattcttcgaggccaaggtggtggatctggacaccggcaaaacactgggcgttaaccagaggggcgagctgtgtgttagaggccctatgatcatgagcggctacgtgaacaaccccgaggccacaaacgctctgatcgacaaggatggatggctgcacagcggcgacattgcctactgggacgaagatgagcacttcttcatcgtggaccggctgaagtccctgatcaagtacaagggctaccaggtggccccagccgagctggaatctattctgctgcaacaccccaacatcttcgatgccggcgttgcaggactgcccgatgatgatgctggcgaactgccagctgctgtggtggtgctggaacacggcaagaccatgaccgagaaagaaatcgtggactacgtggccagccaagtgaccaccgccaagaaactgagaggcggcgtggtgtttgtggacgaggtgccaaaaggcctgacaggcaagctggacgcccggaagatcagagagatcctgattaaggccaagaaaggcggcaagatcgccgtgtaatagctaactagacaaaacaccaaacaaacaagctgcgagccacggacttaaataattgagccttaaagaagaaattctttaagtggatgctctcaaactcagggaaacctaaatctagttatagacaaggcaatcctgagccaagccgaagtagtaattagtaagttaacaatagatgacttacaactaatcggaaggtaaaaacaaccaaaaaaaatctagatatcggatcccggg

SEQ ID NO: 3379 - DNA, 2831 bp, synthetic construct
  source 1..2831: mol_type = other DNA; note = Ana1.159
taatacgactcactatagggagaccctcgaaaaaaaacacaaacacccagagactcgacgggagctaccctaacgtcaagacgagggtaaagagagagtccaattctcaaagccaataggcagtagcgaaagctgcaagagaatgaaaatccgtggctcgcagcaaacaccaaacaaaacaaacacaaaccaacaaaaattaaaacagcctgtgggttgatcccacccacaggcccattgggcgctagcactctggtatcacggtacctttgtgcgcctgttttataccccctcccccaactgtaacttagaagtaacacacaccgatcaacagtcagcgtggcacaccagccacgttttgatcaagcacttctgttaccccggactgagtatcaatagactgctcacgcggttgaaggagaaagcgttcgttatccggccaactacttcgaaaaacctagtaacaccgtggaagttgcagagtgtttcgctcagcactaccccagtgtagatcaggtcgatgagtcaccgcattccccacgggcgaccgtggcggtggctgcgttggcggcctgcccatggggaaacccatgggacgctctaatacagacatggtgcgaagagtctattgagctagttggtagtcctccggcccctgaatgcggctaatcctaactgcggagcacacaccctcaagccagagggcagtgtgtcgtaacgggcaactctgcagcggaaccgactactttgggtgtccgtgtttcattttattcctatactggctgcttatggtgacaattgagagatcgttaccatatagctattggattggccatccggtgactaatagagctattatatatccctttgttgggtttataccacttagcttgaaagaggttaaaacattacaattcattgttaagttgaatacagcaaaatggaagatgccaagaacatcaagaagggccctgctccattctaccctctggaagatggaacagccggcgagcagctgcacaaggccatgaagagatatgccctggtgcctggcacaatcgccttcacagatgcccacatcgaggtggacatcacctacgccgagtacttcgagatgtctgtgcggctggccgaagctatgaagcgctacggcctgaacaccaaccaccggatcgtcgtgtgcagcgagaacagcctgcagttcttcatgcctgtgctgggcgccctgttcatcggagttgctgtggcccctgccaacgacatctacaacgagcgcgagctgctgaacagcatgggcatctctcagcccaccgtggtgttcgtgtccaagaagggactgcagaaaatcctgaacgtgcagaagaagctgcccatcatccagaaaatcatcatcatggacagcaagaccgactaccagggcttccagagcatgtacaccttcgtgaccagccatctgccacctggcttcaacgagtacgacttcgtgcccgagagcttcgaccgggacaagacaatcgccctgatcatgaacagcagcggctctaccggactgcccaaaggtgttgccctgcctcatagaactgcctgcgtgcggtttagccacgccagagatcccatcttcggcaaccagatcatccccgacacagccatcctgagcgtggtgccttttcaccacggcttcggcatgttcaccacactgggctacctgatctgcggcttcagagtggtgctgatgtaccgcttcgaggaagaactgttcctgcggagcctgcaggactacaagatccagtctgctctgctggtgcctactctgttcagcttctttgccaagagcaccctgatcgataagtacgacctgagcaacctgcacgagatcgcctctggcggagcccctctgtctaaagaagtgggagaagccgtcgccaagcggttccatctgcctggcatcagacaaggctatggcctgaccgagacaaccagcgccattctgattacccctgagggcgacgataagcctggcgctgtgggaaaagtggtgccattcttcgaggccaaggtggtggatctggacaccggcaaaacactgggcgttaaccagaggggcgagctgtgtgttagaggccctatgatcatgagcggctacgtgaacaaccccgaggccacaaacgctctgatcgacaaggatggatggctgcacagcggcgacattgcctactgggacgaagatgagcacttcttcatcgtggaccggctgaagtccctgatcaagtacaagggctaccaggtggccccagccgagctggaatctattctgctgcaacaccccaacatcttcgatgccggcgttgcaggactgcccgatgatgatgctggcgaactgccagctgctgtggtggtgctggaacacggcaagaccatgaccgagaaagaaatcgtggactacgtggccagccaagtgaccaccgccaagaaactgagaggcggcgtggtgtttgtggacgaggtgccaaaaggcctgacaggcaagctggacgcccggaagatcagagagatcctgattaaggccaagaaaggcggcaagatcgccgtgtaatagctaactagacaaaacaccaaacaaacaagctgcgagccacggacttaaataattgagccttaaagaagaaattctttaagtggatgctctcaaactcagggaaacctaaatctagttatagacaaggcaatcctgagccaagccgaagtagtaattagtaagttaacaatagatgacttacaactaatcggaaggtgaaaaacaaccaaaaaaaatctagatatcggatcccggg

SEQ ID NO: 3380 - DNA, 2831 bp, synthetic construct
  source 1..2831: mol_type = other DNA; note = Ana1.160
taatacgactcactatagggagaccctcgaaaaaaaacacaaacaccagagactcgacgggagctaccctaacgtcaagacgagggtaaagagagagtccaattctcaaagccaataggcagtagcgaaagctgcaagagaatgaaaatccgtggctcgcagcaaacaccaaacaaaacaaacacaaaccaacaaaaattaaaacagcctgtgggttgatcccacccacaggcccattgggcgctagcactctggtatcacggtacctttgtgcgcctgttttataccccctcccccaactgtaacttagaagtaacacacaccgatcaacagtcagcgtggcacaccagccacgttttgatcaagcacttctgttaccccggactgagtatcaatagactgctcacgcggttgaaggagaaagcgttcgttatccggccaactacttcgaaaaacctagtaacaccgtggaagttgcagagtgtttcgctcagcactaccccagtgtagatcaggtcgatgagtcaccgcattccccacgggcgaccgtggcggtggctgcgttggcggcctgcccatggggaaacccatgggacgctctaatacagacatggtgcgaagagtctattgagctagttggtagtcctccggcccctgaatgcggctaatcctaactgcggagcacacaccctcaagccagagggcagtgtgtcgtaacgggcaactctgcagcggaaccgactactttgggtgtccgtgtttcattttattcctatactggctgcttatggtgacaattgagagatcgttaccatatagctattggattggccatccggtgactaatagagctattatatatccctttgttgggtttataccacttagcttgaaagaggttaaaacattacaattcattgttaagttgaatacagcaaaatggaagatgccaagaacatcaagaagggccctgctccattctaccctctggaagatggaacagccggcgagcagctgcacaaggccatgaagagatatgccctggtgcctggcacaatcgccttcacagatgcccacatcgaggtggacatcacctacgccgagtacttcgagatgtctgtgcggctggccgaagctatgaagcgctacggcctgaacaccaaccaccggatcgtcgtgtgcagcgagaacagcctgcagttcttcatgcctgtgctgggcgccctgttcatcggagttgctgtggcccctgccaacgacatctacaacgagcgcgagctgctgaacagcatgggcatctctcagcccaccgtggtgttcgtgtccaagaagggactgcagaaaatcctgaacgtgcagaagaagctgcccatcatccagaaaatcatcatcatggacagcaagaccgactaccagggcttccagagcatgtacaccttcgtgaccagccatctgccacctggcttcaacgagtacgacttcgtgcccgagagcttcgaccgggacaagacaatcgccctgatcatgaacagcagcggctctaccggactgcccaaaggtgttgccctgcctcatagaactgcctgcgtgcggtttagccacgccagagatcccatcttcggcaaccagatcatccccgacacagccatcctgagcgtggtgccttttcaccacggcttcggcatgttcaccacactgggctacctgatctgcggcttcagagtggtgctgatgtaccgcttcgaggaagaactgttcctgcggagcctgcaggactacaagatccagtctgctctgctggtgcctactctgttcagcttctttgccaagagcaccctgatcgataagtacgacctgagcaacctgcacgagatcgcctctggcggagcccctctgtctaaagaagtgggagaagccgtcgccaagcggttccatctgcctggcatcagacaaggctatggcctgaccgagacaaccagcgccattctgattacccctgagggcgacgataagcctggcgctgtgggaaaagtggtgccattcttcgaggccaaggtggtggatctggacaccggcaaaacactgggcgttaaccagaggggcgagctgtgtgttagaggccctatgatcatgagcggctacgtgaacaaccccgaggccacaaacgctctgatcgacaaggatggatggctgcacagcggcgacattgcctactgggacgaagatgagcacttcttcatcgtggaccggctgaagtccctgatcaagtacaagggctaccaggtggccccagccgagctggaatctattctgctgcaacaccccaacatcttcgatgccggcgttgcaggactgcccgatgatgatgctggcgaactgccagctgctgtggtggtgctggaacacggcaagaccatgaccgagaaagaaatcgtggactacgtggccagccaagtgaccaccgccaagaaactgagaggcggcgtggtgtttgtggacgaggtgccaaaaggcctgacaggcaagctggacgcccggaagatcagagagatcctgattaaggccaagaaaggcggcaagatcgccgtgtaatagctaactagacaaaacaccaaacaaacaagctgcgagccacggacttaaataattgagccttaaagaagaaattctttaagtggatgctctcaaactcagggaaacctaaatctagttatagacaaggcaatcctgagccaagccgaagtagtaattagtaagttaacaatagatgacttacaactaatcggaaggtgcaaaaacaaccaaaaaaaatctagatatcggatcccggg

SEQ ID NO: 3381 - DNA, 2831 bp, synthetic construct
  source 1..2831: mol_type = other DNA; note = Ana1.161
taatacgactcactatagggagaccctcgaaaaaaaacacaaacaccgagactcgacgggagctaccctaacgtcaagacgagggtaaagagagagtccaattctcaaagccaataggcagtagcgaaagctgcaagagaatgaaaatccgtggctcgcagcaaacaccaaacaaaacaaacacaaaccaacaaaaattaaaacagcctgtgggttgatcccacccacaggcccattgggcgctagcactctggtatcacggtacctttgtgcgcctgttttataccccctcccccaactgtaacttagaagtaacacacaccgatcaacagtcagcgtggcacaccagccacgttttgatcaagcacttctgttaccccggactgagtatcaatagactgctcacgcggttgaaggagaaagcgttcgttatccggccaactacttcgaaaaacctagtaacaccgtggaagttgcagagtgtttcgctcagcactaccccagtgtagatcaggtcgatgagtcaccgcattccccacgggcgaccgtggcggtggctgcgttggcggcctgcccatggggaaacccatgggacgctctaatacagacatggtgcgaagagtctattgagctagttggtagtcctccggcccctgaatgcggctaatcctaactgcggagcacacaccctcaagccagagggcagtgtgtcgtaacgggcaactctgcagcggaaccgactactttgggtgtccgtgtttcattttattcctatactggctgcttatggtgacaattgagagatcgttaccatatagctattggattggccatccggtgactaatagagctattatatatccctttgttgggtttataccacttagcttgaaagaggttaaaacattacaattcattgttaagttgaatacagcaaaatggaagatgccaagaacatcaagaagggccctgctccattctaccctctggaagatggaacagccggcgagcagctgcacaaggccatgaagagatatgccctggtgcctggcacaatcgccttcacagatgcccacatcgaggtggacatcacctacgccgagtacttcgagatgtctgtgcggctggccgaagctatgaagcgctacggcctgaacaccaaccaccggatcgtcgtgtgcagcgagaacagcctgcagttcttcatgcctgtgctgggcgccctgttcatcggagttgctgtggcccctgccaacgacatctacaacgagcgcgagctgctgaacagcatgggcatctctcagcccaccgtggtgttcgtgtccaagaagggactgcagaaaatcctgaacgtgcagaagaagctgcccatcatccagaaaatcatcatcatggacagcaagaccgactaccagggcttccagagcatgtacaccttcgtgaccagccatctgccacctggcttcaacgagtacgacttcgtgcccgagagcttcgaccgggacaagacaatcgccctgatcatgaacagcagcggctctaccggactgcccaaaggtgttgccctgcctcatagaactgcctgcgtgcggtttagccacgccagagatcccatcttcggcaaccagatcatccccgacacagccatcctgagcgtggtgccttttcaccacggcttcggcatgttcaccacactgggctacctgatctgcggcttcagagtggtgctgatgtaccgcttcgaggaagaactgttcctgcggagcctgcaggactacaagatccagtctgctctgctggtgcctactctgttcagcttctttgccaagagcaccctgatcgataagtacgacctgagcaacctgcacgagatcgcctctggcggagcccctctgtctaaagaagtgggagaagccgtcgccaagcggttccatctgcctggcatcagacaaggctatggcctgaccgagacaaccagcgccattctgattacccctgagggcgacgataagcctggcgctgtgggaaaagtggtgccattcttcgaggccaaggtggtggatctggacaccggcaaaacactgggcgttaaccagaggggcgagctgtgtgttagaggccctatgatcatgagcggctacgtgaacaaccccgaggccacaaacgctctgatcgacaaggatggatggctgcacagcggcgacattgcctactgggacgaagatgagcacttcttcatcgtggaccggctgaagtccctgatcaagtacaagggctaccaggtggccccagccgagctggaatctattctgctgcaacaccccaacatcttcgatgccggcgttgcaggactgcccgatgatgatgctggcgaactgccagctgctgtggtggtgctggaacacggcaagaccatgaccgagaaagaaatcgtggactacgtggccagccaagtgaccaccgccaagaaactgagaggcggcgtggtgtttgtggacgaggtgccaaaaggcctgacaggcaagctggacgcccggaagatcagagagatcctgattaaggccaagaaaggcggcaagatcgccgtgtaatagctaactagacaaaacaccaaacaaacaagctgcgagccacggacttaaataattgagccttaaagaagaaattctttaagtggatgctctcaaactcagggaaacctaaatctagttatagacaaggcaatcctgagccaagccgaagtagtaattagtaagttaacaatagatgacttacaactaatcggaaggtgcaaaaaacaaccaaaaaaaatctagatatcggatcccggg

SEQ ID NO: 3382 - DNA, 2831 bp, synthetic construct
  source 1..2831: mol_type = other DNA; note = Ana1.162
taatacgactcactatagggagaccctcgaaaaaaaacacaaacaccagactcgacgggagctaccctaacgtcaagacgagggtaaagagagagtccaattctcaaagccaataggcagtagcgaaagctgcaagagaatgaaaatccgtggctcgcagcaaacaccaaacaaaacaaacacaaaccaacaaaaattaaaacagcctgtgggttgatcccacccacaggcccattgggcgctagcactctggtatcacggtacctttgtgcgcctgttttataccccctcccccaactgtaacttagaagtaacacacaccgatcaacagtcagcgtggcacaccagccacgttttgatcaagcacttctgttaccccggactgagtatcaatagactgctcacgcggttgaaggagaaagcgttcgttatccggccaactacttcgaaaaacctagtaacaccgtggaagttgcagagtgtttcgctcagcactaccccagtgtagatcaggtcgatgagtcaccgcattccccacgggcgaccgtggcggtggctgcgttggcggcctgcccatggggaaacccatgggacgctctaatacagacatggtgcgaagagtctattgagctagttggtagtcctccggcccctgaatgcggctaatcctaactgcggagcacacaccctcaagccagagggcagtgtgtcgtaacgggcaactctgcagcggaaccgactactttgggtgtccgtgtttcattttattcctatactggctgcttatggtgacaattgagagatcgttaccatatagctattggattggccatccggtgactaatagagctattatatatccctttgttgggtttataccacttagcttgaaagaggttaaaacattacaattcattgttaagttgaatacagcaaaatggaagatgccaagaacatcaagaagggccctgctccattctaccctctggaagatggaacagccggcgagcagctgcacaaggccatgaagagatatgccctggtgcctggcacaatcgccttcacagatgcccacatcgaggtggacatcacctacgccgagtacttcgagatgtctgtgcggctggccgaagctatgaagcgctacggcctgaacaccaaccaccggatcgtcgtgtgcagcgagaacagcctgcagttcttcatgcctgtgctgggcgccctgttcatcggagttgctgtggcccctgccaacgacatctacaacgagcgcgagctgctgaacagcatgggcatctctcagcccaccgtggtgttcgtgtccaagaagggactgcagaaaatcctgaacgtgcagaagaagctgcccatcatccagaaaatcatcatcatggacagcaagaccgactaccagggcttccagagcatgtacaccttcgtgaccagccatctgccacctggcttcaacgagtacgacttcgtgcccgagagcttcgaccgggacaagacaatcgccctgatcatgaacagcagcggctctaccggactgcccaaaggtgttgccctgcctcatagaactgcctgcgtgcggtttagccacgccagagatcccatcttcggcaaccagatcatccccgacacagccatcctgagcgtggtgccttttcaccacggcttcggcatgttcaccacactgggctacctgatctgcggcttcagagtggtgctgatgtaccgcttcgaggaagaactgttcctgcggagcctgcaggactacaagatccagtctgctctgctggtgcctactctgttcagcttctttgccaagagcaccctgatcgataagtacgacctgagcaacctgcacgagatcgcctctggcggagcccctctgtctaaagaagtgggagaagccgtcgccaagcggttccatctgcctggcatcagacaaggctatggcctgaccgagacaaccagcgccattctgattacccctgagggcgacgataagcctggcgctgtgggaaaagtggtgccattcttcgaggccaaggtggtggatctggacaccggcaaaacactgggcgttaaccagaggggcgagctgtgtgttagaggccctatgatcatgagcggctacgtgaacaaccccgaggccacaaacgctctgatcgacaaggatggatggctgcacagcggcgacattgcctactgggacgaagatgagcacttcttcatcgtggaccggctgaagtccctgatcaagtacaagggctaccaggtggccccagccgagctggaatctattctgctgcaacaccccaacatcttcgatgccggcgttgcaggactgcccgatgatgatgctggcgaactgccagctgctgtggtggtgctggaacacggcaagaccatgaccgagaaagaaatcgtggactacgtggccagccaagtgaccaccgccaagaaactgagaggcggcgtggtgtttgtggacgaggtgccaaaaggcctgacaggcaagctggacgcccggaagatcagagagatcctgattaaggccaagaaaggcggcaagatcgccgtgtaatagctaactagacaaaacaccaaacaaacaagctgcgagccacggacttaaataattgagccttaaagaagaaattctttaagtggatgctctcaaactcagggaaacctaaatctagttatagacaaggcaatcctgagccaagccgaagtagtaattagtaagttaacaatagatgacttacaactaatcggaaggtgcagaaaaacaaccaaaaaaaatctagatatcggatcccggg

SEQ ID NO: 3383 - DNA, 2831 bp, synthetic construct
  source 1..2831: mol_type = other DNA; note = Ana1.163
taatacgactcactatagggagaccctcgaaaaaaaacacaaacaccgactcgacgggagctaccctaacgtcaagacgagggtaaagagagagtccaattctcaaagccaataggcagtagcgaaagctgcaagagaatgaaaatccgtggctcgcagcaaacaccaaacaaaacaaacacaaaccaacaaaaattaaaacagcctgtgggttgatcccacccacaggcccattgggcgctagcactctggtatcacggtacctttgtgcgcctgttttataccccctcccccaactgtaacttagaagtaacacacaccgatcaacagtcagcgtggcacaccagccacgttttgatcaagcacttctgttaccccggactgagtatcaatagactgctcacgcggttgaaggagaaagcgttcgttatccggccaactacttcgaaaaacctagtaacaccgtggaagttgcagagtgtttcgctcagcactaccccagtgtagatcaggtcgatgagtcaccgcattccccacgggcgaccgtggcggtggctgcgttggcggcctgcccatggggaaacccatgggacgctctaatacagacatggtgcgaagagtctattgagctagttggtagtcctccggcccctgaatgcggctaatcctaactgcggagcacacaccctcaagccagagggcagtgtgtcgtaacgggcaactctgcagcggaaccgactactttgggtgtccgtgtttcattttattcctatactggctgcttatggtgacaattgagagatcgttaccatatagctattggattggccatccggtgactaatagagctattatatatccctttgttgggtttataccacttagcttgaaagaggttaaaacattacaattcattgttaagttgaatacagcaaaatggaagatgccaagaacatcaagaagggccctgctccattctaccctctggaagatggaacagccggcgagcagctgcacaaggccatgaagagatatgccctggtgcctggcacaatcgccttcacagatgcccacatcgaggtggacatcacctacgccgagtacttcgagatgtctgtgcggctggccgaagctatgaagcgctacggcctgaacaccaaccaccggatcgtcgtgtgcagcgagaacagcctgcagttcttcatgcctgtgctgggcgccctgttcatcggagttgctgtggcccctgccaacgacatctacaacgagcgcgagctgctgaacagcatgggcatctctcagcccaccgtggtgttcgtgtccaagaagggactgcagaaaatcctgaacgtgcagaagaagctgcccatcatccagaaaatcatcatcatggacagcaagaccgactaccagggcttccagagcatgtacaccttcgtgaccagccatctgccacctggcttcaacgagtacgacttcgtgcccgagagcttcgaccgggacaagacaatcgccctgatcatgaacagcagcggctctaccggactgcccaaaggtgttgccctgcctcatagaactgcctgcgtgcggtttagccacgccagagatcccatcttcggcaaccagatcatccccgacacagccatcctgagcgtggtgccttttcaccacggcttcggcatgttcaccacactgggctacctgatctgcggcttcagagtggtgctgatgtaccgcttcgaggaagaactgttcctgcggagcctgcaggactacaagatccagtctgctctgctggtgcctactctgttcagcttctttgccaagagcaccctgatcgataagtacgacctgagcaacctgcacgagatcgcctctggcggagcccctctgtctaaagaagtgggagaagccgtcgccaagcggttccatctgcctggcatcagacaaggctatggcctgaccgagacaaccagcgccattctgattacccctgagggcgacgataagcctggcgctgtgggaaaagtggtgccattcttcgaggccaaggtggtggatctggacaccggcaaaacactgggcgttaaccagaggggcgagctgtgtgttagaggccctatgatcatgagcggctacgtgaacaaccccgaggccacaaacgctctgatcgacaaggatggatggctgcacagcggcgacattgcctactgggacgaagatgagcacttcttcatcgtggaccggctgaagtccctgatcaagtacaagggctaccaggtggccccagccgagctggaatctattctgctgcaacaccccaacatcttcgatgccggcgttgcaggactgcccgatgatgatgctggcgaactgccagctgctgtggtggtgctggaacacggcaagaccatgaccgagaaagaaatcgtggactacgtggccagccaagtgaccaccgccaagaaactgagaggcggcgtggtgtttgtggacgaggtgccaaaaggcctgacaggcaagctggacgcccggaagatcagagagatcctgattaaggccaagaaaggcggcaagatcgccgtgtaatagctaactagacaaaacaccaaacaaacaagctgcgagccacggacttaaataattgagccttaaagaagaaattctttaagtggatgctctcaaactcagggaaacctaaatctagttatagacaaggcaatcctgagccaagccgaagtagtaattagtaagttaacaatagatgacttacaactaatcggaaggtgcagaaaaaacaaccaaaaaaaatctagatatcggatcccggg

SEQ ID NO: 3384 - DNA, 2831 bp, synthetic construct
  source 1..2831: mol_type = other DNA; note = Ana1.164
taatacgactcactatagggagaccctcgaaaaaaaacacaaacaccactcgacgggagctaccctaacgtcaagacgagggtaaagagagagtccaattctcaaagccaataggcagtagcgaaagctgcaagagaatgaaaatccgtggctcgcagcaaacaccaaacaaaacaaacacaaaccaacaaaaattaaaacagcctgtgggttgatcccacccacaggcccattgggcgctagcactctggtatcacggtacctttgtgcgcctgttttataccccctcccccaactgtaacttagaagtaacacacaccgatcaacagtcagcgtggcacaccagccacgttttgatcaagcacttctgttaccccggactgagtatcaatagactgctcacgcggttgaaggagaaagcgttcgttatccggccaactacttcgaaaaacctagtaacaccgtggaagttgcagagtgtttcgctcagcactaccccagtgtagatcaggtcgatgagtcaccgcattccccacgggcgaccgtggcggtggctgcgttggcggcctgcccatggggaaacccatgggacgctctaatacagacatggtgcgaagagtctattgagctagttggtagtcctccggcccctgaatgcggctaatcctaactgcggagcacacaccctcaagccagagggcagtgtgtcgtaacgggcaactctgcagcggaaccgactactttgggtgtccgtgtttcattttattcctatactggctgcttatggtgacaattgagagatcgttaccatatagctattggattggccatccggtgactaatagagctattatatatccctttgttgggtttataccacttagcttgaaagaggttaaaacattacaattcattgttaagttgaatacagcaaaatggaagatgccaagaacatcaagaagggccctgctccattctaccctctggaagatggaacagccggcgagcagctgcacaaggccatgaagagatatgccctggtgcctggcacaatcgccttcacagatgcccacatcgaggtggacatcacctacgccgagtacttcgagatgtctgtgcggctggccgaagctatgaagcgctacggcctgaacaccaaccaccggatcgtcgtgtgcagcgagaacagcctgcagttcttcatgcctgtgctgggcgccctgttcatcggagttgctgtggcccctgccaacgacatctacaacgagcgcgagctgctgaacagcatgggcatctctcagcccaccgtggtgttcgtgtccaagaagggactgcagaaaatcctgaacgtgcagaagaagctgcccatcatccagaaaatcatcatcatggacagcaagaccgactaccagggcttccagagcatgtacaccttcgtgaccagccatctgccacctggcttcaacgagtacgacttcgtgcccgagagcttcgaccgggacaagacaatcgccctgatcatgaacagcagcggctctaccggactgcccaaaggtgttgccctgcctcatagaactgcctgcgtgcggtttagccacgccagagatcccatcttcggcaaccagatcatccccgacacagccatcctgagcgtggtgccttttcaccacggcttcggcatgttcaccacactgggctacctgatctgcggcttcagagtggtgctgatgtaccgcttcgaggaagaactgttcctgcggagcctgcaggactacaagatccagtctgctctgctggtgcctactctgttcagcttctttgccaagagcaccctgatcgataagtacgacctgagcaacctgcacgagatcgcctctggcggagcccctctgtctaaagaagtgggagaagccgtcgccaagcggttccatctgcctggcatcagacaaggctatggcctgaccgagacaaccagcgccattctgattacccctgagggcgacgataagcctggcgctgtgggaaaagtggtgccattcttcgaggccaaggtggtggatctggacaccggcaaaacactgggcgttaaccagaggggcgagctgtgtgttagaggccctatgatcatgagcggctacgtgaacaaccccgaggccacaaacgctctgatcgacaaggatggatggctgcacagcggcgacattgcctactgggacgaagatgagcacttcttcatcgtggaccggctgaagtccctgatcaagtacaagggctaccaggtggccccagccgagctggaatctattctgctgcaacaccccaacatcttcgatgccggcgttgcaggactgcccgatgatgatgctggcgaactgccagctgctgtggtggtgctggaacacggcaagaccatgaccgagaaagaaatcgtggactacgtggccagccaagtgaccaccgccaagaaactgagaggcggcgtggtgtttgtggacgaggtgccaaaaggcctgacaggcaagctggacgcccggaagatcagagagatcctgattaaggccaagaaaggcggcaagatcgccgtgtaatagctaactagacaaaacaccaaacaaacaagctgcgagccacggacttaaataattgagccttaaagaagaaattctttaagtggatgctctcaaactcagggaaacctaaatctagttatagacaaggcaatcctgagccaagccgaagtagtaattagtaagttaacaatagatgacttacaactaatcggaaggtgcagagaaaaacaaccaaaaaaaatctagatatcggatcccggg

SEQ ID NO: 3385 - DNA, 2831 bp, synthetic construct
  source 1..2831: mol_type = other DNA; note = Ana1.165
taatacgactcactatagggagaccctcgaaaaaaaacacaaacaccctcgacgggagctaccctaacgtcaagacgagggtaaagagagagtccaattctcaaagccaataggcagtagcgaaagctgcaagagaatgaaaatccgtggctcgcagcaaacaccaaacaaaacaaacacaaaccaacaaaaattaaaacagcctgtgggttgatcccacccacaggcccattgggcgctagcactctggtatcacggtacctttgtgcgcctgttttataccccctcccccaactgtaacttagaagtaacacacaccgatcaacagtcagcgtggcacaccagccacgttttgatcaagcacttctgttaccccggactgagtatcaatagactgctcacgcggttgaaggagaaagcgttcgttatccggccaactacttcgaaaaacctagtaacaccgtggaagttgcagagtgtttcgctcagcactaccccagtgtagatcaggtcgatgagtcaccgcattccccacgggcgaccgtggcggtggctgcgttggcggcctgcccatggggaaacccatgggacgctctaatacagacatggtgcgaagagtctattgagctagttggtagtcctccggcccctgaatgcggctaatcctaactgcggagcacacaccctcaagccagagggcagtgtgtcgtaacgggcaactctgcagcggaaccgactactttgggtgtccgtgtttcattttattcctatactggctgcttatggtgacaattgagagatcgttaccatatagctattggattggccatccggtgactaatagagctattatatatccctttgttgggtttataccacttagcttgaaagaggttaaaacattacaattcattgttaagttgaatacagcaaaatggaagatgccaagaacatcaagaagggccctgctccattctaccctctggaagatggaacagccggcgagcagctgcacaaggccatgaagagatatgccctggtgcctggcacaatcgccttcacagatgcccacatcgaggtggacatcacctacgccgagtacttcgagatgtctgtgcggctggccgaagctatgaagcgctacggcctgaacaccaaccaccggatcgtcgtgtgcagcgagaacagcctgcagttcttcatgcctgtgctgggcgccctgttcatcggagttgctgtggcccctgccaacgacatctacaacgagcgcgagctgctgaacagcatgggcatctctcagcccaccgtggtgttcgtgtccaagaagggactgcagaaaatcctgaacgtgcagaagaagctgcccatcatccagaaaatcatcatcatggacagcaagaccgactaccagggcttccagagcatgtacaccttcgtgaccagccatctgccacctggcttcaacgagtacgacttcgtgcccgagagcttcgaccgggacaagacaatcgccctgatcatgaacagcagcggctctaccggactgcccaaaggtgttgccctgcctcatagaactgcctgcgtgcggtttagccacgccagagatcccatcttcggcaaccagatcatccccgacacagccatcctgagcgtggtgccttttcaccacggcttcggcatgttcaccacactgggctacctgatctgcggcttcagagtggtgctgatgtaccgcttcgaggaagaactgttcctgcggagcctgcaggactacaagatccagtctgctctgctggtgcctactctgttcagcttctttgccaagagcaccctgatcgataagtacgacctgagcaacctgcacgagatcgcctctggcggagcccctctgtctaaagaagtgggagaagccgtcgccaagcggttccatctgcctggcatcagacaaggctatggcctgaccgagacaaccagcgccattctgattacccctgagggcgacgataagcctggcgctgtgggaaaagtggtgccattcttcgaggccaaggtggtggatctggacaccggcaaaacactgggcgttaaccagaggggcgagctgtgtgttagaggccctatgatcatgagcggctacgtgaacaaccccgaggccacaaacgctctgatcgacaaggatggatggctgcacagcggcgacattgcctactgggacgaagatgagcacttcttcatcgtggaccggctgaagtccctgatcaagtacaagggctaccaggtggccccagccgagctggaatctattctgctgcaacaccccaacatcttcgatgccggcgttgcaggactgcccgatgatgatgctggcgaactgccagctgctgtggtggtgctggaacacggcaagaccatgaccgagaaagaaatcgtggactacgtggccagccaagtgaccaccgccaagaaactgagaggcggcgtggtgtttgtggacgaggtgccaaaaggcctgacaggcaagctggacgcccggaagatcagagagatcctgattaaggccaagaaaggcggcaagatcgccgtgtaatagctaactagacaaaacaccaaacaaacaagctgcgagccacggacttaaataattgagccttaaagaagaaattctttaagtggatgctctcaaactcagggaaacctaaatctagttatagacaaggcaatcctgagccaagccgaagtagtaattagtaagttaacaatagatgacttacaactaatcggaaggtgcagagaaaaaacaaccaaaaaaaatctagatatcggatcccggg

SEQ ID NO: 3386 - DNA, 2831 bp, synthetic construct
  source 1..2831: mol_type = other DNA; note = Ana1.166
taatacgactcactatagggagaccctcgaaaaaaaacacaaacacctcgacgggagctaccctaacgtcaagacgagggtaaagagagagtccaattctcaaagccaataggcagtagcgaaagctgcaagagaatgaaaatccgtggctcgcagcaaacaccaaacaaaacaaacacaaaccaacaaaaattaaaacagcctgtgggttgatcccacccacaggcccattgggcgctagcactctggtatcacggtacctttgtgcgcctgttttataccccctcccccaactgtaacttagaagtaacacacaccgatcaacagtcagcgtggcacaccagccacgttttgatcaagcacttctgttaccccggactgagtatcaatagactgctcacgcggttgaaggagaaagcgttcgttatccggccaactacttcgaaaaacctagtaacaccgtggaagttgcagagtgtttcgctcagcactaccccagtgtagatcaggtcgatgagtcaccgcattccccacgggcgaccgtggcggtggctgcgttggcggcctgcccatggggaaacccatgggacgctctaatacagacatggtgcgaagagtctattgagctagttggtagtcctccggcccctgaatgcggctaatcctaactgcggagcacacaccctcaagccagagggcagtgtgtcgtaacgggcaactctgcagcggaaccgactactttgggtgtccgtgtttcattttattcctatactggctgcttatggtgacaattgagagatcgttaccatatagctattggattggccatccggtgactaatagagctattatatatccctttgttgggtttataccacttagcttgaaagaggttaaaacattacaattcattgttaagttgaatacagcaaaatggaagatgccaagaacatcaagaagggccctgctccattctaccctctggaagatggaacagccggcgagcagctgcacaaggccatgaagagatatgccctggtgcctggcacaatcgccttcacagatgcccacatcgaggtggacatcacctacgccgagtacttcgagatgtctgtgcggctggccgaagctatgaagcgctacggcctgaacaccaaccaccggatcgtcgtgtgcagcgagaacagcctgcagttcttcatgcctgtgctgggcgccctgttcatcggagttgctgtggcccctgccaacgacatctacaacgagcgcgagctgctgaacagcatgggcatctctcagcccaccgtggtgttcgtgtccaagaagggactgcagaaaatcctgaacgtgcagaagaagctgcccatcatccagaaaatcatcatcatggacagcaagaccgactaccagggcttccagagcatgtacaccttcgtgaccagccatctgccacctggcttcaacgagtacgacttcgtgcccgagagcttcgaccgggacaagacaatcgccctgatcatgaacagcagcggctctaccggactgcccaaaggtgttgccctgcctcatagaactgcctgcgtgcggtttagccacgccagagatcccatcttcggcaaccagatcatccccgacacagccatcctgagcgtggtgccttttcaccacggcttcggcatgttcaccacactgggctacctgatctgcggcttcagagtggtgctgatgtaccgcttcgaggaagaactgttcctgcggagcctgcaggactacaagatccagtctgctctgctggtgcctactctgttcagcttctttgccaagagcaccctgatcgataagtacgacctgagcaacctgcacgagatcgcctctggcggagcccctctgtctaaagaagtgggagaagccgtcgccaagcggttccatctgcctggcatcagacaaggctatggcctgaccgagacaaccagcgccattctgattacccctgagggcgacgataagcctggcgctgtgggaaaagtggtgccattcttcgaggccaaggtggtggatctggacaccggcaaaacactgggcgttaaccagaggggcgagctgtgtgttagaggccctatgatcatgagcggctacgtgaacaaccccgaggccacaaacgctctgatcgacaaggatggatggctgcacagcggcgacattgcctactgggacgaagatgagcacttcttcatcgtggaccggctgaagtccctgatcaagtacaagggctaccaggtggccccagccgagctggaatctattctgctgcaacaccccaacatcttcgatgccggcgttgcaggactgcccgatgatgatgctggcgaactgccagctgctgtggtggtgctggaacacggcaagaccatgaccgagaaagaaatcgtggactacgtggccagccaagtgaccaccgccaagaaactgagaggcggcgtggtgtttgtggacgaggtgccaaaaggcctgacaggcaagctggacgcccggaagatcagagagatcctgattaaggccaagaaaggcggcaagatcgccgtgtaatagctaactagacaaaacaccaaacaaacaagctgcgagccacggacttaaataattgagccttaaagaagaaattctttaagtggatgctctcaaactcagggaaacctaaatctagttatagacaaggcaatcctgagccaagccgaagtagtaattagtaagttaacaatagatgacttacaactaatcggaaggtgcagagacaaaaacaaccaaaaaaaatctagatatcggatcccggg

SEQ ID NO: 3387 - DNA, 2831 bp, synthetic construct
  source 1..2831: mol_type = other DNA; note = Ana1.167
taatacgactcactatagggagaccctcgaaaaaaaacacaaacacccgacgggagctaccctaacgtcaagacgagggtaaagagagagtccaattctcaaagccaataggcagtagcgaaagctgcaagagaatgaaaatccgtggctcgcagcaaacaccaaacaaaacaaacacaaaccaacaaaaattaaaacagcctgtgggttgatcccacccacaggcccattgggcgctagcactctggtatcacggtacctttgtgcgcctgttttataccccctcccccaactgtaacttagaagtaacacacaccgatcaacagtcagcgtggcacaccagccacgttttgatcaagcacttctgttaccccggactgagtatcaatagactgctcacgcggttgaaggagaaagcgttcgttatccggccaactacttcgaaaaacctagtaacaccgtggaagttgcagagtgtttcgctcagcactaccccagtgtagatcaggtcgatgagtcaccgcattccccacgggcgaccgtggcggtggctgcgttggcggcctgcccatggggaaacccatgggacgctctaatacagacatggtgcgaagagtctattgagctagttggtagtcctccggcccctgaatgcggctaatcctaactgcggagcacacaccctcaagccagagggcagtgtgtcgtaacgggcaactctgcagcggaaccgactactttgggtgtccgtgtttcattttattcctatactggctgcttatggtgacaattgagagatcgttaccatatagctattggattggccatccggtgactaatagagctattatatatccctttgttgggtttataccacttagcttgaaagaggttaaaacattacaattcattgttaagttgaatacagcaaaatggaagatgccaagaacatcaagaagggccctgctccattctaccctctggaagatggaacagccggcgagcagctgcacaaggccatgaagagatatgccctggtgcctggcacaatcgccttcacagatgcccacatcgaggtggacatcacctacgccgagtacttcgagatgtctgtgcggctggccgaagctatgaagcgctacggcctgaacaccaaccaccggatcgtcgtgtgcagcgagaacagcctgcagttcttcatgcctgtgctgggcgccctgttcatcggagttgctgtggcccctgccaacgacatctacaacgagcgcgagctgctgaacagcatgggcatctctcagcccaccgtggtgttcgtgtccaagaagggactgcagaaaatcctgaacgtgcagaagaagctgcccatcatccagaaaatcatcatcatggacagcaagaccgactaccagggcttccagagcatgtacaccttcgtgaccagccatctgccacctggcttcaacgagtacgacttcgtgcccgagagcttcgaccgggacaagacaatcgccctgatcatgaacagcagcggctctaccggactgcccaaaggtgttgccctgcctcatagaactgcctgcgtgcggtttagccacgccagagatcccatcttcggcaaccagatcatccccgacacagccatcctgagcgtggtgccttttcaccacggcttcggcatgttcaccacactgggctacctgatctgcggcttcagagtggtgctgatgtaccgcttcgaggaagaactgttcctgcggagcctgcaggactacaagatccagtctgctctgctggtgcctactctgttcagcttctttgccaagagcaccctgatcgataagtacgacctgagcaacctgcacgagatcgcctctggcggagcccctctgtctaaagaagtgggagaagccgtcgccaagcggttccatctgcctggcatcagacaaggctatggcctgaccgagacaaccagcgccattctgattacccctgagggcgacgataagcctggcgctgtgggaaaagtggtgccattcttcgaggccaaggtggtggatctggacaccggcaaaacactgggcgttaaccagaggggcgagctgtgtgttagaggccctatgatcatgagcggctacgtgaacaaccccgaggccacaaacgctctgatcgacaaggatggatggctgcacagcggcgacattgcctactgggacgaagatgagcacttcttcatcgtggaccggctgaagtccctgatcaagtacaagggctaccaggtggccccagccgagctggaatctattctgctgcaacaccccaacatcttcgatgccggcgttgcaggactgcccgatgatgatgctggcgaactgccagctgctgtggtggtgctggaacacggcaagaccatgaccgagaaagaaatcgtggactacgtggccagccaagtgaccaccgccaagaaactgagaggcggcgtggtgtttgtggacgaggtgccaaaaggcctgacaggcaagctggacgcccggaagatcagagagatcctgattaaggccaagaaaggcggcaagatcgccgtgtaatagctaactagacaaaacaccaaacaaacaagctgcgagccacggacttaaataattgagccttaaagaagaaattctttaagtggatgctctcaaactcagggaaacctaaatctagttatagacaaggcaatcctgagccaagccgaagtagtaattagtaagttaacaatagatgacttacaactaatcggaaggtgcagagactaaaaacaaccaaaaaaaatctagatatcggatcccggg

SEQ ID NO: 3388 - DNA, 2831 bp, synthetic construct
  source 1..2831: mol_type = other DNA; note = Ana1.168
taatacgactcactatagggagaccctcgaaaaaaaacacaaacaccgacgggagctaccctaacgtcaagacgagggtaaagagagagtccaattctcaaagccaataggcagtagcgaaagctgcaagagaatgaaaatccgtggctcgcagcaaacaccaaacaaaacaaacacaaaccaacaaaaattaaaacagcctgtgggttgatcccacccacaggcccattgggcgctagcactctggtatcacggtacctttgtgcgcctgttttataccccctcccccaactgtaacttagaagtaacacacaccgatcaacagtcagcgtggcacaccagccacgttttgatcaagcacttctgttaccccggactgagtatcaatagactgctcacgcggttgaaggagaaagcgttcgttatccggccaactacttcgaaaaacctagtaacaccgtggaagttgcagagtgtttcgctcagcactaccccagtgtagatcaggtcgatgagtcaccgcattccccacgggcgaccgtggcggtggctgcgttggcggcctgcccatggggaaacccatgggacgctctaatacagacatggtgcgaagagtctattgagctagttggtagtcctccggcccctgaatgcggctaatcctaactgcggagcacacaccctcaagccagagggcagtgtgtcgtaacgggcaactctgcagcggaaccgactactttgggtgtccgtgtttcattttattcctatactggctgcttatggtgacaattgagagatcgttaccatatagctattggattggccatccggtgactaatagagctattatatatccctttgttgggtttataccacttagcttgaaagaggttaaaacattacaattcattgttaagttgaatacagcaaaatggaagatgccaagaacatcaagaagggccctgctccattctaccctctggaagatggaacagccggcgagcagctgcacaaggccatgaagagatatgccctggtgcctggcacaatcgccttcacagatgcccacatcgaggtggacatcacctacgccgagtacttcgagatgtctgtgcggctggccgaagctatgaagcgctacggcctgaacaccaaccaccggatcgtcgtgtgcagcgagaacagcctgcagttcttcatgcctgtgctgggcgccctgttcatcggagttgctgtggcccctgccaacgacatctacaacgagcgcgagctgctgaacagcatgggcatctctcagcccaccgtggtgttcgtgtccaagaagggactgcagaaaatcctgaacgtgcagaagaagctgcccatcatccagaaaatcatcatcatggacagcaagaccgactaccagggcttccagagcatgtacaccttcgtgaccagccatctgccacctggcttcaacgagtacgacttcgtgcccgagagcttcgaccgggacaagacaatcgccctgatcatgaacagcagcggctctaccggactgcccaaaggtgttgccctgcctcatagaactgcctgcgtgcggtttagccacgccagagatcccatcttcggcaaccagatcatccccgacacagccatcctgagcgtggtgccttttcaccacggcttcggcatgttcaccacactgggctacctgatctgcggcttcagagtggtgctgatgtaccgcttcgaggaagaactgttcctgcggagcctgcaggactacaagatccagtctgctctgctggtgcctactctgttcagcttctttgccaagagcaccctgatcgataagtacgacctgagcaacctgcacgagatcgcctctggcggagcccctctgtctaaagaagtgggagaagccgtcgccaagcggttccatctgcctggcatcagacaaggctatggcctgaccgagacaaccagcgccattctgattacccctgagggcgacgataagcctggcgctgtgggaaaagtggtgccattcttcgaggccaaggtggtggatctggacaccggcaaaacactgggcgttaaccagaggggcgagctgtgtgttagaggccctatgatcatgagcggctacgtgaacaaccccgaggccacaaacgctctgatcgacaaggatggatggctgcacagcggcgacattgcctactgggacgaagatgagcacttcttcatcgtggaccggctgaagtccctgatcaagtacaagggctaccaggtggccccagccgagctggaatctattctgctgcaacaccccaacatcttcgatgccggcgttgcaggactgcccgatgatgatgctggcgaactgccagctgctgtggtggtgctggaacacggcaagaccatgaccgagaaagaaatcgtggactacgtggccagccaagtgaccaccgccaagaaactgagaggcggcgtggtgtttgtggacgaggtgccaaaaggcctgacaggcaagctggacgcccggaagatcagagagatcctgattaaggccaagaaaggcggcaagatcgccgtgtaatagctaactagacaaaacaccaaacaaacaagctgcgagccacggacttaaataattgagccttaaagaagaaattctttaagtggatgctctcaaactcagggaaacctaaatctagttatagacaaggcaatcctgagccaagccgaagtagtaattagtaagttaacaatagatgacttacaactaatcggaaggtgcagagactcaaaaacaaccaaaaaaaatctagatatcggatcccggg

SEQ ID NO: 3389 - DNA, 2831 bp, synthetic construct
  source 1..2831: mol_type = other DNA; note = Ana1.169
taatacgactcactatagggagaccctcgaaaaaaaacacaaacaccacgggagctaccctaacgtcaagacgagggtaaagagagagtccaattctcaaagccaataggcagtagcgaaagctgcaagagaatgaaaatccgtggctcgcagcaaacaccaaacaaaacaaacacaaaccaacaaaaattaaaacagcctgtgggttgatcccacccacaggcccattgggcgctagcactctggtatcacggtacctttgtgcgcctgttttataccccctcccccaactgtaacttagaagtaacacacaccgatcaacagtcagcgtggcacaccagccacgttttgatcaagcacttctgttaccccggactgagtatcaatagactgctcacgcggttgaaggagaaagcgttcgttatccggccaactacttcgaaaaacctagtaacaccgtggaagttgcagagtgtttcgctcagcactaccccagtgtagatcaggtcgatgagtcaccgcattccccacgggcgaccgtggcggtggctgcgttggcggcctgcccatggggaaacccatgggacgctctaatacagacatggtgcgaagagtctattgagctagttggtagtcctccggcccctgaatgcggctaatcctaactgcggagcacacaccctcaagccagagggcagtgtgtcgtaacgggcaactctgcagcggaaccgactactttgggtgtccgtgtttcattttattcctatactggctgcttatggtgacaattgagagatcgttaccatatagctattggattggccatccggtgactaatagagctattatatatccctttgttgggtttataccacttagcttgaaagaggttaaaacattacaattcattgttaagttgaatacagcaaaatggaagatgccaagaacatcaagaagggccctgctccattctaccctctggaagatggaacagccggcgagcagctgcacaaggccatgaagagatatgccctggtgcctggcacaatcgccttcacagatgcccacatcgaggtggacatcacctacgccgagtacttcgagatgtctgtgcggctggccgaagctatgaagcgctacggcctgaacaccaaccaccggatcgtcgtgtgcagcgagaacagcctgcagttcttcatgcctgtgctgggcgccctgttcatcggagttgctgtggcccctgccaacgacatctacaacgagcgcgagctgctgaacagcatgggcatctctcagcccaccgtggtgttcgtgtccaagaagggactgcagaaaatcctgaacgtgcagaagaagctgcccatcatccagaaaatcatcatcatggacagcaagaccgactaccagggcttccagagcatgtacaccttcgtgaccagccatctgccacctggcttcaacgagtacgacttcgtgcccgagagcttcgaccgggacaagacaatcgccctgatcatgaacagcagcggctctaccggactgcccaaaggtgttgccctgcctcatagaactgcctgcgtgcggtttagccacgccagagatcccatcttcggcaaccagatcatccccgacacagccatcctgagcgtggtgccttttcaccacggcttcggcatgttcaccacactgggctacctgatctgcggcttcagagtggtgctgatgtaccgcttcgaggaagaactgttcctgcggagcctgcaggactacaagatccagtctgctctgctggtgcctactctgttcagcttctttgccaagagcaccctgatcgataagtacgacctgagcaacctgcacgagatcgcctctggcggagcccctctgtctaaagaagtgggagaagccgtcgccaagcggttccatctgcctggcatcagacaaggctatggcctgaccgagacaaccagcgccattctgattacccctgagggcgacgataagcctggcgctgtgggaaaagtggtgccattcttcgaggccaaggtggtggatctggacaccggcaaaacactgggcgttaaccagaggggcgagctgtgtgttagaggccctatgatcatgagcggctacgtgaacaaccccgaggccacaaacgctctgatcgacaaggatggatggctgcacagcggcgacattgcctactgggacgaagatgagcacttcttcatcgtggaccggctgaagtccctgatcaagtacaagggctaccaggtggccccagccgagctggaatctattctgctgcaacaccccaacatcttcgatgccggcgttgcaggactgcccgatgatgatgctggcgaactgccagctgctgtggtggtgctggaacacggcaagaccatgaccgagaaagaaatcgtggactacgtggccagccaagtgaccaccgccaagaaactgagaggcggcgtggtgtttgtggacgaggtgccaaaaggcctgacaggcaagctggacgcccggaagatcagagagatcctgattaaggccaagaaaggcggcaagatcgccgtgtaatagctaactagacaaaacaccaaacaaacaagctgcgagccacggacttaaataattgagccttaaagaagaaattctttaagtggatgctctcaaactcagggaaacctaaatctagttatagacaaggcaatcctgagccaagccgaagtagtaattagtaagttaacaatagatgacttacaactaatcggaaggtgcagagactcgaaaaacaaccaaaaaaaatctagatatcggatcccggg

SEQ ID NO: 3390 - DNA, 2831 bp, synthetic construct
  source 1..2831: mol_type = other DNA; note = Ana1.170
taatacgactcactatagggagaccctcgaaaaaaaacacaaacacccgggagctaccctaacgtcaagacgagggtaaagagagagtccaattctcaaagccaataggcagtagcgaaagctgcaagagaatgaaaatccgtggctcgcagcaaacaccaaacaaaacaaacacaaaccaacaaaaattaaaacagcctgtgggttgatcccacccacaggcccattgggcgctagcactctggtatcacggtacctttgtgcgcctgttttataccccctcccccaactgtaacttagaagtaacacacaccgatcaacagtcagcgtggcacaccagccacgttttgatcaagcacttctgttaccccggactgagtatcaatagactgctcacgcggttgaaggagaaagcgttcgttatccggccaactacttcgaaaaacctagtaacaccgtggaagttgcagagtgtttcgctcagcactaccccagtgtagatcaggtcgatgagtcaccgcattccccacgggcgaccgtggcggtggctgcgttggcggcctgcccatggggaaacccatgggacgctctaatacagacatggtgcgaagagtctattgagctagttggtagtcctccggcccctgaatgcggctaatcctaactgcggagcacacaccctcaagccagagggcagtgtgtcgtaacgggcaactctgcagcggaaccgactactttgggtgtccgtgtttcattttattcctatactggctgcttatggtgacaattgagagatcgttaccatatagctattggattggccatccggtgactaatagagctattatatatccctttgttgggtttataccacttagcttgaaagaggttaaaacattacaattcattgttaagttgaatacagcaaaatggaagatgccaagaacatcaagaagggccctgctccattctaccctctggaagatggaacagccggcgagcagctgcacaaggccatgaagagatatgccctggtgcctggcacaatcgccttcacagatgcccacatcgaggtggacatcacctacgccgagtacttcgagatgtctgtgcggctggccgaagctatgaagcgctacggcctgaacaccaaccaccggatcgtcgtgtgcagcgagaacagcctgcagttcttcatgcctgtgctgggcgccctgttcatcggagttgctgtggcccctgccaacgacatctacaacgagcgcgagctgctgaacagcatgggcatctctcagcccaccgtggtgttcgtgtccaagaagggactgcagaaaatcctgaacgtgcagaagaagctgcccatcatccagaaaatcatcatcatggacagcaagaccgactaccagggcttccagagcatgtacaccttcgtgaccagccatctgccacctggcttcaacgagtacgacttcgtgcccgagagcttcgaccgggacaagacaatcgccctgatcatgaacagcagcggctctaccggactgcccaaaggtgttgccctgcctcatagaactgcctgcgtgcggtttagccacgccagagatcccatcttcggcaaccagatcatccccgacacagccatcctgagcgtggtgccttttcaccacggcttcggcatgttcaccacactgggctacctgatctgcggcttcagagtggtgctgatgtaccgcttcgaggaagaactgttcctgcggagcctgcaggactacaagatccagtctgctctgctggtgcctactctgttcagcttctttgccaagagcaccctgatcgataagtacgacctgagcaacctgcacgagatcgcctctggcggagcccctctgtctaaagaagtgggagaagccgtcgccaagcggttccatctgcctggcatcagacaaggctatggcctgaccgagacaaccagcgccattctgattacccctgagggcgacgataagcctggcgctgtgggaaaagtggtgccattcttcgaggccaaggtggtggatctggacaccggcaaaacactgggcgttaaccagaggggcgagctgtgtgttagaggccctatgatcatgagcggctacgtgaacaaccccgaggccacaaacgctctgatcgacaaggatggatggctgcacagcggcgacattgcctactgggacgaagatgagcacttcttcatcgtggaccggctgaagtccctgatcaagtacaagggctaccaggtggccccagccgagctggaatctattctgctgcaacaccccaacatcttcgatgccggcgttgcaggactgcccgatgatgatgctggcgaactgccagctgctgtggtggtgctggaacacggcaagaccatgaccgagaaagaaatcgtggactacgtggccagccaagtgaccaccgccaagaaactgagaggcggcgtggtgtttgtggacgaggtgccaaaaggcctgacaggcaagctggacgcccggaagatcagagagatcctgattaaggccaagaaaggcggcaagatcgccgtgtaatagctaactagacaaaacaccaaacaaacaagctgcgagccacggacttaaataattgagccttaaagaagaaattctttaagtggatgctctcaaactcagggaaacctaaatctagttatagacaaggcaatcctgagccaagccgaagtagtaattagtaagttaacaatagatgacttacaactaatcggaaggtgcagagactcgaaaaaacaaccaaaaaaaatctagatatcggatcccggg

SEQ ID NO: 3391 - DNA, 2831 bp, synthetic construct
  source 1..2831: mol_type = other DNA; note = Ana1.171
taatacgactcactatagggagaccctcgaaaaaaaacacaaacaccgggagctaccctaacgtcaagacgagggtaaagagagagtccaattctcaaagccaataggcagtagcgaaagctgcaagagaatgaaaatccgtggctcgcagcaaacaccaaacaaaacaaacacaaaccaacaaaaattaaaacagcctgtgggttgatcccacccacaggcccattgggcgctagcactctggtatcacggtacctttgtgcgcctgttttataccccctcccccaactgtaacttagaagtaacacacaccgatcaacagtcagcgtggcacaccagccacgttttgatcaagcacttctgttaccccggactgagtatcaatagactgctcacgcggttgaaggagaaagcgttcgttatccggccaactacttcgaaaaacctagtaacaccgtggaagttgcagagtgtttcgctcagcactaccccagtgtagatcaggtcgatgagtcaccgcattccccacgggcgaccgtggcggtggctgcgttggcggcctgcccatggggaaacccatgggacgctctaatacagacatggtgcgaagagtctattgagctagttggtagtcctccggcccctgaatgcggctaatcctaactgcggagcacacaccctcaagccagagggcagtgtgtcgtaacgggcaactctgcagcggaaccgactactttgggtgtccgtgtttcattttattcctatactggctgcttatggtgacaattgagagatcgttaccatatagctattggattggccatccggtgactaatagagctattatatatccctttgttgggtttataccacttagcttgaaagaggttaaaacattacaattcattgttaagttgaatacagcaaaatggaagatgccaagaacatcaagaagggccctgctccattctaccctctggaagatggaacagccggcgagcagctgcacaaggccatgaagagatatgccctggtgcctggcacaatcgccttcacagatgcccacatcgaggtggacatcacctacgccgagtacttcgagatgtctgtgcggctggccgaagctatgaagcgctacggcctgaacaccaaccaccggatcgtcgtgtgcagcgagaacagcctgcagttcttcatgcctgtgctgggcgccctgttcatcggagttgctgtggcccctgccaacgacatctacaacgagcgcgagctgctgaacagcatgggcatctctcagcccaccgtggtgttcgtgtccaagaagggactgcagaaaatcctgaacgtgcagaagaagctgcccatcatccagaaaatcatcatcatggacagcaagaccgactaccagggcttccagagcatgtacaccttcgtgaccagccatctgccacctggcttcaacgagtacgacttcgtgcccgagagcttcgaccgggacaagacaatcgccctgatcatgaacagcagcggctctaccggactgcccaaaggtgttgccctgcctcatagaactgcctgcgtgcggtttagccacgccagagatcccatcttcggcaaccagatcatccccgacacagccatcctgagcgtggtgccttttcaccacggcttcggcatgttcaccacactgggctacctgatctgcggcttcagagtggtgctgatgtaccgcttcgaggaagaactgttcctgcggagcctgcaggactacaagatccagtctgctctgctggtgcctactctgttcagcttctttgccaagagcaccctgatcgataagtacgacctgagcaacctgcacgagatcgcctctggcggagcccctctgtctaaagaagtgggagaagccgtcgccaagcggttccatctgcctggcatcagacaaggctatggcctgaccgagacaaccagcgccattctgattacccctgagggcgacgataagcctggcgctgtgggaaaagtggtgccattcttcgaggccaaggtggtggatctggacaccggcaaaacactgggcgttaaccagaggggcgagctgtgtgttagaggccctatgatcatgagcggctacgtgaacaaccccgaggccacaaacgctctgatcgacaaggatggatggctgcacagcggcgacattgcctactgggacgaagatgagcacttcttcatcgtggaccggctgaagtccctgatcaagtacaagggctaccaggtggccccagccgagctggaatctattctgctgcaacaccccaacatcttcgatgccggcgttgcaggactgcccgatgatgatgctggcgaactgccagctgctgtggtggtgctggaacacggcaagaccatgaccgagaaagaaatcgtggactacgtggccagccaagtgaccaccgccaagaaactgagaggcggcgtggtgtttgtggacgaggtgccaaaaggcctgacaggcaagctggacgcccggaagatcagagagatcctgattaaggccaagaaaggcggcaagatcgccgtgtaatagctaactagacaaaacaccaaacaaacaagctgcgagccacggacttaaataattgagccttaaagaagaaattctttaagtggatgctctcaaactcagggaaacctaaatctagttatagacaaggcaatcctgagccaagccgaagtagtaattagtaagttaacaatagatgacttacaactaatcggaaggtgcagagactcgacaaaaacaaccaaaaaaaatctagatatcggatcccggg

SEQ ID NO: 3392 - DNA, 2831 bp, synthetic construct
  source 1..2831: mol_type = other DNA; note = Ana1.172
taatacgactcactatagggagaccctcgaaaaaaaacacaaacaccggagctaccctaacgtcaagacgagggtaaagagagagtccaattctcaaagccaataggcagtagcgaaagctgcaagagaatgaaaatccgtggctcgcagcaaacaccaaacaaaacaaacacaaaccaacaaaaattaaaacagcctgtgggttgatcccacccacaggcccattgggcgctagcactctggtatcacggtacctttgtgcgcctgttttataccccctcccccaactgtaacttagaagtaacacacaccgatcaacagtcagcgtggcacaccagccacgttttgatcaagcacttctgttaccccggactgagtatcaatagactgctcacgcggttgaaggagaaagcgttcgttatccggccaactacttcgaaaaacctagtaacaccgtggaagttgcagagtgtttcgctcagcactaccccagtgtagatcaggtcgatgagtcaccgcattccccacgggcgaccgtggcggtggctgcgttggcggcctgcccatggggaaacccatgggacgctctaatacagacatggtgcgaagagtctattgagctagttggtagtcctccggcccctgaatgcggctaatcctaactgcggagcacacaccctcaagccagagggcagtgtgtcgtaacgggcaactctgcagcggaaccgactactttgggtgtccgtgtttcattttattcctatactggctgcttatggtgacaattgagagatcgttaccatatagctattggattggccatccggtgactaatagagctattatatatccctttgttgggtttataccacttagcttgaaagaggttaaaacattacaattcattgttaagttgaatacagcaaaatggaagatgccaagaacatcaagaagggccctgctccattctaccctctggaagatggaacagccggcgagcagctgcacaaggccatgaagagatatgccctggtgcctggcacaatcgccttcacagatgcccacatcgaggtggacatcacctacgccgagtacttcgagatgtctgtgcggctggccgaagctatgaagcgctacggcctgaacaccaaccaccggatcgtcgtgtgcagcgagaacagcctgcagttcttcatgcctgtgctgggcgccctgttcatcggagttgctgtggcccctgccaacgacatctacaacgagcgcgagctgctgaacagcatgggcatctctcagcccaccgtggtgttcgtgtccaagaagggactgcagaaaatcctgaacgtgcagaagaagctgcccatcatccagaaaatcatcatcatggacagcaagaccgactaccagggcttccagagcatgtacaccttcgtgaccagccatctgccacctggcttcaacgagtacgacttcgtgcccgagagcttcgaccgggacaagacaatcgccctgatcatgaacagcagcggctctaccggactgcccaaaggtgttgccctgcctcatagaactgcctgcgtgcggtttagccacgccagagatcccatcttcggcaaccagatcatccccgacacagccatcctgagcgtggtgccttttcaccacggcttcggcatgttcaccacactgggctacctgatctgcggcttcagagtggtgctgatgtaccgcttcgaggaagaactgttcctgcggagcctgcaggactacaagatccagtctgctctgctggtgcctactctgttcagcttctttgccaagagcaccctgatcgataagtacgacctgagcaacctgcacgagatcgcctctggcggagcccctctgtctaaagaagtgggagaagccgtcgccaagcggttccatctgcctggcatcagacaaggctatggcctgaccgagacaaccagcgccattctgattacccctgagggcgacgataagcctggcgctgtgggaaaagtggtgccattcttcgaggccaaggtggtggatctggacaccggcaaaacactgggcgttaaccagaggggcgagctgtgtgttagaggccctatgatcatgagcggctacgtgaacaaccccgaggccacaaacgctctgatcgacaaggatggatggctgcacagcggcgacattgcctactgggacgaagatgagcacttcttcatcgtggaccggctgaagtccctgatcaagtacaagggctaccaggtggccccagccgagctggaatctattctgctgcaacaccccaacatcttcgatgccggcgttgcaggactgcccgatgatgatgctggcgaactgccagctgctgtggtggtgctggaacacggcaagaccatgaccgagaaagaaatcgtggactacgtggccagccaagtgaccaccgccaagaaactgagaggcggcgtggtgtttgtggacgaggtgccaaaaggcctgacaggcaagctggacgcccggaagatcagagagatcctgattaaggccaagaaaggcggcaagatcgccgtgtaatagctaactagacaaaacaccaaacaaacaagctgcgagccacggacttaaataattgagccttaaagaagaaattctttaagtggatgctctcaaactcagggaaacctaaatctagttatagacaaggcaatcctgagccaagccgaagtagtaattagtaagttaacaatagatgacttacaactaatcggaaggtgcagagactcgacgaaaaacaaccaaaaaaaatctagatatcggatcccggg

SEQ ID NO: 3393 - DNA, 2831 bp, synthetic construct
  source 1..2831: mol_type = other DNA; note = Ana1.173
taatacgactcactatagggagaccctcgaaaaaaaacacaaacaccgagctaccctaacgtcaagacgagggtaaagagagagtccaattctcaaagccaataggcagtagcgaaagctgcaagagaatgaaaatccgtggctcgcagcaaacaccaaacaaaacaaacacaaaccaacaaaaattaaaacagcctgtgggttgatcccacccacaggcccattgggcgctagcactctggtatcacggtacctttgtgcgcctgttttataccccctcccccaactgtaacttagaagtaacacacaccgatcaacagtcagcgtggcacaccagccacgttttgatcaagcacttctgttaccccggactgagtatcaatagactgctcacgcggttgaaggagaaagcgttcgttatccggccaactacttcgaaaaacctagtaacaccgtggaagttgcagagtgtttcgctcagcactaccccagtgtagatcaggtcgatgagtcaccgcattccccacgggcgaccgtggcggtggctgcgttggcggcctgcccatggggaaacccatgggacgctctaatacagacatggtgcgaagagtctattgagctagttggtagtcctccggcccctgaatgcggctaatcctaactgcggagcacacaccctcaagccagagggcagtgtgtcgtaacgggcaactctgcagcggaaccgactactttgggtgtccgtgtttcattttattcctatactggctgcttatggtgacaattgagagatcgttaccatatagctattggattggccatccggtgactaatagagctattatatatccctttgttgggtttataccacttagcttgaaagaggttaaaacattacaattcattgttaagttgaatacagcaaaatggaagatgccaagaacatcaagaagggccctgctccattctaccctctggaagatggaacagccggcgagcagctgcacaaggccatgaagagatatgccctggtgcctggcacaatcgccttcacagatgcccacatcgaggtggacatcacctacgccgagtacttcgagatgtctgtgcggctggccgaagctatgaagcgctacggcctgaacaccaaccaccggatcgtcgtgtgcagcgagaacagcctgcagttcttcatgcctgtgctgggcgccctgttcatcggagttgctgtggcccctgccaacgacatctacaacgagcgcgagctgctgaacagcatgggcatctctcagcccaccgtggtgttcgtgtccaagaagggactgcagaaaatcctgaacgtgcagaagaagctgcccatcatccagaaaatcatcatcatggacagcaagaccgactaccagggcttccagagcatgtacaccttcgtgaccagccatctgccacctggcttcaacgagtacgacttcgtgcccgagagcttcgaccgggacaagacaatcgccctgatcatgaacagcagcggctctaccggactgcccaaaggtgttgccctgcctcatagaactgcctgcgtgcggtttagccacgccagagatcccatcttcggcaaccagatcatccccgacacagccatcctgagcgtggtgccttttcaccacggcttcggcatgttcaccacactgggctacctgatctgcggcttcagagtggtgctgatgtaccgcttcgaggaagaactgttcctgcggagcctgcaggactacaagatccagtctgctctgctggtgcctactctgttcagcttctttgccaagagcaccctgatcgataagtacgacctgagcaacctgcacgagatcgcctctggcggagcccctctgtctaaagaagtgggagaagccgtcgccaagcggttccatctgcctggcatcagacaaggctatggcctgaccgagacaaccagcgccattctgattacccctgagggcgacgataagcctggcgctgtgggaaaagtggtgccattcttcgaggccaaggtggtggatctggacaccggcaaaacactgggcgttaaccagaggggcgagctgtgtgttagaggccctatgatcatgagcggctacgtgaacaaccccgaggccacaaacgctctgatcgacaaggatggatggctgcacagcggcgacattgcctactgggacgaagatgagcacttcttcatcgtggaccggctgaagtccctgatcaagtacaagggctaccaggtggccccagccgagctggaatctattctgctgcaacaccccaacatcttcgatgccggcgttgcaggactgcccgatgatgatgctggcgaactgccagctgctgtggtggtgctggaacacggcaagaccatgaccgagaaagaaatcgtggactacgtggccagccaagtgaccaccgccaagaaactgagaggcggcgtggtgtttgtggacgaggtgccaaaaggcctgacaggcaagctggacgcccggaagatcagagagatcctgattaaggccaagaaaggcggcaagatcgccgtgtaatagctaactagacaaaacaccaaacaaacaagctgcgagccacggacttaaataattgagccttaaagaagaaattctttaagtggatgctctcaaactcagggaaacctaaatctagttatagacaaggcaatcctgagccaagccgaagtagtaattagtaagttaacaatagatgacttacaactaatcggaaggtgcagagactcgacggaaaaacaaccaaaaaaaatctagatatcggatcccggg

SEQ ID NO: 3394 - DNA, 2831 bp, synthetic construct
  source 1..2831: mol_type = other DNA; note = Ana1.174
taatacgactcactatagggagaccctcgaaaaaaaacacaaacaccagctaccctaacgtcaagacgagggtaaagagagagtccaattctcaaagccaataggcagtagcgaaagctgcaagagaatgaaaatccgtggctcgcagcaaacaccaaacaaaacaaacacaaaccaacaaaaattaaaacagcctgtgggttgatcccacccacaggcccattgggcgctagcactctggtatcacggtacctttgtgcgcctgttttataccccctcccccaactgtaacttagaagtaacacacaccgatcaacagtcagcgtggcacaccagccacgttttgatcaagcacttctgttaccccggactgagtatcaatagactgctcacgcggttgaaggagaaagcgttcgttatccggccaactacttcgaaaaacctagtaacaccgtggaagttgcagagtgtttcgctcagcactaccccagtgtagatcaggtcgatgagtcaccgcattccccacgggcgaccgtggcggtggctgcgttggcggcctgcccatggggaaacccatgggacgctctaatacagacatggtgcgaagagtctattgagctagttggtagtcctccggcccctgaatgcggctaatcctaactgcggagcacacaccctcaagccagagggcagtgtgtcgtaacgggcaactctgcagcggaaccgactactttgggtgtccgtgtttcattttattcctatactggctgcttatggtgacaattgagagatcgttaccatatagctattggattggccatccggtgactaatagagctattatatatccctttgttgggtttataccacttagcttgaaagaggttaaaacattacaattcattgttaagttgaatacagcaaaatggaagatgccaagaacatcaagaagggccctgctccattctaccctctggaagatggaacagccggcgagcagctgcacaaggccatgaagagatatgccctggtgcctggcacaatcgccttcacagatgcccacatcgaggtggacatcacctacgccgagtacttcgagatgtctgtgcggctggccgaagctatgaagcgctacggcctgaacaccaaccaccggatcgtcgtgtgcagcgagaacagcctgcagttcttcatgcctgtgctgggcgccctgttcatcggagttgctgtggcccctgccaacgacatctacaacgagcgcgagctgctgaacagcatgggcatctctcagcccaccgtggtgttcgtgtccaagaagggactgcagaaaatcctgaacgtgcagaagaagctgcccatcatccagaaaatcatcatcatggacagcaagaccgactaccagggcttccagagcatgtacaccttcgtgaccagccatctgccacctggcttcaacgagtacgacttcgtgcccgagagcttcgaccgggacaagacaatcgccctgatcatgaacagcagcggctctaccggactgcccaaaggtgttgccctgcctcatagaactgcctgcgtgcggtttagccacgccagagatcccatcttcggcaaccagatcatccccgacacagccatcctgagcgtggtgccttttcaccacggcttcggcatgttcaccacactgggctacctgatctgcggcttcagagtggtgctgatgtaccgcttcgaggaagaactgttcctgcggagcctgcaggactacaagatccagtctgctctgctggtgcctactctgttcagcttctttgccaagagcaccctgatcgataagtacgacctgagcaacctgcacgagatcgcctctggcggagcccctctgtctaaagaagtgggagaagccgtcgccaagcggttccatctgcctggcatcagacaaggctatggcctgaccgagacaaccagcgccattctgattacccctgagggcgacgataagcctggcgctgtgggaaaagtggtgccattcttcgaggccaaggtggtggatctggacaccggcaaaacactgggcgttaaccagaggggcgagctgtgtgttagaggccctatgatcatgagcggctacgtgaacaaccccgaggccacaaacgctctgatcgacaaggatggatggctgcacagcggcgacattgcctactgggacgaagatgagcacttcttcatcgtggaccggctgaagtccctgatcaagtacaagggctaccaggtggccccagccgagctggaatctattctgctgcaacaccccaacatcttcgatgccggcgttgcaggactgcccgatgatgatgctggcgaactgccagctgctgtggtggtgctggaacacggcaagaccatgaccgagaaagaaatcgtggactacgtggccagccaagtgaccaccgccaagaaactgagaggcggcgtggtgtttgtggacgaggtgccaaaaggcctgacaggcaagctggacgcccggaagatcagagagatcctgattaaggccaagaaaggcggcaagatcgccgtgtaatagctaactagacaaaacaccaaacaaacaagctgcgagccacggacttaaataattgagccttaaagaagaaattctttaagtggatgctctcaaactcagggaaacctaaatctagttatagacaaggcaatcctgagccaagccgaagtagtaattagtaagttaacaatagatgacttacaactaatcggaaggtgcagagactcgacgggaaaaacaaccaaaaaaaatctagatatcggatcccggg

SEQ ID NO: 3395 - DNA, 2831 bp, synthetic construct
  source 1..2831: mol_type = other DNA; note = Ana1.175
taatacgactcactatagggagaccctcgaaaaaaaacacaaacaccgctaccctaacgtcaagacgagggtaaagagagagtccaattctcaaagccaataggcagtagcgaaagctgcaagagaatgaaaatccgtggctcgcagcaaacaccaaacaaaacaaacacaaaccaacaaaaattaaaacagcctgtgggttgatcccacccacaggcccattgggcgctagcactctggtatcacggtacctttgtgcgcctgttttataccccctcccccaactgtaacttagaagtaacacacaccgatcaacagtcagcgtggcacaccagccacgttttgatcaagcacttctgttaccccggactgagtatcaatagactgctcacgcggttgaaggagaaagcgttcgttatccggccaactacttcgaaaaacctagtaacaccgtggaagttgcagagtgtttcgctcagcactaccccagtgtagatcaggtcgatgagtcaccgcattccccacgggcgaccgtggcggtggctgcgttggcggcctgcccatggggaaacccatgggacgctctaatacagacatggtgcgaagagtctattgagctagttggtagtcctccggcccctgaatgcggctaatcctaactgcggagcacacaccctcaagccagagggcagtgtgtcgtaacgggcaactctgcagcggaaccgactactttgggtgtccgtgtttcattttattcctatactggctgcttatggtgacaattgagagatcgttaccatatagctattggattggccatccggtgactaatagagctattatatatccctttgttgggtttataccacttagcttgaaagaggttaaaacattacaattcattgttaagttgaatacagcaaaatggaagatgccaagaacatcaagaagggccctgctccattctaccctctggaagatggaacagccggcgagcagctgcacaaggccatgaagagatatgccctggtgcctggcacaatcgccttcacagatgcccacatcgaggtggacatcacctacgccgagtacttcgagatgtctgtgcggctggccgaagctatgaagcgctacggcctgaacaccaaccaccggatcgtcgtgtgcagcgagaacagcctgcagttcttcatgcctgtgctgggcgccctgttcatcggagttgctgtggcccctgccaacgacatctacaacgagcgcgagctgctgaacagcatgggcatctctcagcccaccgtggtgttcgtgtccaagaagggactgcagaaaatcctgaacgtgcagaagaagctgcccatcatccagaaaatcatcatcatggacagcaagaccgactaccagggcttccagagcatgtacaccttcgtgaccagccatctgccacctggcttcaacgagtacgacttcgtgcccgagagcttcgaccgggacaagacaatcgccctgatcatgaacagcagcggctctaccggactgcccaaaggtgttgccctgcctcatagaactgcctgcgtgcggtttagccacgccagagatcccatcttcggcaaccagatcatccccgacacagccatcctgagcgtggtgccttttcaccacggcttcggcatgttcaccacactgggctacctgatctgcggcttcagagtggtgctgatgtaccgcttcgaggaagaactgttcctgcggagcctgcaggactacaagatccagtctgctctgctggtgcctactctgttcagcttctttgccaagagcaccctgatcgataagtacgacctgagcaacctgcacgagatcgcctctggcggagcccctctgtctaaagaagtgggagaagccgtcgccaagcggttccatctgcctggcatcagacaaggctatggcctgaccgagacaaccagcgccattctgattacccctgagggcgacgataagcctggcgctgtgggaaaagtggtgccattcttcgaggccaaggtggtggatctggacaccggcaaaacactgggcgttaaccagaggggcgagctgtgtgttagaggccctatgatcatgagcggctacgtgaacaaccccgaggccacaaacgctctgatcgacaaggatggatggctgcacagcggcgacattgcctactgggacgaagatgagcacttcttcatcgtggaccggctgaagtccctgatcaagtacaagggctaccaggtggccccagccgagctggaatctattctgctgcaacaccccaacatcttcgatgccggcgttgcaggactgcccgatgatgatgctggcgaactgccagctgctgtggtggtgctggaacacggcaagaccatgaccgagaaagaaatcgtggactacgtggccagccaagtgaccaccgccaagaaactgagaggcggcgtggtgtttgtggacgaggtgccaaaaggcctgacaggcaagctggacgcccggaagatcagagagatcctgattaaggccaagaaaggcggcaagatcgccgtgtaatagctaactagacaaaacaccaaacaaacaagctgcgagccacggacttaaataattgagccttaaagaagaaattctttaagtggatgctctcaaactcagggaaacctaaatctagttatagacaaggcaatcctgagccaagccgaagtagtaattagtaagttaacaatagatgacttacaactaatcggaaggtgcagagactcgacgggaaaaaacaaccaaaaaaaatctagatatcggatcccggg

SEQ ID NO: 3396 - DNA, 2831 bp, synthetic construct
  source 1..2831: mol_type = other DNA; note = Ana1.176
taatacgactcactatagggagaccctcgaaaaaaaacacaaacaccctaccctaacgtcaagacgagggtaaagagagagtccaattctcaaagccaataggcagtagcgaaagctgcaagagaatgaaaatccgtggctcgcagcaaacaccaaacaaaacaaacacaaaccaacaaaaattaaaacagcctgtgggttgatcccacccacaggcccattgggcgctagcactctggtatcacggtacctttgtgcgcctgttttataccccctcccccaactgtaacttagaagtaacacacaccgatcaacagtcagcgtggcacaccagccacgttttgatcaagcacttctgttaccccggactgagtatcaatagactgctcacgcggttgaaggagaaagcgttcgttatccggccaactacttcgaaaaacctagtaacaccgtggaagttgcagagtgtttcgctcagcactaccccagtgtagatcaggtcgatgagtcaccgcattccccacgggcgaccgtggcggtggctgcgttggcggcctgcccatggggaaacccatgggacgctctaatacagacatggtgcgaagagtctattgagctagttggtagtcctccggcccctgaatgcggctaatcctaactgcggagcacacaccctcaagccagagggcagtgtgtcgtaacgggcaactctgcagcggaaccgactactttgggtgtccgtgtttcattttattcctatactggctgcttatggtgacaattgagagatcgttaccatatagctattggattggccatccggtgactaatagagctattatatatccctttgttgggtttataccacttagcttgaaagaggttaaaacattacaattcattgttaagttgaatacagcaaaatggaagatgccaagaacatcaagaagggccctgctccattctaccctctggaagatggaacagccggcgagcagctgcacaaggccatgaagagatatgccctggtgcctggcacaatcgccttcacagatgcccacatcgaggtggacatcacctacgccgagtacttcgagatgtctgtgcggctggccgaagctatgaagcgctacggcctgaacaccaaccaccggatcgtcgtgtgcagcgagaacagcctgcagttcttcatgcctgtgctgggcgccctgttcatcggagttgctgtggcccctgccaacgacatctacaacgagcgcgagctgctgaacagcatgggcatctctcagcccaccgtggtgttcgtgtccaagaagggactgcagaaaatcctgaacgtgcagaagaagctgcccatcatccagaaaatcatcatcatggacagcaagaccgactaccagggcttccagagcatgtacaccttcgtgaccagccatctgccacctggcttcaacgagtacgacttcgtgcccgagagcttcgaccgggacaagacaatcgccctgatcatgaacagcagcggctctaccggactgcccaaaggtgttgccctgcctcatagaactgcctgcgtgcggtttagccacgccagagatcccatcttcggcaaccagatcatccccgacacagccatcctgagcgtggtgccttttcaccacggcttcggcatgttcaccacactgggctacctgatctgcggcttcagagtggtgctgatgtaccgcttcgaggaagaactgttcctgcggagcctgcaggactacaagatccagtctgctctgctggtgcctactctgttcagcttctttgccaagagcaccctgatcgataagtacgacctgagcaacctgcacgagatcgcctctggcggagcccctctgtctaaagaagtgggagaagccgtcgccaagcggttccatctgcctggcatcagacaaggctatggcctgaccgagacaaccagcgccattctgattacccctgagggcgacgataagcctggcgctgtgggaaaagtggtgccattcttcgaggccaaggtggtggatctggacaccggcaaaacactgggcgttaaccagaggggcgagctgtgtgttagaggccctatgatcatgagcggctacgtgaacaaccccgaggccacaaacgctctgatcgacaaggatggatggctgcacagcggcgacattgcctactgggacgaagatgagcacttcttcatcgtggaccggctgaagtccctgatcaagtacaagggctaccaggtggccccagccgagctggaatctattctgctgcaacaccccaacatcttcgatgccggcgttgcaggactgcccgatgatgatgctggcgaactgccagctgctgtggtggtgctggaacacggcaagaccatgaccgagaaagaaatcgtggactacgtggccagccaagtgaccaccgccaagaaactgagaggcggcgtggtgtttgtggacgaggtgccaaaaggcctgacaggcaagctggacgcccggaagatcagagagatcctgattaaggccaagaaaggcggcaagatcgccgtgtaatagctaactagacaaaacaccaaacaaacaagctgcgagccacggacttaaataattgagccttaaagaagaaattctttaagtggatgctctcaaactcagggaaacctaaatctagttatagacaaggcaatcctgagccaagccgaagtagtaattagtaagttaacaatagatgacttacaactaatcggaaggtgcagagactcgacgggagaaaaacaaccaaaaaaaatctagatatcggatcccggg

SEQ ID NO: 3397 - DNA, 2831 bp, synthetic construct
  source 1..2831: mol_type = other DNA; note = Ana1.177
taatacgactcactatagggagaccctcgaaaaaaaacacaaacacctaccctaacgtcaagacgagggtaaagagagagtccaattctcaaagccaataggcagtagcgaaagctgcaagagaatgaaaatccgtggctcgcagcaaacaccaaacaaaacaaacacaaaccaacaaaaattaaaacagcctgtgggttgatcccacccacaggcccattgggcgctagcactctggtatcacggtacctttgtgcgcctgttttataccccctcccccaactgtaacttagaagtaacacacaccgatcaacagtcagcgtggcacaccagccacgttttgatcaagcacttctgttaccccggactgagtatcaatagactgctcacgcggttgaaggagaaagcgttcgttatccggccaactacttcgaaaaacctagtaacaccgtggaagttgcagagtgtttcgctcagcactaccccagtgtagatcaggtcgatgagtcaccgcattccccacgggcgaccgtggcggtggctgcgttggcggcctgcccatggggaaacccatgggacgctctaatacagacatggtgcgaagagtctattgagctagttggtagtcctccggcccctgaatgcggctaatcctaactgcggagcacacaccctcaagccagagggcagtgtgtcgtaacgggcaactctgcagcggaaccgactactttgggtgtccgtgtttcattttattcctatactggctgcttatggtgacaattgagagatcgttaccatatagctattggattggccatccggtgactaatagagctattatatatccctttgttgggtttataccacttagcttgaaagaggttaaaacattacaattcattgttaagttgaatacagcaaaatggaagatgccaagaacatcaagaagggccctgctccattctaccctctggaagatggaacagccggcgagcagctgcacaaggccatgaagagatatgccctggtgcctggcacaatcgccttcacagatgcccacatcgaggtggacatcacctacgccgagtacttcgagatgtctgtgcggctggccgaagctatgaagcgctacggcctgaacaccaaccaccggatcgtcgtgtgcagcgagaacagcctgcagttcttcatgcctgtgctgggcgccctgttcatcggagttgctgtggcccctgccaacgacatctacaacgagcgcgagctgctgaacagcatgggcatctctcagcccaccgtggtgttcgtgtccaagaagggactgcagaaaatcctgaacgtgcagaagaagctgcccatcatccagaaaatcatcatcatggacagcaagaccgactaccagggcttccagagcatgtacaccttcgtgaccagccatctgccacctggcttcaacgagtacgacttcgtgcccgagagcttcgaccgggacaagacaatcgccctgatcatgaacagcagcggctctaccggactgcccaaaggtgttgccctgcctcatagaactgcctgcgtgcggtttagccacgccagagatcccatcttcggcaaccagatcatccccgacacagccatcctgagcgtggtgccttttcaccacggcttcggcatgttcaccacactgggctacctgatctgcggcttcagagtggtgctgatgtaccgcttcgaggaagaactgttcctgcggagcctgcaggactacaagatccagtctgctctgctggtgcctactctgttcagcttctttgccaagagcaccctgatcgataagtacgacctgagcaacctgcacgagatcgcctctggcggagcccctctgtctaaagaagtgggagaagccgtcgccaagcggttccatctgcctggcatcagacaaggctatggcctgaccgagacaaccagcgccattctgattacccctgagggcgacgataagcctggcgctgtgggaaaagtggtgccattcttcgaggccaaggtggtggatctggacaccggcaaaacactgggcgttaaccagaggggcgagctgtgtgttagaggccctatgatcatgagcggctacgtgaacaaccccgaggccacaaacgctctgatcgacaaggatggatggctgcacagcggcgacattgcctactgggacgaagatgagcacttcttcatcgtggaccggctgaagtccctgatcaagtacaagggctaccaggtggccccagccgagctggaatctattctgctgcaacaccccaacatcttcgatgccggcgttgcaggactgcccgatgatgatgctggcgaactgccagctgctgtggtggtgctggaacacggcaagaccatgaccgagaaagaaatcgtggactacgtggccagccaagtgaccaccgccaagaaactgagaggcggcgtggtgtttgtggacgaggtgccaaaaggcctgacaggcaagctggacgcccggaagatcagagagatcctgattaaggccaagaaaggcggcaagatcgccgtgtaatagctaactagacaaaacaccaaacaaacaagctgcgagccacggacttaaataattgagccttaaagaagaaattctttaagtggatgctctcaaactcagggaaacctaaatctagttatagacaaggcaatcctgagccaagccgaagtagtaattagtaagttaacaatagatgacttacaactaatcggaaggtgcagagactcgacgggagcaaaaacaaccaaaaaaaatctagatatcggatcccggg

SEQ ID NO: 3398 - DNA, 2831 bp, synthetic construct
  source 1..2831: mol_type = other DNA; note = Ana1.178
taatacgactcactatagggagaccctcgaaaaaaaacacaaacaccaccctaacgtcaagacgagggtaaagagagagtccaattctcaaagccaataggcagtagcgaaagctgcaagagaatgaaaatccgtggctcgcagcaaacaccaaacaaaacaaacacaaaccaacaaaaattaaaacagcctgtgggttgatcccacccacaggcccattgggcgctagcactctggtatcacggtacctttgtgcgcctgttttataccccctcccccaactgtaacttagaagtaacacacaccgatcaacagtcagcgtggcacaccagccacgttttgatcaagcacttctgttaccccggactgagtatcaatagactgctcacgcggttgaaggagaaagcgttcgttatccggccaactacttcgaaaaacctagtaacaccgtggaagttgcagagtgtttcgctcagcactaccccagtgtagatcaggtcgatgagtcaccgcattccccacgggcgaccgtggcggtggctgcgttggcggcctgcccatggggaaacccatgggacgctctaatacagacatggtgcgaagagtctattgagctagttggtagtcctccggcccctgaatgcggctaatcctaactgcggagcacacaccctcaagccagagggcagtgtgtcgtaacgggcaactctgcagcggaaccgactactttgggtgtccgtgtttcattttattcctatactggctgcttatggtgacaattgagagatcgttaccatatagctattggattggccatccggtgactaatagagctattatatatccctttgttgggtttataccacttagcttgaaagaggttaaaacattacaattcattgttaagttgaatacagcaaaatggaagatgccaagaacatcaagaagggccctgctccattctaccctctggaagatggaacagccggcgagcagctgcacaaggccatgaagagatatgccctggtgcctggcacaatcgccttcacagatgcccacatcgaggtggacatcacctacgccgagtacttcgagatgtctgtgcggctggccgaagctatgaagcgctacggcctgaacaccaaccaccggatcgtcgtgtgcagcgagaacagcctgcagttcttcatgcctgtgctgggcgccctgttcatcggagttgctgtggcccctgccaacgacatctacaacgagcgcgagctgctgaacagcatgggcatctctcagcccaccgtggtgttcgtgtccaagaagggactgcagaaaatcctgaacgtgcagaagaagctgcccatcatccagaaaatcatcatcatggacagcaagaccgactaccagggcttccagagcatgtacaccttcgtgaccagccatctgccacctggcttcaacgagtacgacttcgtgcccgagagcttcgaccgggacaagacaatcgccctgatcatgaacagcagcggctctaccggactgcccaaaggtgttgccctgcctcatagaactgcctgcgtgcggtttagccacgccagagatcccatcttcggcaaccagatcatccccgacacagccatcctgagcgtggtgccttttcaccacggcttcggcatgttcaccacactgggctacctgatctgcggcttcagagtggtgctgatgtaccgcttcgaggaagaactgttcctgcggagcctgcaggactacaagatccagtctgctctgctggtgcctactctgttcagcttctttgccaagagcaccctgatcgataagtacgacctgagcaacctgcacgagatcgcctctggcggagcccctctgtctaaagaagtgggagaagccgtcgccaagcggttccatctgcctggcatcagacaaggctatggcctgaccgagacaaccagcgccattctgattacccctgagggcgacgataagcctggcgctgtgggaaaagtggtgccattcttcgaggccaaggtggtggatctggacaccggcaaaacactgggcgttaaccagaggggcgagctgtgtgttagaggccctatgatcatgagcggctacgtgaacaaccccgaggccacaaacgctctgatcgacaaggatggatggctgcacagcggcgacattgcctactgggacgaagatgagcacttcttcatcgtggaccggctgaagtccctgatcaagtacaagggctaccaggtggccccagccgagctggaatctattctgctgcaacaccccaacatcttcgatgccggcgttgcaggactgcccgatgatgatgctggcgaactgccagctgctgtggtggtgctggaacacggcaagaccatgaccgagaaagaaatcgtggactacgtggccagccaagtgaccaccgccaagaaactgagaggcggcgtggtgtttgtggacgaggtgccaaaaggcctgacaggcaagctggacgcccggaagatcagagagatcctgattaaggccaagaaaggcggcaagatcgccgtgtaatagctaactagacaaaacaccaaacaaacaagctgcgagccacggacttaaataattgagccttaaagaagaaattctttaagtggatgctctcaaactcagggaaacctaaatctagttatagacaaggcaatcctgagccaagccgaagtagtaattagtaagttaacaatagatgacttacaactaatcggaaggtgcagagactcgacgggagctaaaaacaaccaaaaaaaatctagatatcggatcccggg

SEQ ID NO: 3399 - DNA, 2831 bp, synthetic construct
  source 1..2831: mol_type = other DNA; note = Ana1.179
taatacgactcactatagggagaccctcgaaaaaaaacacaaacaccccctaacgtcaagacgagggtaaagagagagtccaattctcaaagccaataggcagtagcgaaagctgcaagagaatgaaaatccgtggctcgcagcaaacaccaaacaaaacaaacacaaaccaacaaaaattaaaacagcctgtgggttgatcccacccacaggcccattgggcgctagcactctggtatcacggtacctttgtgcgcctgttttataccccctcccccaactgtaacttagaagtaacacacaccgatcaacagtcagcgtggcacaccagccacgttttgatcaagcacttctgttaccccggactgagtatcaatagactgctcacgcggttgaaggagaaagcgttcgttatccggccaactacttcgaaaaacctagtaacaccgtggaagttgcagagtgtttcgctcagcactaccccagtgtagatcaggtcgatgagtcaccgcattccccacgggcgaccgtggcggtggctgcgttggcggcctgcccatggggaaacccatgggacgctctaatacagacatggtgcgaagagtctattgagctagttggtagtcctccggcccctgaatgcggctaatcctaactgcggagcacacaccctcaagccagagggcagtgtgtcgtaacgggcaactctgcagcggaaccgactactttgggtgtccgtgtttcattttattcctatactggctgcttatggtgacaattgagagatcgttaccatatagctattggattggccatccggtgactaatagagctattatatatccctttgttgggtttataccacttagcttgaaagaggttaaaacattacaattcattgttaagttgaatacagcaaaatggaagatgccaagaacatcaagaagggccctgctccattctaccctctggaagatggaacagccggcgagcagctgcacaaggccatgaagagatatgccctggtgcctggcacaatcgccttcacagatgcccacatcgaggtggacatcacctacgccgagtacttcgagatgtctgtgcggctggccgaagctatgaagcgctacggcctgaacaccaaccaccggatcgtcgtgtgcagcgagaacagcctgcagttcttcatgcctgtgctgggcgccctgttcatcggagttgctgtggcccctgccaacgacatctacaacgagcgcgagctgctgaacagcatgggcatctctcagcccaccgtggtgttcgtgtccaagaagggactgcagaaaatcctgaacgtgcagaagaagctgcccatcatccagaaaatcatcatcatggacagcaagaccgactaccagggcttccagagcatgtacaccttcgtgaccagccatctgccacctggcttcaacgagtacgacttcgtgcccgagagcttcgaccgggacaagacaatcgccctgatcatgaacagcagcggctctaccggactgcccaaaggtgttgccctgcctcatagaactgcctgcgtgcggtttagccacgccagagatcccatcttcggcaaccagatcatccccgacacagccatcctgagcgtggtgccttttcaccacggcttcggcatgttcaccacactgggctacctgatctgcggcttcagagtggtgctgatgtaccgcttcgaggaagaactgttcctgcggagcctgcaggactacaagatccagtctgctctgctggtgcctactctgttcagcttctttgccaagagcaccctgatcgataagtacgacctgagcaacctgcacgagatcgcctctggcggagcccctctgtctaaagaagtgggagaagccgtcgccaagcggttccatctgcctggcatcagacaaggctatggcctgaccgagacaaccagcgccattctgattacccctgagggcgacgataagcctggcgctgtgggaaaagtggtgccattcttcgaggccaaggtggtggatctggacaccggcaaaacactgggcgttaaccagaggggcgagctgtgtgttagaggccctatgatcatgagcggctacgtgaacaaccccgaggccacaaacgctctgatcgacaaggatggatggctgcacagcggcgacattgcctactgggacgaagatgagcacttcttcatcgtggaccggctgaagtccctgatcaagtacaagggctaccaggtggccccagccgagctggaatctattctgctgcaacaccccaacatcttcgatgccggcgttgcaggactgcccgatgatgatgctggcgaactgccagctgctgtggtggtgctggaacacggcaagaccatgaccgagaaagaaatcgtggactacgtggccagccaagtgaccaccgccaagaaactgagaggcggcgtggtgtttgtggacgaggtgccaaaaggcctgacaggcaagctggacgcccggaagatcagagagatcctgattaaggccaagaaaggcggcaagatcgccgtgtaatagctaactagacaaaacaccaaacaaacaagctgcgagccacggacttaaataattgagccttaaagaagaaattctttaagtggatgctctcaaactcagggaaacctaaatctagttatagacaaggcaatcctgagccaagccgaagtagtaattagtaagttaacaatagatgacttacaactaatcggaaggtgcagagactcgacgggagctaaaaaacaaccaaaaaaaatctagatatcggatcccggg

SEQ ID NO: 3400 - DNA, 2831 bp, synthetic construct
  source 1..2831: mol_type = other DNA; note = Ana1.180
taatacgactcactatagggagaccctcgaaaaaaaacacaaacacccctaacgtcaagacgagggtaaagagagagtccaattctcaaagccaataggcagtagcgaaagctgcaagagaatgaaaatccgtggctcgcagcaaacaccaaacaaaacaaacacaaaccaacaaaaattaaaacagcctgtgggttgatcccacccacaggcccattgggcgctagcactctggtatcacggtacctttgtgcgcctgttttataccccctcccccaactgtaacttagaagtaacacacaccgatcaacagtcagcgtggcacaccagccacgttttgatcaagcacttctgttaccccggactgagtatcaatagactgctcacgcggttgaaggagaaagcgttcgttatccggccaactacttcgaaaaacctagtaacaccgtggaagttgcagagtgtttcgctcagcactaccccagtgtagatcaggtcgatgagtcaccgcattccccacgggcgaccgtggcggtggctgcgttggcggcctgcccatggggaaacccatgggacgctctaatacagacatggtgcgaagagtctattgagctagttggtagtcctccggcccctgaatgcggctaatcctaactgcggagcacacaccctcaagccagagggcagtgtgtcgtaacgggcaactctgcagcggaaccgactactttgggtgtccgtgtttcattttattcctatactggctgcttatggtgacaattgagagatcgttaccatatagctattggattggccatccggtgactaatagagctattatatatccctttgttgggtttataccacttagcttgaaagaggttaaaacattacaattcattgttaagttgaatacagcaaaatggaagatgccaagaacatcaagaagggccctgctccattctaccctctggaagatggaacagccggcgagcagctgcacaaggccatgaagagatatgccctggtgcctggcacaatcgccttcacagatgcccacatcgaggtggacatcacctacgccgagtacttcgagatgtctgtgcggctggccgaagctatgaagcgctacggcctgaacaccaaccaccggatcgtcgtgtgcagcgagaacagcctgcagttcttcatgcctgtgctgggcgccctgttcatcggagttgctgtggcccctgccaacgacatctacaacgagcgcgagctgctgaacagcatgggcatctctcagcccaccgtggtgttcgtgtccaagaagggactgcagaaaatcctgaacgtgcagaagaagctgcccatcatccagaaaatcatcatcatggacagcaagaccgactaccagggcttccagagcatgtacaccttcgtgaccagccatctgccacctggcttcaacgagtacgacttcgtgcccgagagcttcgaccgggacaagacaatcgccctgatcatgaacagcagcggctctaccggactgcccaaaggtgttgccctgcctcatagaactgcctgcgtgcggtttagccacgccagagatcccatcttcggcaaccagatcatccccgacacagccatcctgagcgtggtgccttttcaccacggcttcggcatgttcaccacactgggctacctgatctgcggcttcagagtggtgctgatgtaccgcttcgaggaagaactgttcctgcggagcctgcaggactacaagatccagtctgctctgctggtgcctactctgttcagcttctttgccaagagcaccctgatcgataagtacgacctgagcaacctgcacgagatcgcctctggcggagcccctctgtctaaagaagtgggagaagccgtcgccaagcggttccatctgcctggcatcagacaaggctatggcctgaccgagacaaccagcgccattctgattacccctgagggcgacgataagcctggcgctgtgggaaaagtggtgccattcttcgaggccaaggtggtggatctggacaccggcaaaacactgggcgttaaccagaggggcgagctgtgtgttagaggccctatgatcatgagcggctacgtgaacaaccccgaggccacaaacgctctgatcgacaaggatggatggctgcacagcggcgacattgcctactgggacgaagatgagcacttcttcatcgtggaccggctgaagtccctgatcaagtacaagggctaccaggtggccccagccgagctggaatctattctgctgcaacaccccaacatcttcgatgccggcgttgcaggactgcccgatgatgatgctggcgaactgccagctgctgtggtggtgctggaacacggcaagaccatgaccgagaaagaaatcgtggactacgtggccagccaagtgaccaccgccaagaaactgagaggcggcgtggtgtttgtggacgaggtgccaaaaggcctgacaggcaagctggacgcccggaagatcagagagatcctgattaaggccaagaaaggcggcaagatcgccgtgtaatagctaactagacaaaacaccaaacaaacaagctgcgagccacggacttaaataattgagccttaaagaagaaattctttaagtggatgctctcaaactcagggaaacctaaatctagttatagacaaggcaatcctgagccaagccgaagtagtaattagtaagttaacaatagatgacttacaactaatcggaaggtgcagagactcgacgggagctacaaaaacaaccaaaaaaaatctagatatcggatcccggg

SEQ ID NO: 3401 - DNA, 2831 bp, synthetic construct
  source 1..2831: mol_type = other DNA; note = Ana1.181
taatacgactcactatagggagaccctcgaaaaaaaacacaaacaccctaacgtcaagacgagggtaaagagagagtccaattctcaaagccaataggcagtagcgaaagctgcaagagaatgaaaatccgtggctcgcagcaaacaccaaacaaaacaaacacaaaccaacaaaaattaaaacagcctgtgggttgatcccacccacaggcccattgggcgctagcactctggtatcacggtacctttgtgcgcctgttttataccccctcccccaactgtaacttagaagtaacacacaccgatcaacagtcagcgtggcacaccagccacgttttgatcaagcacttctgttaccccggactgagtatcaatagactgctcacgcggttgaaggagaaagcgttcgttatccggccaactacttcgaaaaacctagtaacaccgtggaagttgcagagtgtttcgctcagcactaccccagtgtagatcaggtcgatgagtcaccgcattccccacgggcgaccgtggcggtggctgcgttggcggcctgcccatggggaaacccatgggacgctctaatacagacatggtgcgaagagtctattgagctagttggtagtcctccggcccctgaatgcggctaatcctaactgcggagcacacaccctcaagccagagggcagtgtgtcgtaacgggcaactctgcagcggaaccgactactttgggtgtccgtgtttcattttattcctatactggctgcttatggtgacaattgagagatcgttaccatatagctattggattggccatccggtgactaatagagctattatatatccctttgttgggtttataccacttagcttgaaagaggttaaaacattacaattcattgttaagttgaatacagcaaaatggaagatgccaagaacatcaagaagggccctgctccattctaccctctggaagatggaacagccggcgagcagctgcacaaggccatgaagagatatgccctggtgcctggcacaatcgccttcacagatgcccacatcgaggtggacatcacctacgccgagtacttcgagatgtctgtgcggctggccgaagctatgaagcgctacggcctgaacaccaaccaccggatcgtcgtgtgcagcgagaacagcctgcagttcttcatgcctgtgctgggcgccctgttcatcggagttgctgtggcccctgccaacgacatctacaacgagcgcgagctgctgaacagcatgggcatctctcagcccaccgtggtgttcgtgtccaagaagggactgcagaaaatcctgaacgtgcagaagaagctgcccatcatccagaaaatcatcatcatggacagcaagaccgactaccagggcttccagagcatgtacaccttcgtgaccagccatctgccacctggcttcaacgagtacgacttcgtgcccgagagcttcgaccgggacaagacaatcgccctgatcatgaacagcagcggctctaccggactgcccaaaggtgttgccctgcctcatagaactgcctgcgtgcggtttagccacgccagagatcccatcttcggcaaccagatcatccccgacacagccatcctgagcgtggtgccttttcaccacggcttcggcatgttcaccacactgggctacctgatctgcggcttcagagtggtgctgatgtaccgcttcgaggaagaactgttcctgcggagcctgcaggactacaagatccagtctgctctgctggtgcctactctgttcagcttctttgccaagagcaccctgatcgataagtacgacctgagcaacctgcacgagatcgcctctggcggagcccctctgtctaaagaagtgggagaagccgtcgccaagcggttccatctgcctggcatcagacaaggctatggcctgaccgagacaaccagcgccattctgattacccctgagggcgacgataagcctggcgctgtgggaaaagtggtgccattcttcgaggccaaggtggtggatctggacaccggcaaaacactgggcgttaaccagaggggcgagctgtgtgttagaggccctatgatcatgagcggctacgtgaacaaccccgaggccacaaacgctctgatcgacaaggatggatggctgcacagcggcgacattgcctactgggacgaagatgagcacttcttcatcgtggaccggctgaagtccctgatcaagtacaagggctaccaggtggccccagccgagctggaatctattctgctgcaacaccccaacatcttcgatgccggcgttgcaggactgcccgatgatgatgctggcgaactgccagctgctgtggtggtgctggaacacggcaagaccatgaccgagaaagaaatcgtggactacgtggccagccaagtgaccaccgccaagaaactgagaggcggcgtggtgtttgtggacgaggtgccaaaaggcctgacaggcaagctggacgcccggaagatcagagagatcctgattaaggccaagaaaggcggcaagatcgccgtgtaatagctaactagacaaaacaccaaacaaacaagctgcgagccacggacttaaataattgagccttaaagaagaaattctttaagtggatgctctcaaactcagggaaacctaaatctagttatagacaaggcaatcctgagccaagccgaagtagtaattagtaagttaacaatagatgacttacaactaatcggaaggtgcagagactcgacgggagctaccaaaaacaaccaaaaaaaatctagatatcggatcccggg

(The sequence listing continues in the following parts.)